United States Patent Application Publication US 2002/0147140 A1 - sequence listing, part 2

SEQ ID NO: 2628 - DNA, 562 bp, Homo sapiens
cagtcatcttgatttggaaaaatgaaaacaaagagctttacagagaattaaaggagaatttttatgaagaaattaaacctgctaaagaccttctaaatgccacccttgaggcattcaaaaagatttcaatttgtgaacttcaagattttttttgtcaggataggatgcgtatcaaagtgactgacaaaaaagaagttatgtgggcagggtgcggtggctcacacctgtaatcccagcactttgggaggctgaggcaggtggatcatctgaggtcaggagtttgagaccagcttggccaacatgatgaaaccccatctctattaaaaatacaaaaaattagccaggcgtggtggcgggcgcctataatcccagctacttgggaggctgaggcaggagaatcgcttgaatccaggatgcagaggttgcagtgagctgagattgcgccattgcactctagcctgggcaacaagagcgaaactccgttgcaaaaaaaaaaaaaaaaagtaatgtgtatttatttgttggatttttgtctttcatcctttggaatgttttctttaaa

SEQ ID NO: 2629 - DNA, 346 bp, Homo sapiens
aaaaacatgtaaagacttatcaacattgcattgatttttcatataaagatattatctttaggcagggtgtagtggctcatgcctatagtcccagcgtgttggaaggccaagtggggaagatctcttgaacctaggggttccagactagcctggacaacatggcaaaaccctgtctctataaaaaaatacagaaattagtggggcatggtggcatgcacctgtagtcccagctactcgagaggattgcttgagccaggaggttgaggctgcactgagacaaaatcacacccctatataccagcttgggcaagagtgtgagactgtctcaaaaaaaaaaaaaaaaaaa

SEQ ID NO: 2630 - DNA, 401 bp, Homo sapiens
ggtttgccatcttaacataactattccctaaatcatattacaagattatcgaagttcaatgtctgtacaaaagtggctccagctaagctttcatgctaagtaaatgtaaaatgccatcattttaaatttgatccagtagattatcataaaatacagactccagaatagtagtgtgttttgctgatttctctaatttgtttagttttcctctaggggcactcatatacttctaaggaatggcagaccttgaaattctaggtcttcctgtaaataatgaaaggaagggaatgtgggaagaaaagcaaccaagggaaggatacagaagtaactaattaaatgaggggcttgtcctgggtagaatggaattaaagaacagaggtgtgctcaccacctatggaaaa

SEQ ID NO: 2631 - DNA, 2343 bp, Homo sapiens
attctttcttttttaaactgtaaaataagaccagtcacaagtttattctgtaatttttctataacaggcattcaattctgtagaaaattgcaaacatttatttttaatatttacatttgggtctgtaaacaaagctggtaaaaaaaatcctaagaatttccatacatatttataaaaatttcaagaatatgatccttatcacttctgaaaagtatgcattttttaaattctaaaagccagtaaatgtagaagttgaaggggacgagaaaaacactgttaacagattatctgaattttcctcttcccaaatatctaaaacattgcatataccactcttttctgtatagcttgtgaaacccaaaaattctgatttctcttcactagtctgaaacaagtctggtaaagactgtaccggtgatctacaaattctgttttcttcttgtgtaataaattcagttcttttatcaaattcagcatttggttccagattttcttttctattttgtcctaataatattttcacttttcgatgtattttaccagaaggtaaactatccatattcttgatgtcacattcattgggttcctcaggaggagtatgtgatggagcctttgcctgaacagttaggtgctcttgtgaactgtttattgttatcagaccagaatcatgagtaaatattgaatgaaggtccttttccttgagatcctttgctggaaaaagcacaggatctgacttttgttttggttgagatgcactattatctgtacagaaatcagaaacatgaacagatgcctgtatgttacatttatagttatctatccttagttcttgtaagtcattttcacttaatgtgtgttcggaaatgtcaagaatgcattcctgtttgtttttatgtagaggtagctgtgtaaaattctgtcttatgtcatcttcagctgtacttaacatggaacatttattactcattttcttgttaagccctctcaagtcatttgaagggtgggggatgggctctgaaataaacagaagtttttttcagtttcctgggtctctttatacaggaaattctgctctatcaccgttatatcatcttcccggcaatctttctgagaaatatgttgcaattccactttttcctttcgttcagtctttttcaggacacttgcagaaacaggagaaagggatccaacactgtattttattagtttctagatcttcatatttctgcaagcaacattcacaatatccttttttcttcttctctttcaactggagttgaattgagtttccaccatacttatcgccatctgtttggattcttagtttaacctgagtttgcttttgcatactagatggcttgtctacatcaaatggactgcagggcttctgaatagaataatttataaaaggcatattggtcagctgaagataaaatggcctataaagttggctcatatcttccacctttacaaaaggctttttgagtcttcctgttcttgttttttgtgcaccactaccaactcttttgcccccatctcttactgaagtacttgatttcttgagtgaatgcaacttttttcttttgttcaatgtagtatctaatgtcatcaatatgaagaatttttactccccatgacaaggcatttgataatatactatatgaaggaataaaatcatggtccttgatagctttttcaactaataattttcctctgcttaaacacactgtgtctggtgacttaaatgaacttccatcatggctgggatgaggtgaagtggtttctgcagtatttgcagattctggacttggtacaggagaaattcgacccaaggtttgtgcaaatttagcttcctttttatttgaaataagataactgatatctttgctgagaaattcttcaactcgccctcccagatccttaatgtccttttgcagtttttcagatatggtgacagaaggtaagtcaaggtaaaatacttttccccaaagtggcttatatttggatttttctggcctgttatcagttttcagagatttcaaagatggtctgtttttttcatttttgacttggattccaccctggaaatgtcctttactgtggatcctcacggctccagagttcatggcagtcgcccggcacctacatgctgggtccggagaaagggtcgcgccgggcagccgcgaaagcaaggcttccccacgtctgttgacaggacggccgcctctctacttccgctggctacggcctctacgcagtagaggtaccgcgtctgtgggtcgggtttccggggccggatccggctccaaggcacggaggaggaaggcgcaaatcacaaacgag

SEQ ID NO: 2632 - DNA, 411 bp, Homo sapiens
aaattacagacgcccaaacctaaactcagatatactgacttaggtaggtggagggaaggtcctggaaatctgcaccctaaggaacttcatgggtgatgcagatgattaggtctgtttgttaaccactggtttagagaattgtggcaagccttggagaggggggattgctgattaaataaaaacacattacatgttatctatgtaattatctgtgtgaacatacatacaggactttgattctacctgttgctgagccattaagtttctccaataatgcaaaatgcaaatttcttgtcaagaaatgtattgttctcatcatctgcagtccaactcacttacttgtataaacaagcacccaaacaaaaacataacccatggcaacaccatgaattatataatgttaacctatag

SEQ ID NO: 2633 - DNA, 245 bp, Homo sapiens
ttacctctctgagcctgttttcttatttacagaatggggctgaaaatatcagtctccagcatctttttgagaatttaatgagatgacatatataaagcctctattatcctgtctcagataaataaatgttagcaatgttagttcttttcttcctctttcttctttcccataattctctacccaactgcactttcttcaacttttgacaatagggtctgatacaaaaagagtaaaaaaaaaaaaaa

SEQ ID NO: 2634 - DNA, 4543 bp, Homo sapiens
aagaaatgccctatctgcaaagcagatgatatttgtgatcacaccttggagcaacagcagatgcagcccctttgtttcaattgtccaatttgtgacaagatcttcccagctacagagaagcagatctttgaagaccacgtgttctgccactctctctgagtatcccaacctcttggatgtatacagagattttatagaatagaccctatagcttctaccatgagttatatgagtcaagatcctgcctaacttgaaattattagggatttactcagccctgctgccgctaacagtggagttatgtcactgatctgaaggtcactgttaagggcttctgctgccatccttgtgggttgctacctttaagtcgcataactctagctgtatcatcctctcacctgtcattcttctgagggtctcagtacaagggccctgggatggagccaacctgggtattcacaacaggcctgacttgatactaagtgattagttttccaagttgtcccactgccattcaaagtcagcccttgagtgtatttgttctcagtcctaaccctggggccagagattggtccgaggttgagaattccttcctcctcatccttggtgttgctttctccaaatgattgttttagactagccaaaaatgccgtggcaaagagctcagaaatccaatttggataccaaaggtttctcatgttaatttctcagcccccaaagaagcatcttactcctgaaccttagacaggaagtattgtttcagtcacagaaagcttttctgggtacctctggttagcactttctactctctgatatttcctatgtacatagcttttattgttgtaaatcctttcttaatggttaaataggattgttagcaactatgggtttgcagttttctgagtaggtgagttttgaatatgggtaaatcagaataatgagacaacttgttaatctctttaatactaaaaataaattactcttctatttcagggacttaggtaatttaaaataaaccttcaatttatggtcttctgttttgaagctcatgggaaaattgtgatcaaaagggctatgggaagggcagaccccgccaatgatttctcttcacctgtcttaagattaaataaaaaagagtgtcctggcagttatcttgaggtggggaaggaggtgatgaaacattagtttgtgaaatccaaggccctggcttgctttctttctttttttttttttttttttgaaacagtctctctctgtcacccaggctggcgtgcaatggcgcagttgactcactacagcctctgcctcccaggttcaagcgattctcatgccttagcctcccaagtagctgggattacaggtgtgtgccgcaatgcccagctaatttttgtgtttttagtagagacagggtttcactatgttggccaggctggtctcgaactcctggcctcacgtgatctgtccacttcagccgtccaaagtgctgggattacaagcgtgagccactgtgctgggcccgaggccctgacttcttgctgtaactttccatgcattttttttaaaaggagcagtgtggattttcgcaccctttgtgaactaagttcaatgcgctctatccaaatttgcctaattgaactataagaaagtaataattccattttctatcccctcagggactgaacaaatggaaataactcccaggcagtatcaggtggtcactacagagacttccacaaaaacttttgaatgatgtgaaacacgatgtcatgaataagggttgagccaactatagctctgtgttcctactgggctttccctaatgtggttgggagttatgccctagactaactgtattgtcctagtcacagctccttgctttgatttcatccttgataaaatgaagatgaaacttacactacttctccaagccttttgctgtcttaagaataagacctgagattaacactaaccctagaatagaaatgtaatagggagatggtaataaaggagtttttctggcacataccctccctacagaatttctgttgctccccagatccagtgaagaattgcagtttcatttattttgtaccagtcagctcttaattaagtacatgaatggagaggaacagtggtgcacataatccaaatcagtgaataccattttctggtgaattacccacccctttgcccctgctaccccgagggttaccatgattgtcaacagcagcaggagcccttccacagggcttggtaaaaaaaccagttgaggtgttaatgaccctttttgctgggtgtaaaacaaagcatctttaaccactgttcattatccccagctgctcttaccaaggctttgaagggggaaattatgctctaggcagccactagtagtaaacaatagttcttttttttgagacagagtttcactctgtcacccaggctagagtgcagtaggcgctcactgcaagctccgcctcccgagttcacaccattgtcctgcctcagcctcccgagtagctgggactacaggcgcccgccaccgctcccggctaattttttgtacttttagtagagacggggtttcaccgcgttagccaggatggtctcgatctcctgacctcatgatccaccggcctcggcctcccaaagtgctgggattacaggcatgagccactgcgcccagccaacaatagttcttatataacccactgcccaccctggccttcctccatccccctcgcacccacacattatatagctgtaaaatacctgcaaaaaataggaagttatgagagcaaatagttatctgagttgaatttttgaatctttgtacttgttatggcaacaggttttccttcctaatttcttttctcttggtctaatattaaaatgtttttgcattaccttagcatgcttactggatgggcagtgaagggagaataaagtcaccctggcacatgtgagtgtgaaagaaagctaacttaaaaaaaggaggccgggcacggtggctcatgcctgtaatcccagcactttgtgaggccgaggcgggtggatcacgaggtcaggagttcaagaccagcctggccaacatggtgaaaccccatctctactaaaactacaaaaaattagccaggtgtggcagcaggcacctgtaatcccagctactcgggaggctgaggcagagaattgcttgaacccgggaggcggaggttgcagtgagctaagatcgcaccactttactccagcctgagcgacagagcaagactctgtctcaaaaaaaaaaaaaaagagagagagagttggcaagatatttggtaaacctaggccttaacacctatagcttcagctcttttccctggtcttgctaaaaattgggatgaaatgtgactgccttgatgttcaaatatcattctcctgtgatttgattttctacggtggcagtggcttacactgaggtaagcatactctaacctggtctcctaggaacaaatgtggatgaaatgtggatgcagtccattacctgggaaaaaagcaaaatggactctacatagagacaagatccaaagagatattcatctgattgccctgagttaaccaacaataggccataagctcagtgaagttacactggccccagtgctttccttagctgctctcatataaatattcaaaagtcttagtcggtgctcacgcctgtaatcccagcactttgggaggccaaggtgggcagatcacgaggtcaggagatcgagaccatcctggctaacatggtgaaaccccatctctactaaaaatgcaaaaaattagcggggcttggtggcaggcacctgtagtcccagctactcgggaggctgaggcaggagaatggcgtgaacccgggaggtggagcttgcagtgagccaagatcgcaccactgcactccagcctgggagacaaggtgagactctgtctcaaaaaaaaaaaaaaaaaaaaaaaaagtcttggccgagtgcagtggctcatgcccataatcccagcactttgggaggctgaggcaggtgtatcacgagatcaggagttcgagaccagcctggccaacgtggtgaaaccccatctctactaaaaattcaaaaactagccaggcatggtggcgggctcctgtaatcccagctactcgggaggctgaggcaggagaatcgcttgaacccaggaagtggaggttacagtgagccgagatcgcaccactgcactccagcctgggtgaaagagcaagactccatctcaaaaaaaaaaaaaaaaaaagtttttagggccagtcatggtggctcacatctgtaatcccatcactttaggaggccgaggtgggcagatcacctgaggtcaggagttcaagaccagcctggccaacatgttgaaaccccatctctactaaaaatatgaaaaattagccaggagtgctggctcacgcctgtaatcccaactcttcgggaggccgaggcgggtggatcataaggtcaggagtttcggtccagcctggccaatatggtgaaaccccgtctctact

SEQ ID NO: 2635 - DNA, 6515 bp, Homo sapiens
cttttgaagagggagaacagcagattgctcagttacatgggtctggattttaattctttgccgtatcaagtacctacttcagatgaaggaggcgcaagacaaaatccaggacttgcctatggaaacccatattctggtaagacaactttcccattccaactggaaggaccctgcctgcatccctttcccctactaaatttttgtttctgaggtgctaattaagaccagtctcattgttaagacttgctgggcagaagctgaggacccagtagaaagattgccaggcgagaagtgttaattgagaaataaatctgaatccagaagacacaaatcagatcattcgcctagaggcagcagacacaaattgagtcccgtggctatattccaaatgtgtaaatcagagaaatgtctttatgtagaagatatacacatacaaagctgaggaagctaattaaggttttgaaatggtagcaagagaggcaagttatgccgcccaggaactagcagttacagcagccaccctgatggctaaccaaggatgacagaaacgtgctccacagagactcctcgatggtaggacaggaaatgggggtgaaaaggacttggggtaacatgtccttgccaaacagggagcttttctcatttgtctccaaaagcaatatgagatctcatttactttttgggacagttaaagcagcagtattatctttagagttacaaccagatgtttataacaggcaacaagtttatttttcctttaaaataagtttgtggccgtgcgcggtggctcacacctgtaatcccagcactgtgggaggccgaggcgggcagatcacctgaggtcaggagttcgagacaagcgtggctaacgtggtgaaaccctgtctctactaaaaatacaaaaattagctgggcatagtagtggacttggctcactgcaacctccgtctcctgggctcaaccgatcctctcacctcagtgcaacctccgcctcctgggctcacctgatcctctcacctcagcctaccaagtagcagagactaaggcgccagccaccacacccagctaatttttgtattttatgtagagatggggttttgccatgttgcccaggccggtttcgaactcctgagcttaagcagtccacccacctcagcctcccaaagtgctgggatatgtgagccatcgtacctgactgtggatacagtcttaaaacctattctcagatagtcattaaattgttactgtttttattaaaatctcattttccccactctgaaaatagctttgttgtttttttctgactgtataacatatatatatatgtatatatatatatgtgtgtgtatatatatatatataaagcctgtgtgtgtgtgtgtgtgtgtgtgaaatgaaaatacaattttcatttgtaattttattttgaaataatgaaaatacaatttcaggctgggtgtcgtggctcactcctgtaatcccagcactttgagaggccgaggcaggcggatcacttgaggtcaggagtttgagaccagcctggccaacatggagaaaccctgtctctactaaaactaccaaaaattagccaggcatggtggtaggcacctgtaatcccagctactcaggaggctgaggcaggagaattgcttgaacccaggagacagaggctgcagtgagctgagatcacactagtgcactccagcctaggcgacaaagcgagactctgtctcaaaaaaaaaaaaaaatacgatttcattatttatgttttcttttcaccttatcattgacctagatcccctctatcagaagtaacggtatatatatgagagagaaagaatcagaggcattgaggagaaagggaacaatgaaagttacaggaaatatctgccagaacacagttggagaagctagggatggtattttctcattgaatgagatcttttttattcttttcaggtatccaagaaagttcttcccccagcccggtaagtatttgattcatgagaatattcccacaaagcacttgaaaatttcccttcctgctccagttcatgggagaaccatagggagacaggttcattttgataactccagaagtcagctggatcagtttgttttgggcccaaggctgagccagcctgttgtggaagggagatgaaagcacagttcatccatcagcattttgcttaggatctatacctttgaattatttggtagcataagtagggaggagatctgaaccaggcagctagccaaacaagttctgtccaatgccccttcaaggctagaagctatgttggctatttcagcaatattaggccatttcaatatctaggggttagacgaagcctggtaagcatcttcaaatgtgcattctcttcattcattcactatttcttgagtgcataaccatgtgccagtcattatgctaggcactgaggatacagtggaagacaggatggccacatctgtgccacatatagcttacatttgtactgacctctttgctcttcctcccagctctccatcaagaaatgccctatctgcaaagcagatgatatttgtgatcacaccttggagcaacagcagatgcagcccctttgtttcaattgtccaatttgtgacaagatcttcccagctacagagaagcagatctttgaagaccacgtgttctgccactctctctgagtatcccaacctcttggatgtatacagagattttatagaatagaacctatagcttctaccatgagttatatgagtcaagatcctgcctaacctgaaattattagggatttactcagccctgctgccgctaacagtggagttatgtcactgatctgaaggtcactgttaagggcttctgctgccatccttgtgggttgctacctttaagtcgcataactctagctgtatcatcctctcacctgtcattcttctgagggtctcagtacaagggccctgggatggagccaacctgggtattcacaacaggcctgacttgatactaagtgattagttttccaagttgtcccactgccattcaaagtcagcccttgagtgtatttgttctcagtcctaaccctggggccagagattggtccgaggttgagaattccttcctcctcatccttggtgttgctttctccaaatgattgttttagactagccaaaaatgccgtggcaaagagctcagaaatccaatttggataccaaaggtttctcatgttaatttctcagcccccaaagaagcatcttactcctgaaccttagacaggaagtattgtttcagtcacagaaagcttttctgggtacctctggttagcactttctactctctgatatttcctatgtacatagcttttattgttgtaaatcctttcttaatggttaaataggattgttagcaactatgggtttgcagttttctgagtaggtgagttttgaatatgggtaaatcagaataatgagacaacttgttaatctctttaatactaaaaataaattactcttctatttcagggacttaggtaatttaaaataaaccttcaatttatggtcttctgttttgaagctcatgggaaaattgtgatcaaaagggctatgggaagggcagaccccgccaatgatttctcttcacctgtcttaagattaaataaaaaagagtgtcctggcagttatcttgaggtggggaaggaggtgatgaaacattagtttgtgaaatccaaggccctggcttgctttctttcttttttttttttttttttttgaaacagtctctctctgtcacccaggctggcgtgcaatggcgcagttgactcactacagcctctgcctcccaggttcaagcgattctcatgccttagcctcccaagtagctgggattacaggtgtgtgccgcaatgcccagctaatttttgtgtttttagtagagacagggtttcactatgttggccaggctggtctcgaactcctggcctcacgtgatctgtccacttcagccgtccaaagtgctgggattacaagcgtgagccactgtgctgggcccgaggccctgacttcttgctgtaactttccatgcattttttttaaaaggagcagtgtggattttcgcaccctttgtgaactaagttcaatgcgctctatccaaatttgcctaattgaactataagaaagtaataattccattttctatcccctcagggactgaacaaatggaaataactcccaggcagtatcaggtggtcactacagagacttccacaaaaacttttgaatgatgtgaaacacgatgtcatgaataagggttgagccaactatagctctgtgttcctactgggctttccctaatgtggttgggagttatgccctagactaactgtattgtcctagtcacagctccttgctttgatttcatccttgataaaatgaagatgaaacttacactacttctccaagccttttgctgtcttaagaataagacctgagattaacactaaccctagaatagaaatgtaatagggagatggtaataaaggagtttttctggcacataccctccctacagaatttctgttgctccccagatccagtgaagaattgcagtttcatttattttgtaccagtcagctcttaattaagtacatgaatggagaggaacagtggtgcacataatccaaatcagtgaataccattttctggtgaattacccacccctttgcccctgctaccccgagggttaccatgattgtcaacagcagcaggagcccttccacagggcttggtaaaaaaaccagttgaggtgttaatgaccctttttgctgggtgtaaaacaaagcatctttaaccactgttcattatccccagctgctcttaccaaggctttgaagggggaaattatgctctaggcagccactagtagtaaacaatagttcttttttttgagacagagtttcactctgtcacccaggctagagtgcagtaggcgctcactgcaagctccgcctcccgagttcacaccattgtcctgcctcagcctcccgagtagctgggactacaggcgcccgccaccgctcccggctaattttttgtacttttagtagagacggggtttcaccgcgttagccaggatggtctcgatctcctgacctcatgatccaccggcctcggcctcccaaagtgctgggattacaggcatgagccactgcgcccagccaacaatagttcttatataacccactgcccaccctggccttcctccatccccctcgcacccacacattatatagctgtaaaatacctgcaaaaaataggaagttatgagagcaaatagttatctgagttgaatttttgaatctttgtacttgttatggcaacaggttttccttcctaatttcttttctcttggtctaatattaaaatgtttttgcattaccttagcatgcttactggatgggcagtgaagggagaataaagtcaccctggcacatgtgagtgtgaaagaaagctaacttaaaaaaaggaggccgggcacggtggctcatgcctgtaatcccagcactttgtgaggccgaggcgggtggatcacgaggtcaggagttcaagaccagcctggccaacatggtgaaaccccatctctactaaaactacaaaaaattagccaggtgtggcggcaggcacctgtaatcccagctactcgggaggctgaggcagagaatttgaacccgggaggcggaggttgcagtgagctaagatcgcaccactttactccagcctgagcgacagagcaagactctgtctcaaaaaaaaaaaaaaaagagagagagagttggcaagatatttggtaaacctaggccttaacacctatagcttcagctcttttccctggtcttgctaaaaattgggatgaaatgtgactgccttgatgttcaaatatcattctcctgtgatttgattttctacggtggcagtggcttacactgaggtaagcatactctaacctggtctcctaggaacaaatgtggatgaaatgtggatgcagtccattacctgggaaaaaagcaaaatggactctacatagagacaagatccaaagagatattcatctgattgccctgagttaaccaacaataggccataagctcagtgaagttacactggccccagtgctttccttagctgctctcatataaatattcaaaagtcttagtcggtgctcacgcctgtaatcccagcactttgggaggccgaggtgggcagatcacgaggtcaggagatcgagaccatcctggctaacatggtgaaaccccatctctactaaaaatgcaaaaaattagcggggcttggtggcaggcacctgtagtcccagctactcgggaggctgaggcaggagaatggcgtgaacccgggaggtggagcttgcagtgagccaagatcgcaccactgcactccagcctgggagacaaggtgagactctgtctcaaaaaaaaaaaaaaaaaaaaaaaaaaaaagtc

SEQ ID NO: 2636 - DNA, 141 bp, Homo sapiens
ggcgtggtggtgggtgcctgtagtctgggctactcaggaggctgaggcaggagaatcacttgaacccaggaggcagaggttgcagtgagccgagatcgtgccactgcaatccagcctgggcgacagagcgagactgtctca

SEQ ID NO: 2637 - DNA, 423 bp, Homo sapiens
ggcatggtggcgggctcctgtaatcccagctactcgggaggctgaggcaggagaatcgcttgaacccaggaagtggaggttacagtgagccgagatcgcaccactgcactccagcctgggtgaaagagcaagactccatctcaaaaaaaaaaaaaaaaaaagtttttagggccagtcatggtggctcacatctgtaatcccatcactttaggaggccgaggtgggcagatcacctgaggtcaggagttcaagaccagcctggccaacatgttgaaaccccatctctactaaaaatatgaaaaattagccaggagtgctggctcacgcctgtaatcccaactcttcgggaggccgaggcgggtggatcataaggtcaggagtttcggtccagcctggccaatatggtgaaaccccgtctctact

SEQ ID NO: 2638 - DNA, 3406 bp, Homo sapiens
ctcttccacggcctcaataagaaatgcagcctttgattttaacactgtaaggctcattttgtacttctggcctccagaaacttgggatgataaatttgtgctatttaagccactaagtttgtggtaatttgttaccacagcataggaaatgaatacaaatatcaaagtgtttgtggacatattttaagactacctcaggcaaccctctggtcacaaattatttatagttctcccacatgcaaaataaacttaccccttctaaggccccaaagtcttatcccattatagcatcaattcaaagttcagaatcttatcctctacgtaagtccagggaagatgagacttcttgggtgtaattccttaaatacagctactcaagtacatgcttttcaatctgaagttctgcgaacaaaaagaaaaaggtcatatgctcctttccccacagcaaccaatgtaaaacagcaggggcagggagataactgctatagacactcctgttccaacaggtggaaaccaaggtgcacagaagtcactggttcatagcaattctgaaatccatttgagtacaggtttgcagttctacactcaaagcctgggaataactccctatggcttttggttccaccttctgggctcttggttttatcctctaagtcatccttttttgtgtgaaagggagatgtgtttggacctaaatagttttcttagcctgcttcctgtttgtagaaatgcgtttgtagaaagggtccaaaggcccctttcctttttgtactctttttcagctcaagctgacagtatttctgacaatacaattctcttaaaacaatttttgaatctactgtgaatcttactgggttttagtccaggagacaaaagccatggcagcaaatacctttgagatatgtctttttctaccttgggcttctgctgaaggacaaagaccttaagtttcttagaagccctattgtttgaatgagaggacctgtgagccatactcttaaaatcttttttctgagacggagtcttactctgtcaccgaggctggagtgcagtggcgagatcttgggtcactgcaatctccgcctcccgggttcaagcaattctccagcctcagcctcctgagtagctgggattacaggcacccgccaccacgctcggctaatttttttgtatttttgtagagatgaggtttcaccatgttggccaggctggtctccaactcctgacctcaggtgatccacccacctcggcctctcaaagtgttgggattacaggcgtgaaccactgcacccagccactcttaaaatctttagagagtctttgcctgattgaacagtactccgaggtaccatccttaaacacaacaggcgtggggagtgggaaagcgggtgatggagggtggattgaggggtatttacaaaaataaaagacatggtctcagcactcagatatttcagaatctttggggagataaactatatacatttaaaaagcactaaagaattacaggtcatatccctaatgagtatagatacaaaaatcctcaacaaaatactagcatactgacttcaacaatacattcaaagaataattcaccatgatctagtgggatttatccctgggatgcaagtatggttcaacatatgggaatctataaatgtgatacaccacataaacaaaaatcatatgatcatttcaatagatacataaaaagcatttgatgaaattaaacatcctttcatgatgaaaattctcaacaaattaggtatagaaggaacgtacctcaacacaataaaggtcatatatgataagcctacagctaacattctcaacagtgaaaagttgaaggcatttcctttaagatcaggaacaagaaaaggatgcccactcttactgcttttttttttttcaacatagcactggaagttctagtcagaataattaagcaagagaaataaaaggcatcttaataggaaaggaagcattggaattttctctttgttgacaatatgatcttatatatagaaaacccaaaagactccaccaaaaaactgttagaactaataaagtcagtaaaattgctgtacacagtcaacacacaaaaatcagcagcatttctagaggccaacaacaaatccaaaaaagaaattaagaaaataattctacttatattagcaaaaaccaaaactgaaacaaaaaaggtgtaaatttaaccaagaaagtgaaagatctttatactaaaaactaaaaaacactgatgaaagaaattggaaaaaacacaaataaacgaaaagacatcccatgttcttggagtggaataattaatataattaaaatgcccatgctactcaaagtgatctatagattcaatgcaattcctatcaaaattccagagttatttttcatggaaataaaaaaatcctaaaattcatatggaaccgtaaaagatcccaaataaccaaagcaatcttgagcaaaaagaacaaagttgggccaggtgtggtggctcacgcctgtaatcccagtactttgggaggccgaggcgggcagatcatgagatcaggagttcaagaccagcctggccaacatggtaaaaaaaaaaccccgtctctactaataatacaaaaaaattagccaggcgtggtggtgcgcgcctctagtcccagctacttgggaggctaaggcaggaaaatcacttgaacccaggaggtggaggttgcagtgagccgagattgtgccactgcactccagcctgagagacagagccagaatccatctcaaaaaaaaaaaagcaaaaaaaaaacaaagttgaaggcatcacagtccctgactttaaaataaacgacaaagttacagtaatcaaaacagcatggtattccataaaaacagatgcattggccaatagaacatactagagagtccagaatttacagacaattgaattttgataaggagccaagaacactcaatggggaaaggaatctctttgataaaaactgttgggaaaccatatatccatgtgtagaaaaatgaaattggacccttatctcacaccgtatacaaaagtcaaaatggattaaagacttacctgtaagactggaactactagaagaaaacatagagggaaagctactagaagaaaaaatagaagaaagccactagaagaaaacaggcggaaagctccactacattggtctgggcatttttttggacatgacctcaagaacacaggcgagaaaacaaaaaataaacacatggaattacatgaaactaaaaacttctgcacatcaaaggaaacagttaacagagtgaagagacaacctgctgaatgggagaaaatatttactaattatacatctgacaagaggttaatatccaagatatacaagaaactcagtagcaagaa

SEQ ID NO: 2639 - DNA, 333 bp, Homo sapiens
taatcacaagtgtccttataagagggggtcagggctgggcttagtggctcatgcctgtaatcccaggactttgggaggctgaggtggttggatcacttgaggccatgagtttgagaccagcctggccaacatggcgaaaccctgtctctactaaaaatacaaaaaaattagttgggcatggtggcacgcacctgtaatcccaactacttgtgaggccaaggcataagaatcgcttgaacccaggaggcaaaggttacagtgagccgagattgtgccacagcactccagcctggatgacagagtaatactctgtctcaaaaaaaaaaaaaaaaa

SEQ ID NO: 2640 - DNA, 3224 bp, Homo sapiens
taatattcacagtttgtctccatgaggtcatacagctgcttgaggttgctcggagagtaagaagcagaatgagaactagaacagaagctcactttggcctgaaggctcatgtgctgagcatcttcccttgtctgtctccacccctagcctggtgcccagcatgtagaagaccttcagtaagtaccaggttgctgactaagtaactgaggaaatgactcacaattggaccattcccatgctgaaattccacaagaatcttgttatcgcctgcacattgcttaggcaaacataattctagacaaaaatggaaccccagaaatctcagtcaacatccctcactcaaagcctagcacctggcttccttctaacagtgccctctgttgagtgttcacctgggatttccaggactgcagctgctgtctctttataaacccaggcctgggtcacagggtggggagaaaacaatgagtgttttggttgtttggtgatatccggtgccactttgtgccgcttgttgcaaattcagtcccatttcctgtgaactgcctccttgggcttgactccccagcaccatacaggggcttcagggacacttggaaaacaatctgtgctctgagctcggtgtccctggacctatcaattgcctaaggcagggagactgctcatacttcaagtagtggcctggggacaagatggatcaggaagtagaaaatagaaaaggatgggggtgaggagccagggcaggagaggaaggttataaggaggaacaatgagagatggacagctttttattctctacagaatgggctgtttcctagacgtcacgggatcatcatgtggtggagattgcaagaggccagtttgggggtgaggagggattgccgagtacatattttatcactgtgatgtgactcaagggcgtcattccctgtaaacaacttttgagtaggagggttttctctggataagaaattaaccagttagcagtcaagaaatggcaaaagctcaagtaacaattctgtatacttaacaaaatactgttaaactcattcattcattcgttcagcagaagtatgtccaggtacatctctgtacaaggcattgggctgattgtcagttatatagcagcctccaagaacaacatcatattcgaccccaggaactatagtccagtgggaaacacagacattgaacaaaaagtacaatgtgaagaatatagtaggaggaaagaaacaggagcatgcattatgtcatttattattatttttatttgagacagagtcttgctgtcagccaggctacagtacagtgacatgatctcatctcactgcaacctccacctcccaggctcaagtagttctcctgcctcagcctccagagtagctgggattacaggtgcccactaccacacctggctaatttttgcatttttagtagggatgggatttcaccatgttggccaggctgatctcgaactcctgacctcagctaatccgccggccttggcctcccaagatgctgggattacaggcatgagcccccatacccggcctattttttaaatacaactttttgatgattaacctcattataaacttcatttattaatgccatttcacattgaggatctgagaggttaggtggtcaggacttgaacatgcacattccgccttagttcctcctctcctgttactctgtaatcaataccacaaaacctccccagctcagctgctttccacccttgtggcctgaggcctgagactgcttccaccatactgaataccattctgtggtgcttcaatgttaacccctgtcataagcaacaggctctgcaatagtgtcccctggcttctcagcccaatgcctaaggtgaccgacgctcaatcagcaacgcaattatgcaatgaaaacagctacacagggaaaaccagaaccatgaaagtgggtcaggtccaaaccatctttgtaccatgtggcttgcagaaacccagatctcgtttgcttgcttgctgatgctgaatttggggatatgcatgccttttaaaataagaaagtatttattcttagatgctcttagactattttgaagctagagccattgtagttttgcacacttacttcataaaggaactgtacctatagtttaaaagttgttatttggtaattgtcatgtaatgattatctccttgctctccttaccactctgattgtatacaagttgatttccctgtttcaggaggggttttctgatgcatatactatagacaatcttctctatttacacttcagtttttaaaaaactaagctttttttttttaaaaaaagtgaaagtcataatctgtttcttttcaaagtcctagatgcaatgggattaaacttggagaaaatgggattaaacttggacaaacactacctatttggacttgtgatgatggctttcaaacttcttaaagcaatgaagtattttttccagaagaaaccttacacaagaagcccagcacactgagtcaagcatatgtaggtggaagatatctggttgagaccaagtagagataaacctgtagattcaactgtgccaccacagtgaattctaagaatccactgactgtgatctgtaagctcctactccacaggaggtcagggcgcacagcttgaaaccggaaggcagaagagtgacagggaagggtcatggactctgaaattagagctatctgtgttttaatactagttccaataggcacatggtcttggataaatggtttaaattatctgagtctcaatttctttctctgcaaaaagggatgattagtacatatgtaatagggtttttatagaaaattgtataacttgttaaacacacatgtactaagtgcttggtgcccagtatgcactgaataaatgctagctccttgcctttcatctctatgacccttcccaaatctctcagccccatattgcttcatgtagtgtgtgtatatttgggaaaatttgtgtgcatatttacagatgggatcctactcttctattgacagactgtcttttcagatgtgccttactttcattgcattggtttttcaactgaaagtgaacataaaggttttaagcatgcctaggtcttatctttttggtcaaatatctaacaccctcaataacagttgtaaatcattcttttgtaatttgatcattcatttttataaagtaaaacacaactgcccactgtaaaa

SEQ ID NO: 2641 - DNA, 3223 bp, Homo sapiens
taatattcacagtttgtctccatgaggtcatacagctgcttgaggttgctcggagagtaagaagcagaatgagaactagaacagaagctcactttggcctgaaggctcatgtgctgagcatcttcccttgtctgtctccacccctagcctggtgcccagcatgtagaagaccttcagtaagtaccaggttgctgactaagtaactgaggaaatgactcacaattggaccattcccatgctgaaattccacaagaatcttgttatcgcctgcacattgcttaggcaaacataattctagacaaaaatggaaccccagaaatctcagtcaacatccctcactcaaagcctagcacctggcttccttctaacagtgccctctgttgagtgttcacctgggatttccaggactgcagctgctgtctctttataaacccaggcctgggtcacagggtggggagaaaacaatgagtgttttggttgtttggtgatatccggtgccactttgtgccgcttgttgcaaattcagtcccatttcctgtgaactgcctccttgggcttgactccccagcaccatacaggggcttcagggacacttggaaaacaatctgtgctctgacctcggtgtccctggacctatcaattgcctaaggcagggagactgctcatacttcaagtagtggcctggggacaagatggatcaggaagtagaaaatagaaaaggatgggggtgaggagccagggcaggagaggaaggttataaggaggaacaatgagagatggacagctttttattctctacagaatgggctgtttcctagacgtcacgggatcatcatgtggtggagattgcaagaggccagtttgggggtgaggagggattgccgagtacatattttatcactgtgatgtgactcaagggcgtcattccctgtaaacaacttttgagtaggagggttttctctggataagaaattaaccagttagcagtcaagaaatggcaaaagctcaagtaacaattctgtatacttaacaaaatactgttaaactcattcattcattcgttcagcagaagtatgtccaggtacatctctgtacaaggcattgggctgattgtcagttatatagcagcctccaagaacaacatcatattcgaccccaggaactatagtccagtgggaaacacagacattgaacaaaaagtacaatgtgaagaatatagtaggaggaaagaaacaggagcatgcattatgtcatttattattatttttatttgagacagagtcttgctgtcagccaggctacagtacagtgacatgatctcatctcactgcaacctccacctcccaggctcaagtagttctcctgcctcagcctccagagtagctgggattacaggtgcccactaccacacctggctaatttttgcatttttagtagggatgggatttcaccatgttggccaggctgatctcgaactcctgacctcagctaatccgccggccttggcctcccaagatgctgggattacaggcatgagcccccatacccggcctattttttaaatacaactttttgatgattaacctcattataaacttcatttattaatgccatttcacattgaggatctgagaggttaggtggtcaggacttgaacatgcacattccgccttagttcctcctctcctgttactctgtaatcaataccacaaaacctccccagctcagctgctttccacccttgtggcctgaggcctgagactgcttccaccatactgaataccattctgtggtgcttcaatgttaacccctgtcataagcaacaggctctgcaatagtgtcccctggcttctcagcccaatgcctaaggtgaccgacgctcaatcagcaacgcaattatgcaatgaaaacagctacacagggaaaaccagaaccatgaaagtgggtcaggtccaaaccatctttgtaccatgtggcttgcagaaacccagatctcgtttgcttgcttgctgatgctgaatttggggatatgcatgccttttaaaataagaaagtatttattcttagatgctcttagactgttttgaagctagagccattgtagttttgcacacttacttcataaaggaactgtacctatagtttaaaagttgttatttggtaattgtcatgtaatgattatctccttgctctccttaccactctgattgtatacaagttgatttccctgtttcaggaggggttttctgatgcatatactatagacaatcttctctatttacacttcagtttttaaaaaactaagcttttttttttaaaaaaagtgaaagtcataatctgtttcttttcaaagtcctagatgcaatgggattaaacttggagaaaatgggattaaacttggacaaacactacctatttggacttgtgatgatggctttcaaacttcttaaagcaatgaagtattttttccagaagaaaccttacacaagaagcccagcacactgagtcaagcatatgtaggtggaagatatctggttgagaccaagtagagataaacctgtagattcaactgtgccaccacagtgaattctaagaatccactgactgtgatctgtaagctcctactccacaggaggtcagggcacacagcttgaaaccggaaggcagaagagtgacagggaagggtcatggactctgaaattagagctatctgtgttttaatactagttccaataggcacatggtcttggataaatggtttaaattatctgagtctcaatttctttctctgcaaaaagggatgattagtacatatgtaatagggtttttatagaaaattgtataacttgttaaacacacatgtactaagtgcttggtgcccagtatgcactgaataaatgctagctccttgcctttcatctctatgacccttcccaaatctctcagccccatattgcttcatgtagtgtgtgtatatttgggaaaatttgtgtgcatatttacagatgggatcctactcttctattgacagactgtcttttcagatgtgccttactttcattgcattggtttttcaactgaaagtgaacataaaggttttaagcatgcctaggtcttatctttttggtcaaatatctaacaccctcaataacagttgtaaatcattcttttgtaatttgatcattcatttttataaagtaaaacacaactgcccactgtaaaa

SEQ ID NO: 2642 - DNA, 3223 bp, Homo sapiens; identical to SEQ ID NO: 2641

SEQ ID NO: 2643 - DNA, 482 bp, Homo sapiens
  SITE (96): n equals a,t,g, or c
tgggattataggtgctcgctaccaagcctggccaattttttgtatttttagtagagatggggtttcaccatgttggccaggctggtctcgaactcntgacctcaggtgatccacccacctcggcctcccagagtgctgggattacaggcatgagtcactgcgcccagccccaaataattacttttaaactatagtatctaaatttactttaatgttgacttcaactgatgcaaattaatttgataattttctcactgtttcccgttatcattacatagatgctggctaaaataatatacttcctctcaaacttttaacgtaattccaggttcaaaatgcctgattaaactgctacaagaatattctggtacctctagaactccacagagataagttcactcaactcttggaaccttgtattctcaagggtgcaatatgagaaacaaatcccacagattgcattgattggttatttgttttgg

SEQ ID NO: 2644 - DNA, 479 bp, Homo sapiens
tgggattataggtgctcgctaccaagcctggccaattttttgtatttttagtagagatggggtttcaccatgttggccaggctggtctcgaactcctgacctcaggtgatccacccacctcggcctcccagagtgctgggattacaggcatgagtcactgcgcccagccccaaataattacttttaaactatagtatctaaatttactttaatgttgacttcaactgatgcaaattaatttgataattttctcactgtttcccgttatcattacatagatgctggctaaaataatatacttcctctcaaacttttaacgtaattccaggttcaaaatgcctgattaaactgctacaagaatattctggtacctctagaactccacagagataagttcactcaactcttggaaccttgtattctcagggtgcaatatgagaaacaaatcccacagattgcattgattggttatttgtttt

SEQ ID NO: 2645 - DNA, 32174 bp, Homo sapiens
  SITE (29356): n equals a,t,g, or c
  SITE (29357): n equals a,t,g, or c
  SITE (29358): n equals a,t,g, or c
  SITE (29359): n equals a,t,g, or c
  SITE (29360): n equals a,t,g, or c
  SITE (29361): n equals a,t,g, or c
  SITE (29362): n equals a,t,g, or c
  SITE (29363): n equals a,t,g, or c
  SITE (29364): n equals a,t,g, or c
  SITE (29365): n equals a,t,g, or c
  SITE (29366): n equals a,t,g, or c
  SITE (29367): n equals a,t,g, or c
  SITE (29368): n equals a,t,g, or c
  SITE (29369): n equals a,t,g, or c
  SITE (29370): n equals a,t,g, or c
  SITE (29371): n equals a,t,g, or c
  SITE (29372): n equals a,t,g, or c
  SITE (29373): n equals a,t,g, or c
  SITE (29374): n equals a,t,g, or c
  SITE (29375): n equals a,t,g, or c
  SITE (29376): n equals a,t,g, or c
  SITE (29377): n equals a,t,g, or c
  SITE (29378): n equals a,t,g, or c
  SITE (29379): n equals a,t,g, or c
  SITE (29380): n equals a,t,g, or c
  SITE (29381): n equals a,t,g, or c
  SITE (29382): n equals a,t,g, or c
  SITE (29383): n equals a,t,g, or c
  SITE (29384): n equals a,t,g, or c
  SITE (29385): n equals a,t,g, or c
  SITE (29386): n equals a,t,g, or c
  SITE (29387): n equals a,t,g, or c
  SITE (29388): n equals a,t,g, or c
  SITE (29389): n equals a,t,g, or c
  SITE (29390): n equals a,t,g, or c
  SITE (29391): n equals a,t,g, or c
  SITE (29392): n equals a,t,g, or c
  SITE (29393): n equals a,t,g, or c
  SITE (29394): n equals a,t,g, or c
  SITE (29395): n equals a,t,g, or c
  SITE (29396): n equals a,t,g, or c
  SITE (29397): n equals a,t,g, or c
  SITE (29398): n equals a,t,g, or c
  SITE (29399): n equals a,t,g, or c
  SITE (29400): n equals a,t,g, or c
  SITE (29401): n equals a,t,g, or c
  SITE (29402): n equals a,t,g, or c
  SITE (29403): n equals a,t,g, or c
  SITE (29404): n equals a,t,g, or c
  SITE (29405): n equals a,t,g, or c
  SITE (29406): n equals a,t,g, or c
  SITE (29407): n equals a,t,g, or c
  SITE (29408): n equals a,t,g, or c
  SITE (29409): n equals a,t,g, or c
  SITE (29410): n equals a,t,g, or c
  SITE (29411): n equals a,t,g, or c
  SITE (29412): n equals a,t,g, or c
  SITE (29413): n equals a,t,g, or c
  SITE (29414): n equals a,t,g, or c
  SITE (29415): n equals a,t,g, or c
  SITE (29416): n equals a,t,g, or c
  SITE (29417): n equals a,t,g, or c
  SITE (29418): n equals a,t,g, or c
  SITE (29419): n equals a,t,g, or c
  SITE (29420): n equals a,t,g, or c
  SITE (29421): n equals a,t,g, or c
  SITE (29422): n equals a,t,g, or c
  SITE (29423): n equals a,t,g, or c
  SITE (29424): n equals a,t,g, or c
  SITE (29425): n equals a,t,g, or c
  SITE (29426): n equals a,t,g, or c
  SITE (29427): n equals a,t,g, or c
  SITE (29428): n equals a,t,g, or c
  SITE (29429): n equals a,t,g, or c
  SITE (29430): n equals a,t,g, or c
  SITE (29431): n equals a,t,g, or c
  SITE (29432): n equals a,t,g, or c
  SITE (29433): n equals a,t,g, or c
  SITE (29434): n equals a,t,g, or c
  SITE (29435): n equals a,t,g, or c
  SITE (29436): n equals a,t,g, or c
  SITE (29437): n equals a,t,g, or c
  SITE (29438): n equals a,t,g, or c
  SITE (29439): n equals a,t,g, or c
  SITE (29440): n equals a,t,g, or c
  SITE (29441): n equals a,t,g, or c
  SITE (29442): n equals a,t,g, or c
  SITE (29443): n equals a,t,g, or c
  SITE (29444): n equals a,t,g, or c
  SITE (29445): n equals a,t,g, or c
  SITE (29446): n equals a,t,g, or c
  SITE (29447): n equals a,t,g, or c
  SITE (29448): n equals a,t,g, or c
  SITE (29449): n equals a,t,g, or c
  SITE (29450): n equals a,t,g, or c
  SITE (29451): n equals a,t,g, or c
  SITE (29452): n equals a,t,g, or c
  SITE (29453): n equals a,t,g, or c
  SITE (29454): n equals a,t,g, or c
  SITE (29455): n equals a,t,g, or c
  SITE (29456): n equals a,t,g, or c
  SITE (29457): n equals a,t,g, or c
  SITE (29458): n equals a,t,g, or c
  SITE (29459): n equals a,t,g, or c
  SITE (29460): n equals a,t,g, or c
  SITE (29461): n equals a,t,g, or c
  SITE (29462): n equals a,t,g, or c
  SITE (29463): n equals a,t,g, or c
  SITE (29464): n equals a,t,g, or c
  SITE (29465): n equals a,t,g, or c
  SITE (29466): n equals a,t,g, or c
  SITE (29467): n equals a,t,g, or c
  SITE (29468): n equals a,t,g, or c
  SITE (29469): n equals a,t,g, or c
  SITE (29470): n equals a,t,g, or c
  SITE (29471): n equals a,t,g, or c
  SITE (29472): n equals a,t,g, or c
  SITE (29473): n equals a,t,g, or c
  SITE (29474): n equals a,t,g, or c
  SITE (29475): n equals a,t,g, or c
  SITE (29476): n equals a,t,g, or c
  SITE (29477): n equals a,t,g, or c
  SITE (29478): n equals a,t,g, or c
  SITE (29479): n equals a,t,g, or c
  SITE (29480): n equals a,t,g, or c
  SITE (29481): n equals a,t,g, or c
  SITE (29482): n equals a,t,g, or c
  SITE (29483): n equals a,t,g, or c
  SITE (29484): n equals a,t,g, or c
  SITE (29485): n equals a,t,g, or c
  SITE (29486): n equals a,t,g, or c
  SITE (29487): n equals a,t,g, or c
  SITE (29488): n equals a,t,g, or c
  SITE (29489): n equals a,t,g, or c
  SITE (29490): n equals a,t,g, or c
  SITE (29491): n equals a,t,g, or c
  SITE (29492): n equals a,t,g, or c
  SITE (29493): n equals a,t,g, or c
  SITE (29494): n equals a,t,g, or c
  SITE (29495): n equals a,t,g, or c
  SITE (29496): n equals a,t,g, or c
  SITE (29497): n equals a,t,g, or c
  SITE (29498): n equals a,t,g, or c
  SITE (29499): n equals a,t,g, or c
  SITE (29500): n equals a,t,g, or c
  SITE (29501): n equals a,t,g, or c
  SITE (29502): n equals a,t,g, or c
  SITE (29503): n equals a,t,g, or c
  SITE (29504): n equals a,t,g, or c
  SITE (29505): n equals a,t,g, or c
  SITE (29506): n equals a,t,g, or c
  SITE (29507): n equals a,t,g, or c
  SITE (29508): n equals a,t,g, or c
  SITE (29509): n equals a,t,g, or c
  SITE (29510): n equals a,t,g, or c
  SITE (29511): n equals a,t,g, or c
  SITE (29512): n equals a,t,g, or c
  SITE (29513): n equals a,t,g, or c
  SITE (29514): n equals a,t,g, or c
  SITE (29515): n equals a,t,g, or c
  SITE (29516): n equals a,t,g, or c
  SITE (29517): n equals a,t,g, or c
  SITE (29518): n equals a,t,g, or c
  SITE (29519): n equals a,t,g, or c
  SITE (29520): n equals a,t,g, or c
  SITE (29521): n equals a,t,g, or c
  SITE (29522): n equals a,t,g, or c
  SITE (29523): n equals a,t,g, or c
  SITE (29524): n equals a,t,g, or c
  SITE (29525): n equals a,t,g, or c
  SITE (29526): n equals a,t,g, or c
  SITE (29527): n equals a,t,g, or c
  SITE (29528): n equals a,t,g, or c
  SITE (29529): n equals a,t,g, or c
  SITE (29530): n equals a,t,g, or c
  SITE (29531): n equals a,t,g, or c
  SITE (29532): n equals a,t,g, or c
  SITE (29533): n equals a,t,g, or c
  SITE (29534): n equals a,t,g, or c
  SITE (29535): n equals a,t,g, or c
  SITE (29536): n equals a,t,g, or c
  SITE (29537): n equals a,t,g, or c
  SITE (29538): n equals a,t,g, or c
  SITE (29539): n equals a,t,g, or c
  SITE (29540): n equals a,t,g, or c
  SITE (29541): n equals a,t,g, or c
  SITE (29542): n equals a,t,g, or c
  SITE (29543): n equals a,t,g, or c
  SITE (29544): n equals a,t,g, or c
  SITE (29545): n equals a,t,g, or c
  SITE (29546): n equals a,t,g, or c
  SITE (29547): n equals a,t,g, or c
  SITE (29548): n equals a,t,g, or c
  SITE (29549): n equals a,t,g, or c
  SITE (29550): n equals a,t,g, or c
  SITE (29551): n equals a,t,g, or c
  SITE (29552): n equals a,t,g, or c
  SITE (29553): n equals a,t,g, or c
  SITE (29554): n equals a,t,g, or c
  SITE (29555): n equals a,t,g, or c
  SITE (29556): n equals a,t,g, or c
  SITE (29557): n equals a,t,g, or c
  SITE (29558): n equals a,t,g, or c
  SITE (29559): n equals a,t,g, or c
  SITE (29560): n equals a,t,g, or c
  SITE (29561): n equals a,t,g, or c
  SITE (29562): n equals a,t,g, or c
  SITE (29563): n equals a,t,g, or c
  SITE (29564): n equals a,t,g, or c
  SITE (29565): n equals a,t,g, or c
  SITE (29566): n equals a,t,g, or c
  SITE (29567): n equals a,t,g, or c
  SITE (29568): n equals a,t,g, or c
  SITE (29569): n equals a,t,g, or c
  SITE (29570): n equals a,t,g, or c
  SITE (29571): n equals a,t,g, or c
  SITE (29572): n equals a,t,g, or c
  SITE (29573): n equals a,t,g, or c
  SITE (29574): n equals a,t,g, or c
  SITE (29575): n equals a,t,g, or c
  SITE (29576): n equals a,t,g, or c
  SITE (29577): n equals a,t,g, or c
  SITE (29578): n equals a,t,g, or c
  SITE (29579): n equals a,t,g, or c
  SITE (29580): n equals a,t,g, or c
  SITE (29581): n equals a,t,g, or c
  SITE (29582): n equals a,t,g, or c
  SITE (29583): n equals a,t,g, or c
  SITE (29584): n equals a,t,g, or c
  SITE (29585): n equals a,t,g, or c
  SITE (29586): n equals a,t,g, or c
  SITE (29587): n equals a,t,g, or c
  SITE (29588): n equals a,t,g, or c
  SITE (29589): n equals a,t,g, or c
  SITE (29590): n equals a,t,g, or c
  SITE (29591): n equals a,t,g, or c
  SITE (29592): n equals a,t,g, or c
  SITE (29593): n equals a,t,g, or c
  SITE (29594): n equals a,t,g, or c
  SITE (29595): n equals a,t,g, or c
  SITE (29596): n equals a,t,g, or c
  SITE (29597): n equals a,t,g, or c
  SITE (29598): n equals a,t,g, or c
  SITE (29599): n equals a,t,g, or c
  SITE (29600): n equals a,t,g, or c
  SITE (29601): n equals a,t,g, or c
  SITE (29602): n equals a,t,g, or c
  SITE (29603): n equals a,t,g, or c
  SITE (29604): n equals a,t,g, or c
  SITE (29605): n equals a,t,g, or c
  SITE (29606): n equals a,t,g, or c
  SITE (29607): n equals a,t,g, or c
  SITE (29608): n equals a,t,g, or c
  SITE (29609): n equals a,t,g, or c
  SITE (29610): n equals a,t,g, or c
  SITE (29611): n equals a,t,g, or c
  SITE (29612): n equals a,t,g, or c
  SITE (29613): n equals a,t,g, or c
  SITE (29614): n equals a,t,g, or c
  SITE (29615): n equals a,t,g, or c
  SITE (29616): n equals a,t,g, or c
  SITE (29617): n equals a,t,g, or c
  SITE (29618): n equals a,t,g, or c
  SITE (29619): n equals a,t,g, or c
  SITE (29620): n equals a,t,g, or c
  SITE (29621): n equals a,t,g, or c
  SITE (29622): n equals a,t,g, or c
  SITE (29623): n equals a,t,g, or c
  SITE (29624): n equals a,t,g, or c
  SITE (29625): n equals a,t,g, or c
  SITE (29626): n equals a,t,g, or c
  SITE (29627): n equals a,t,g, or c
  SITE (29628): n equals a,t,g, or c
  SITE (29629): n equals a,t,g, or c
  SITE (29630): n equals a,t,g, or c
  SITE (29631): n equals a,t,g, or c
  SITE (29632): n equals a,t,g, or c
  SITE (29633): n equals a,t,g, or c
  SITE (29634): n equals a,t,g, or c
  SITE (29635): n equals a,t,g, or c
  SITE (29636): n equals a,t,g, or c
  SITE (29637): n equals a,t,g, or c
  SITE (29638): n equals a,t,g, or c
  SITE (29639): n equals a,t,g, or c
  SITE (29640): n equals a,t,g, or c
  SITE (29641): n equals a,t,g, or c
  SITE (29642): n equals a,t,g, or c
  SITE (29643): n equals a,t,g, or c
  SITE (29644): n equals a,t,g, or c
  SITE (29645): n equals a,t,g, or c
  SITE (29646): n equals a,t,g, or c
  SITE (29647): n equals a,t,g, or c
  SITE (29648): n equals a,t,g, or c
  SITE (29649): n equals a,t,g, or c
  SITE (29650): n equals a,t,g, or c
  SITE (29651): n equals a,t,g, or c
  SITE (29652): n equals a,t,g, or c
  SITE (29653): n equals a,t,g, or c
  SITE (29654): n equals a,t,g, or c
  SITE (29655): n equals a,t,g, or c
  SITE (29656): n equals a,t,g, or c
  SITE (29657): n equals a,t,g, or c
  SITE (29658): n equals a,t,g, or c
  SITE (29659): n equals a,t,g, or c
  SITE (29660): n equals a,t,g, or c
  SITE (29661): n equals a,t,g, or c
  SITE (29662): n equals a,t,g, or c
  SITE (29663): n equals a,t,g, or c
  SITE (29664): n equals a,t,g, or c
  SITE (29665): n equals a,t,g, or c
  SITE (29666): n equals a,t,g, or c
  SITE (29667): n equals a,t,g, or c
  SITE (29668): n equals a,t,g, or c
  SITE (29669): n equals a,t,g, or c
  SITE (29670): n equals a,t,g, or c
  SITE (29671): n equals a,t,g, or c
  SITE (29672): n equals a,t,g, or c
  SITE (29673): n equals a,t,g, or c
  SITE (29674): n equals a,t,g, or c
  SITE (29675): n equals a,t,g, or c
  SITE (29676): n equals a,t,g, or c
  SITE (29677): n equals a,t,g, or c
  SITE (29678): n equals a,t,g, or c
  SITE (29679): n equals a,t,g, or c
  SITE (29680): n equals a,t,g, or c
  SITE (29681): n equals a,t,g, or c
  SITE (29682): n equals a,t,g, or c
  SITE (29683): n equals a,t,g, or c
  SITE (29684): n equals a,t,g, or c
  SITE (29685): n equals a,t,g, or c
  SITE (29686): n equals a,t,g, or c
  SITE (29687): n equals a,t,g, or c
  SITE (29688): n equals a,t,g, or c
  SITE (29689): n equals a,t,g, or c
  SITE (29690): n equals a,t,g, or c
  SITE (29691): n equals a,t,g, or c
  SITE (29692): n equals a,t,g, or c
  SITE (29693): n equals a,t,g, or c
  SITE (29694): n equals a,t,g, or c
  SITE (29695): n equals a,t,g, or c
  SITE (29696): n equals a,t,g, or c
  SITE (29697): n equals a,t,g, or c
  SITE (29698): n equals a,t,g, or c
  SITE (29699): n equals a,t,g, or c
  SITE (29700): n equals a,t,g, or c
  SITE (29701): n equals a,t,g, or c
  SITE (29702): n equals a,t,g, or c
  SITE (29703): n equals a,t,g, or c
  SITE (29704): n equals a,t,g, or c
  SITE (29705): n equals a,t,g, or c
  SITE (29706): n equals a,t,g, or c
  SITE (29707): n equals a,t,g, or c
  SITE (29708): n equals a,t,g, or c
  SITE (29709): n equals a,t,g, or c
  SITE (29710): n equals a,t,g, or c
  SITE (29711): n equals a,t,g, or c
  SITE (29712): n equals a,t,g, or c
  SITE (29713): n equals a,t,g, or c
  SITE (29714): n equals a,t,g, or c
  SITE (29715): n equals a,t,g, or c
  SITE (29716): n equals a,t,g, or c
  SITE (29717): n equals a,t,g, or c
  SITE (29718): n equals a,t,g, or c
  SITE (29719): n equals a,t,g, or c
  SITE (29720): n equals a,t,g, or c
  SITE (29721): n equals a,t,g, or c
  SITE (29722): n equals a,t,g, or c
  SITE (29723): n equals a,t,g, or c
  SITE (29724): n equals a,t,g, or c
  SITE (29725): n equals a,t,g, or c
  SITE (29726): n equals a,t,g, or c
  SITE (29727): n equals a,t,g, or c
  SITE (29728): n equals a,t,g, or c
  SITE (29729): n equals a,t,g, or c
  SITE (29730): n equals a,t,g, or c
  SITE (29731): n equals a,t,g, or c
  SITE (29732): n equals a,t,g, or c
  SITE (29733): n equals a,t,g, or c
  SITE (29734): n equals a,t,g, or c
  SITE (29735): n equals a,t,g, or c
  SITE (29736): n equals a,t,g, or c
  SITE (29737): n equals a,t,g, or c
  SITE (29738): n equals a,t,g, or c
  SITE (29739): n equals a,t,g, or c
  SITE (29740): n equals a,t,g, or c
  SITE (29741): n equals a,t,g, or c
  SITE (29742): n equals a,t,g, or c
  SITE (29743): n equals a,t,g, or c
  SITE (29744): n equals a,t,g, or c
  SITE (29745): n equals a,t,g, or c
  SITE (29746): n equals a,t,g, or c
  SITE (29747): n equals a,t,g, or c
  SITE (29748): n equals a,t,g, or c
  SITE (29749): n equals a,t,g, or c
  SITE (29750): n equals a,t,g, or c
  SITE (29751): n equals a,t,g, or c
  SITE (29752): n equals a,t,g, or c
  SITE (29753): n equals a,t,g, or c
  SITE (29754): n equals a,t,g, or c
  SITE (29755): n equals a,t,g, or c
  SITE (29756): n equals a,t,g, or c
  SITE (29757): n equals a,t,g, or c
  SITE (29758): n equals a,t,g, or c
  SITE (29759): n equals a,t,g, or c
  SITE (29760): n equals a,t,g, or c
  SITE (29761): n equals a,t,g, or c
  SITE (29762): n equals a,t,g, or c
  SITE (29763): n equals a,t,g, or c
  SITE (29764): n equals a,t,g, or c
  SITE (29765): n equals a,t,g, or c
  SITE (29766): n equals a,t,g, or c
  SITE (29767): n equals a,t,g, or c
  SITE (29768): n equals a,t,g, or c
  SITE (29769): n equals a,t,g, or c
  SITE (29770): n equals a,t,g, or c
  SITE (29771): n equals a,t,g, or c
  SITE (29772): n equals a,t,g, or c
  SITE (29773): n equals a,t,g, or c
  SITE (29774): n equals a,t,g, or c
  SITE (29775): n equals a,t,g, or c
  SITE (29776): n equals a,t,g, or c
  SITE (29777): n equals a,t,g, or c
  SITE (29778): n equals a,t,g, or c
  SITE (29779): n equals a,t,g, or c
  SITE (29780): n equals a,t,g, or c
  SITE (29781): n equals a,t,g, or c
  SITE (29782): n equals a,t,g, or c
  SITE (29783): n equals a,t,g, or c
  SITE (29784): n equals a,t,g, or c
  SITE (29785): n equals a,t,g, or c
  SITE (29786): n equals a,t,g, or c
  SITE (29787): n equals a,t,g, or c
  SITE (29788): n equals a,t,g, or c
  SITE (29789): n equals a,t,g, or c
  SITE (29790): n equals a,t,g, or c
  SITE (29791): n equals a,t,g, or c
  SITE (29792): n equals a,t,g, or c
  SITE (29793): n equals a,t,g, or c
  SITE (29794): n equals a,t,g, or c
  SITE (29795): n equals a,t,g, or c
  SITE (29796): n equals a,t,g, or c
  SITE (29797): n equals a,t,g, or c
  SITE (29798): n equals a,t,g, or c
  SITE (29799): n equals a,t,g, or c
  SITE (29800): n equals a,t,g, or c
  SITE (29801): n equals a,t,g, or c
  SITE (29802): n equals a,t,g, or c
  SITE (29803): n equals a,t,g, or c
  SITE (29804): n equals a,t,g, or c
  SITE (29805): n equals a,t,g, or c
  SITE (29806): n equals a,t,g, or c
  SITE (29807): n equals a,t,g, or c
  SITE (29808): n equals a,t,g, or c
  SITE (29809): n equals a,t,g, or c
  SITE (29810): n equals a,t,g, or c
  SITE (29811): n equals a,t,g, or c
  SITE (29812): n equals a,t,g, or c
  SITE (29813): n equals a,t,g, or c
  SITE (29814): n equals a,t,g, or c
  SITE (29815): n equals a,t,g, or c
  SITE (29816): n equals a,t,g, or c
  SITE (29817): n equals a,t,g, or c
  SITE (29818): n equals a,t,g, or c
  SITE (29819): n equals a,t,g, or c
  SITE (29820): n equals a,t,g, or c
  SITE (29821): n equals a,t,g, or c
  SITE (29822): n equals a,t,g, or c
  SITE (29823): n equals a,t,g, or c
  SITE (29824): n equals a,t,g, or c
  SITE (29825): n equals a,t,g, or c
  SITE (29826): n equals a,t,g, or c
  SITE (29827): n equals a,t,g, or c
  SITE (29828): n equals a,t,g, or c
  SITE (29829): n equals a,t,g, or c
  SITE (29830): n equals a,t,g, or c
  SITE (29831): n equals a,t,g, or c
  SITE (29832): n equals a,t,g, or c
  SITE (29833): n equals a,t,g, or c
  SITE (29834): n equals a,t,g, or c
  SITE (29835): n equals a,t,g, or c
  SITE (29836): n equals a,t,g, or c
  SITE (29837): n equals a,t,g, or c
  SITE (29838): n equals a,t,g, or c
  SITE (29839): n equals a,t,g, or c
  SITE (29840): n equals a,t,g, or c
  SITE (29841): n equals a,t,g, or c
  SITE (29842): n equals a,t,g, or c
  SITE (29843): n equals a,t,g, or c
  SITE (29844): n equals a,t,g, or c
  SITE (29845): n equals a,t,g, or c
  SITE (29846): n equals a,t,g, or c
  SITE (29847): n equals a,t,g, or c
  SITE (29848): n equals a,t,g, or c
  SITE (29849): n equals a,t,g, or c
  SITE (29850): n equals a,t,g, or c
  SITE (29851): n equals a,t,g, or c
  SITE (29852): n equals a,t,g, or c
  SITE (29853): n equals a,t,g, or c
  SITE (29854): n equals a,t,g, or c
  SITE (29855): n equals a,t,g, or c
  SITE (29856): n equals a,t,g, or c
  SITE (29857): n equals a,t,g, or c
  SITE (29858): n equals a,t,g, or c
  SITE (29859): n equals a,t,g, or c
  SITE (29860): n equals a,t,g, or c
  SITE (29861): n equals a,t,g, or c
  SITE (29862): n equals a,t,g, or c
  SITE (29863): n equals a,t,g, or c
  SITE (29864): n equals a,t,g, or c
  SITE (29865): n equals a,t,g, or c
  SITE (29866): n equals a,t,g, or c
  SITE (29867): n equals a,t,g, or c
  SITE (29868): n equals a,t,g, or c
  SITE (29869): n equals a,t,g, or c
  SITE (29870): n equals a,t,g, or c
  SITE (29871): n equals a,t,g, or c
  SITE (29872): n equals a,t,g, or c
  SITE (29873): n equals a,t,g, or c
  SITE (29874): n equals a,t,g, or c
  SITE (29875): n equals a,t,g, or c
  SITE (29876): n equals a,t,g, or c
  SITE (29877): n equals a,t,g, or c
  SITE (29878): n equals a,t,g, or c
  SITE (29879): n equals a,t,g, or c
  SITE (29880): n equals a,t,g, or c
  SITE (29881): n equals a,t,g, or c
  SITE (29882): n equals a,t,g, or c
  SITE (29883): n equals a,t,g, or c
  SITE (29884): n equals a,t,g, or c
  SITE (29885): n equals a,t,g, or c
  SITE (29886): n equals a,t,g, or c
  SITE (29887): n equals a,t,g, or c
  SITE (29888): n equals a,t,g, or c
  SITE (29889): n equals a,t,g, or c
  SITE (29890): n equals a,t,g, or c
  SITE (29891): n equals a,t,g, or c
  SITE (29892): n equals a,t,g, or c
  SITE (29893): n equals a,t,g, or c
  SITE (29894): n equals a,t,g, or c
  SITE (29895): n equals a,t,g, or c
  SITE (29896): n equals a,t,g, or c
  SITE (29897): n equals a,t,g, or c
  SITE (29898): n equals a,t,g, or c
  SITE (29899): n equals a,t,g, or c
  SITE (29900): n equals a,t,g, or c
  SITE (29901): n equals a,t,g, or c
  SITE (29902): n equals a,t,g, or c
  SITE (29903): n equals a,t,g, or c
  SITE (29904): n equals a,t,g, or c
  SITE (29905): n equals a,t,g, or c
  SITE (29906): n equals a,t,g, or c
  SITE (29907): n equals a,t,g, or c
  SITE (29908): n equals a,t,g, or c
  SITE (29909): n equals a,t,g, or c
  SITE (29910): n equals a,t,g, or c
  SITE (29911): n equals a,t,g, or c
  SITE (29912): n equals a,t,g, or c
  SITE (29913): n equals a,t,g, or c
  SITE (29914): n equals a,t,g, or c
  SITE (29915): n equals a,t,g, or c
  SITE (29916): n equals a,t,g, or c
  SITE (29917): n equals a,t,g, or c
  SITE (29918): n equals a,t,g, or c
  SITE (29919): n equals a,t,g, or c
  SITE (29920): n equals a,t,g, or c
  SITE (29921): n equals a,t,g, or c
  SITE (29922): n equals a,t,g, or c
  SITE (29923): n equals a,t,g, or c
  SITE (29924): n equals a,t,g, or c
  SITE (29925): n equals a,t,g, or c
  SITE (29926): n equals a,t,g, or c
  SITE (29927): n equals a,t,g, or c
  SITE (29928): n equals a,t,g, or c
  SITE (29929): n equals a,t,g, or c
  SITE (29930): n equals a,t,g, or c
  SITE (29931): n equals a,t,g, or c
  SITE (29932): n equals a,t,g, or c
  SITE (29933): n equals a,t,g, or c
  SITE (29934): n equals a,t,g, or c
  SITE (29935): n equals a,t,g, or c
  SITE (29936): n equals a,t,g, or c
  SITE (29937): n equals a,t,g, or c
  SITE (29938): n equals a,t,g, or c
  SITE (29939): n equals a,t,g, or c
  SITE (29940): n equals a,t,g, or c
  SITE (29941): n equals a,t,g, or c
  SITE (29942): n equals a,t,g, or c
  SITE (29943): n equals a,t,g, or c
  SITE (29944): n equals a,t,g, or c
  SITE (29945): n equals a,t,g, or c
  SITE (29946): n equals a,t,g, or c
  SITE (29947): n equals a,t,g, or c
  SITE (29948): n equals a,t,g, or c
  SITE (29949): n equals a,t,g, or c
  SITE (29950): n equals a,t,g, or c
  SITE (29951): n equals a,t,g, or c
  SITE (29952): n equals a,t,g, or c
  SITE (29953): n equals a,t,g, or c
  SITE (29954): n equals a,t,g, or c
  SITE (29955): n equals a,t,g, or c
  SITE (29956): n equals a,t,g, or c
  SITE (29957): n equals a,t,g, or c
  SITE (29958): n equals a,t,g, or c
  SITE (29959): n equals a,t,g, or c
  SITE (29960): n equals a,t,g, or c
  SITE (29961): n equals a,t,g, or c
  SITE (29962): n equals a,t,g, or c
  SITE (29963): n equals a,t,g, or c
  SITE (29964): n equals a,t,g, or c
  SITE (29965): n equals a,t,g, or c
  SITE (29966): n equals a,t,g, or c
  SITE (29967): n equals a,t,g, or c
  SITE (29968): n equals a,t,g, or c
  SITE (29969): n equals a,t,g, or c
  SITE (29970): n equals a,t,g, or c
  SITE (29971): n equals a,t,g, or c
  SITE (29972): n equals a,t,g, or c
  SITE (29973): n equals a,t,g, or c
  SITE (29974): n equals a,t,g, or c
  SITE (29975): n equals a,t,g, or c
  SITE (29976): n equals a,t,g, or c
  SITE (29977): n equals a,t,g, or c
  SITE (29978): n equals a,t,g, or c
  SITE (29979): n equals a,t,g, or c
  SITE (29980): n equals a,t,g, or c
  SITE (29981): n equals a,t,g, or c
  SITE (29982): n equals a,t,g, or c
  SITE (29983): n equals a,t,g, or c
  SITE (29984): n equals a,t,g, or c
  SITE (29985): n equals a,t,g, or c
  SITE (29986): n equals a,t,g, or c
  SITE (29987): n equals a,t,g, or c
  SITE (29988): n equals a,t,g, or c
  SITE (29989): n equals a,t,g, or c
  SITE (29990): n equals a,t,g, or c
  SITE (29991): n equals a,t,g, or c
  SITE (29992): n equals a,t,g, or c
  SITE (29993): n equals a,t,g, or c
  SITE (29994): n equals a,t,g, or c
  SITE (29995): n equals a,t,g, or c
  SITE (29996): n equals a,t,g, or c
  SITE (29997): n equals a,t,g, or c
  SITE (29998): n equals a,t,g, or c
  SITE (29999): n equals a,t,g, or c
  SITE (30000): n equals a,t,g, or c
  SITE (30001): n equals a,t,g, or c
  SITE (30002): n equals a,t,g, or c
  SITE (30003): n equals a,t,g, or c
  SITE (30004): n equals a,t,g, or c
  SITE (30005): n equals a,t,g, or c
  SITE (30006): n equals a,t,g, or c
  SITE (30007): n equals a,t,g, or c
  SITE (30008): n equals a,t,g, or c
  SITE (30009): n equals a,t,g, or c
  SITE (30010): n equals a,t,g, or c
  SITE (30011): n equals a,t,g, or c
  SITE (30012): n equals a,t,g, or c
  SITE (30013): n equals a,t,g, or c
  SITE (30014): n equals a,t,g, or c
  SITE (30015): n equals a,t,g, or c
  SITE (30016): n equals a,t,g, or c
  SITE (30017): n equals a,t,g, or c
  SITE (30018): n equals a,t,g, or c
  SITE (30019): n equals a,t,g, or c
  SITE (30020): n equals a,t,g, or c
  SITE (30021): n equals a,t,g, or c
  SITE (30022): n equals a,t,g, or c
  SITE (30023): n equals a,t,g, or c
  SITE (30024): n equals a,t,g, or c
  SITE (30025): n equals a,t,g, or c
  SITE (30026): n equals a,t,g, or c
  SITE (30027): n equals a,t,g, or c
  SITE (30028): n equals a,t,g, or c
  SITE (30029): n equals a,t,g, or c
  SITE (30030): n equals a,t,g, or c
  SITE (30031): n equals a,t,g, or c
  SITE (30032): n equals a,t,g, or c
  SITE (30033): n equals a,t,g, or c
  SITE (30034): n equals a,t,g, or c
  SITE (30035): n equals a,t,g, or c
  SITE (30036): n equals a,t,g, or c
  SITE (30037): n equals a,t,g, or c
  SITE (30038): n equals a,t,g, or c
  SITE (30039): n equals a,t,g, or c
  SITE (30040): n equals a,t,g, or c
  SITE (30041): n equals a,t,g, or c
  SITE (30042): n equals a,t,g, or c
  SITE (30043): n equals a,t,g, or c
  SITE (30044): n equals a,t,g, or c
  SITE (30045): n equals a,t,g, or c
  SITE (30046): n equals a,t,g, or c
  SITE (30047): n equals a,t,g, or c
  SITE (30048): n equals a,t,g, or c
  SITE (30049): n equals a,t,g, or c
  SITE (30050): n equals a,t,g, or c
  SITE (30051): n equals a,t,g, or c
  SITE (30052): n equals a,t,g, or c
  SITE (30053): n equals a,t,g, or c
  SITE (30054): n equals a,t,g, or c
  SITE (30055): n equals a,t,g, or c
  SITE (30056): n equals a,t,g, or c
  SITE (30057): n equals a,t,g, or c
  SITE (30058): n equals a,t,g, or c
  SITE (30059): n equals a,t,g, or c
  SITE (30060): n equals a,t,g, or c
  SITE (30061): n equals a,t,g, or c
  SITE (30062): n equals a,t,g, or c
  SITE (30063): n equals a,t,g, or c
  SITE (30064): n equals a,t,g, or c
  SITE (30065): n equals a,t,g, or c
  SITE (30066): n equals a,t,g, or c
  SITE (30067): n equals a,t,g, or c
  SITE (30068): n equals a,t,g, or c
  SITE (30069): n equals a,t,g, or c
  SITE (30070): n equals a,t,g, or c
  SITE (30071): n equals a,t,g, or c
  SITE (30072): n equals a,t,g, or c
  SITE (30073): n equals a,t,g, or c
  SITE (30074): n equals a,t,g, or c
  SITE (30075): n equals a,t,g, or c
  SITE (30076): n equals a,t,g, or c
  SITE (30077): n equals a,t,g, or c
  SITE (30078): n equals a,t,g, or c
  SITE (30079): n equals a,t,g, or c
  SITE (30080): n equals a,t,g, or c
  SITE (30081): n equals a,t,g, or c
  SITE (30082): n equals a,t,g, or c
  SITE (30083): n equals a,t,g, or c
  SITE (30084): n equals a,t,g, or c
  SITE (30085): n equals a,t,g, or c
  SITE (30086): n equals a,t,g, or c
  SITE (30087): n equals a,t,g, or c
  SITE (30088): n equals a,t,g, or c
  SITE (30089): n equals a,t,g, or c
  SITE (30090): n equals a,t,g, or c
  SITE (30091): n equals a,t,g, or c
  SITE (30092): n equals a,t,g, or c
  SITE (30093): n equals a,t,g, or c
  SITE (30094): n equals a,t,g, or c
  SITE (30095): n equals a,t,g, or c
  SITE (30096): n equals a,t,g, or c
  SITE (30097): n equals a,t,g, or c
  SITE (30098): n equals a,t,g, or c
  SITE (30099): n equals a,t,g, or c
  SITE (30100): n equals a,t,g, or c
  SITE (30101): n equals a,t,g, or c
  SITE (30102): n equals a,t,g, or c
  SITE (30103): n equals a,t,g, or c
  SITE (30104): n equals a,t,g, or c
  SITE (30105): n equals a,t,g, or c
  SITE (30106): n equals a,t,g, or c
  SITE (30107): n equals a,t,g, or c
  SITE (30108): n equals a,t,g, or c
  SITE (30109): n equals a,t,g, or c
  SITE (30110): n equals a,t,g, or c
  SITE (30111): n equals a,t,g, or c
  SITE (30112): n equals a,t,g, or c
  SITE (30113): n equals a,t,g, or c
  SITE (30114): n equals a,t,g, or c
  SITE (30115): n equals a,t,g, or c
  SITE (30116): n equals a,t,g, or c
  SITE (30117): n equals a,t,g, or c
  SITE (30118): n equals a,t,g, or c
  SITE (30119): n equals a,t,g, or c
  SITE (30120): n equals a,t,g, or c
  SITE (30121): n equals a,t,g, or c
  SITE (30122): n equals a,t,g, or c
  SITE (30123): n equals a,t,g, or c
  SITE (30124): n equals a,t,g, or c
  SITE (30125): n equals a,t,g, or c
  SITE (30126): n equals a,t,g, or c
  SITE (30127): n equals a,t,g, or c
  SITE (30128): n equals a,t,g, or c
  SITE (30129): n equals a,t,g, or c
  SITE (30130): n equals a,t,g, or c
  SITE (30131): n equals a,t,g, or c
  SITE (30132): n equals a,t,g, or c
  SITE (30133): n equals a,t,g, or c
  SITE (30134): n equals a,t,g, or c
  SITE (30135): n equals a,t,g, or c
  SITE (30136): n equals a,t,g, or c
  SITE (30137): n equals a,t,g, or c
  SITE (30138): n equals a,t,g, or c
  SITE (30139): n equals a,t,g, or c
  SITE (30140): n equals a,t,g, or c
  SITE (30141): n equals a,t,g, or c
  SITE (30142): n equals a,t,g, or c
  SITE (30143): n equals a,t,g, or c
  SITE (30144): n equals a,t,g, or c
  SITE (30145): n equals a,t,g, or c
  SITE (30146): n equals a,t,g, or c
  SITE (30147): n equals a,t,g, or c
  SITE (30148): n equals a,t,g, or c
  SITE (30149): n equals a,t,g, or c
  SITE (30150): n equals a,t,g, or c
  SITE (30151): n equals a,t,g, or c
  SITE (30152): n equals a,t,g, or c
  SITE (30153): n equals a,t,g, or c
  SITE (30154): n equals a,t,g, or c
  SITE (30155): n equals a,t,g, or c
  SITE (30156): n equals a,t,g, or c
  SITE (30157): n equals a,t,g, or c
  SITE (30158): n equals a,t,g, or c
  SITE (30159): n equals a,t,g, or c
  SITE (30160): n equals a,t,g, or c
  SITE (30161): n equals a,t,g, or c
  SITE (30162): n equals a,t,g, or c
  SITE (30163): n equals a,t,g, or c
  SITE (30164): n equals a,t,g, or c
  SITE (30165): n equals a,t,g, or c
  SITE (30166): n equals a,t,g, or c
  SITE (30167): n equals a,t,g, or c
  SITE (30168): n equals a,t,g, or c
  SITE (30169): n equals a,t,g, or c
  SITE (30170): n equals a,t,g, or c
  SITE (30171): n equals a,t,g, or c
  SITE (30172): n equals a,t,g, or c
  SITE (30173): n equals a,t,g, or c
  SITE (30174): n equals a,t,g, or c
  SITE (30175): n equals a,t,g, or c
  SITE (30176): n equals a,t,g, or c
  SITE (30177): n equals a,t,g, or c
  SITE (30178): n equals a,t,g, or c
  SITE (30179): n equals a,t,g, or c
  SITE (30180): n equals a,t,g, or c
  SITE (30181): n equals a,t,g, or c
  SITE (30182): n equals a,t,g, or c
  SITE (30183): n equals a,t,g, or c
  SITE (30184): n equals a,t,g, or c
  SITE (30185): n equals a,t,g, or c
  SITE (30186): n equals a,t,g, or c
  SITE (30187): n equals a,t,g, or c
  SITE (30188): n equals a,t,g, or c
  SITE (30189): n equals a,t,g, or c
  SITE (30190): n equals a,t,g, or c
  SITE (30191): n equals a,t,g, or c
  SITE (30192): n equals a,t,g, or c
  SITE (30193): n equals a,t,g, or c
  SITE (30194): n equals a,t,g, or c
  SITE (30195): n equals a,t,g, or c
  SITE (30196): n equals a,t,g, or c
  SITE (30197): n equals a,t,g, or c
  SITE (30198): n equals a,t,g, or c
  SITE (30199): n equals a,t,g, or c
  SITE (30200): n equals a,t,g, or c
  SITE (30201): n equals a,t,g, or c
  SITE (30202): n equals a,t,g, or c
  SITE (30203): n equals a,t,g, or c
  SITE (30204): n equals a,t,g, or c
  SITE (30205): n equals a,t,g, or c
  SITE (30206): n equals a,t,g, or c
  SITE (30207): n equals a,t,g, or c
  SITE (30208): n equals a,t,g, or c
  SITE (30209): n equals a,t,g, or c
  SITE (30210): n equals a,t,g, or c
  SITE (30211): n equals a,t,g, or c
  SITE (30212): n equals a,t,g, or c
  SITE (30213): n equals a,t,g, or c
  SITE (30214): n equals a,t,g, or c
  SITE (30215): n equals a,t,g, or c
  SITE (30216): n equals a,t,g, or c
  SITE (30217): n equals a,t,g, or c
  SITE (30218): n equals a,t,g, or c
  SITE (30219): n equals a,t,g, or c
  SITE (30220): n equals a,t,g, or c
  SITE (30221): n equals a,t,g, or c
  SITE (30222): n equals a,t,g, or c
  SITE (30223): n equals a,t,g, or c
  SITE (30224): n equals a,t,g, or c
  SITE (30225): n equals a,t,g, or c
  SITE (30226): n equals a,t,g, or c
  SITE (30227): n equals a,t,g, or c
  SITE (30228): n equals a,t,g, or c
  SITE (30229): n equals a,t,g, or c
  SITE (30230): n equals a,t,g, or c
  SITE (30231): n equals a,t,g, or c
  SITE (30232): n equals a,t,g, or c
  SITE (30233): n equals a,t,g, or c
  SITE (30234): n equals a,t,g, or c
  SITE (30235): n equals a,t,g, or c
  SITE (30236): n equals a,t,g, or c
  SITE (30237): n equals a,t,g, or c
  SITE (30238): n equals a,t,g, or c
  SITE (30239): n equals a,t,g, or c
  SITE (30240): n equals a,t,g, or c
  SITE (30241): n equals a,t,g, or c
  SITE (30242): n equals a,t,g, or c
  SITE (30243): n equals a,t,g, or c
  SITE (30244): n equals a,t,g, or c
  SITE (30245): n equals a,t,g, or c
  SITE (30246): n equals a,t,g, or c
  SITE (30247): n equals a,t,g, or c
  SITE (30248): n equals a,t,g, or c
  SITE (30249): n equals a,t,g, or c
  SITE (30250): n equals a,t,g, or c
  SITE (30251): n equals a,t,g, or c
  SITE (30252): n equals a,t,g, or c
  SITE (30253): n equals a,t,g, or c
  SITE (30254): n equals a,t,g, or c
  SITE (30255): n equals a,t,g, or c
  SITE (30256): n equals a,t,g, or c
  SITE (30257): n equals a,t,g, or c
  SITE (30258): n equals a,t,g, or c
  SITE (30259): n equals a,t,g, or c
  SITE (30260): n equals a,t,g, or c
  SITE (30261): n equals a,t,g, or c
  SITE (30262): n equals a,t,g, or c
  SITE (30263): n equals a,t,g, or c
  SITE (30264): n equals a,t,g, or c
  SITE (30265): n equals a,t,g, or c
  SITE (30266): n equals a,t,g, or c
  SITE (30267): n equals a,t,g, or c
  SITE (30268): n equals a,t,g, or c
  SITE (30269): n equals a,t,g, or c
  SITE (30270): n equals a,t,g, or c
  SITE (30271): n equals a,t,g, or c
  SITE (30272): n equals a,t,g, or c
  SITE (30273): n equals a,t,g, or c
  SITE (30274): n equals a,t,g, or c
  SITE (30275): n equals a,t,g, or c
  SITE (30276): n equals a,t,g, or c
  SITE (30277): n equals a,t,g, or c
  SITE (30278): n equals a,t,g, or c
  SITE (30279): n equals a,t,g, or c
  SITE (30280): n equals a,t,g, or c
  SITE (30281): n equals a,t,g, or c
  SITE (30282): n equals a,t,g, or c
  SITE (30283): n equals a,t,g, or c
  SITE (30284): n equals a,t,g, or c
  SITE (30285): n equals a,t,g, or c
  SITE (30286): n equals a,t,g, or c
  SITE (30287): n equals a,t,g, or c
  SITE (30288): n equals a,t,g, or c
  SITE (30289): n equals a,t,g, or c
  SITE (30290): n equals a,t,g, or c
  SITE (30291): n equals a,t,g, or c
  SITE (30292): n equals a,t,g, or c
  SITE (30293): n equals a,t,g, or c
  SITE (30294): n equals a,t,g, or c
  SITE (30295): n equals a,t,g, or c
  SITE (30296): n equals a,t,g, or c
  SITE (30297): n equals a,t,g, or c
  SITE (30298): n equals a,t,g, or c
  SITE (30299): n equals a,t,g, or c
  SITE (30300): n equals a,t,g, or c
  SITE (30301): n equals a,t,g, or c
  SITE (30302): n equals a,t,g, or c
  SITE (30303): n equals a,t,g, or c
  SITE (30304): n equals a,t,g, or c
  SITE (30305): n equals a,t,g, or c
  SITE (30306): n equals a,t,g, or c
  SITE (30307): n equals a,t,g, or c
  SITE (30308): n equals a,t,g, or c
  SITE (30309): n equals a,t,g, or c
  SITE (30310): n equals a,t,g, or c
  SITE (30311): n equals a,t,g, or c
  SITE (30312): n equals a,t,g, or c
  SITE (30313): n equals a,t,g, or c
  SITE (30314): n equals a,t,g, or c
  SITE (30315): n equals a,t,g, or c
  SITE (30316): n equals a,t,g, or c
  SITE (30317): n equals a,t,g, or c
  SITE (30318): n equals a,t,g, or c
  SITE (30319): n equals a,t,g, or c
  SITE (30320): n equals a,t,g, or c
  SITE (30321): n equals a,t,g, or c
  SITE (30322): n equals a,t,g, or c
  SITE (30323): n equals a,t,g, or c
  SITE (30324): n equals a,t,g, or c
  SITE (30325): n equals a,t,g, or c
  SITE (30326): n equals a,t,g, or c
  SITE (30327): n equals a,t,g, or c
  SITE (30328): n equals a,t,g, or c
  SITE (30329): n equals a,t,g, or c
  SITE (30330): n equals a,t,g, or c
  SITE (30331): n equals a,t,g, or c
  SITE (30332): n equals a,t,g, or c
  SITE (30333): n equals a,t,g, or c
  SITE (30334): n equals a,t,g, or c
  SITE (30335): n equals a,t,g, or c
  SITE (30336): n equals a,t,g, or c
  SITE (30337): n equals a,t,g, or c
  SITE (30338): n equals a,t,g, or c
  SITE (30339): n equals a,t,g, or c
  SITE (30340): n equals a,t,g, or c
  SITE (30341): n equals a,t,g, or c
  SITE (30342): n equals a,t,g, or c
  SITE (30343): n equals a,t,g, or c
  SITE (30344): n equals a,t,g, or c
  SITE (30345): n equals a,t,g, or c
  SITE (30346): n equals a,t,g, or c
  SITE (30347): n equals a,t,g, or c
  SITE (30348): n equals a,t,g, or c
  SITE (30349): n equals a,t,g, or c
  SITE (30350): n equals a,t,g, or c
  SITE (30351): n equals a,t,g, or c
  SITE (30352): n equals a,t,g, or c
  SITE (30353): n equals a,t,g, or c
  SITE (30354): n equals a,t,g, or c
  SITE (30355): n equals a,t,g, or c
  SITE (30356): n equals a,t,g, or c
  SITE (30357): n equals a,t,g, or c
  SITE (30358): n equals a,t,g, or c
  SITE (30359): n equals a,t,g, or c
  SITE (30360): n equals a,t,g, or c
  SITE (30361): n equals a,t,g, or c
  SITE (30362): n equals a,t,g, or c
  SITE (30363): n equals a,t,g, or c
  SITE (30364): n equals a,t,g, or c
  SITE (30365): n equals a,t,g, or c
  SITE (30366): n equals a,t,g, or c
  SITE (30367): n equals a,t,g, or c
  SITE (30368): n equals a,t,g, or c
  SITE (30369): n equals a,t,g, or c
  SITE (30370): n equals a,t,g, or c
  SITE (30371): n equals a,t,g, or c
  SITE (30372): n equals a,t,g, or c
  SITE (30373): n equals a,t,g, or c
  SITE (30374): n equals a,t,g, or c
  SITE (30375): n equals a,t,g, or c
  SITE (30376): n equals a,t,g, or c
  SITE (30377): n equals a,t,g, or c
  SITE (30378): n equals a,t,g, or c
  SITE (30379): n equals a,t,g, or c
  SITE (30380): n equals a,t,g, or c
  SITE (30381): n equals a,t,g, or c
  SITE (30382): n equals a,t,g, or c
  SITE (30383): n equals a,t,g, or c
  SITE (30384): n equals a,t,g, or c
  SITE (30385): n equals a,t,g, or c
  SITE (30386): n equals a,t,g, or c
  SITE (30387): n equals a,t,g, or c
  SITE (30388): n equals a,t,g, or c
  SITE (30389): n equals a,t,g, or c
  SITE (30390): n equals a,t,g, or c
  SITE (30391): n equals a,t,g, or c
  SITE (30392): n equals a,t,g, or c
  SITE (30393): n equals a,t,g, or c
  SITE (30394): n equals a,t,g, or c
  SITE (30395): n equals a,t,g, or c
  SITE (30396): n equals a,t,g, or c
  SITE (30397): n equals a,t,g, or c
  SITE (30398): n equals a,t,g, or c
  SITE (30399): n equals a,t,g, or c
  SITE (30400): n equals a,t,g, or c
  SITE (30401): n equals a,t,g, or c
  SITE (30402): n equals a,t,g, or c
  SITE (30403): n equals a,t,g, or c
  SITE (30404): n equals a,t,g, or c
  SITE (30405): n equals a,t,g, or c
  SITE (30406): n equals a,t,g, or c
  SITE (30407): n equals a,t,g, or c
  SITE (30408): n equals a,t,g, or c
  SITE (30409): n equals a,t,g, or c
  SITE (30410): n equals a,t,g, or c
  SITE (30411): n equals a,t,g, or c
  SITE (30412): n equals a,t,g, or c
  SITE (30413): n equals a,t,g, or c
  SITE (30414): n equals a,t,g, or c
  SITE (30415): n equals a,t,g, or c
  SITE (30416): n equals a,t,g, or c
  SITE (30417): n equals a,t,g, or c
  SITE (30418): n equals a,t,g, or c
  SITE (30419): n equals a,t,g, or c
  SITE (30420): n equals a,t,g, or c
  SITE (30421): n equals a,t,g, or c
  SITE (30422): n equals a,t,g, or c
  SITE (30423): n equals a,t,g, or c
  SITE (30424): n equals a,t,g, or c
  SITE (30425): n equals a,t,g, or c
  SITE (30426): n equals a,t,g, or c
  SITE (30427): n equals a,t,g, or c
  SITE (30428): n equals a,t,g, or c
  SITE (30429): n equals a,t,g, or c
  SITE (30430): n equals a,t,g, or c
  SITE (30431): n equals a,t,g, or c
  SITE (30432): n equals a,t,g, or c
  SITE (30433): n equals a,t,g, or c
  SITE (30434): n equals a,t,g, or c
  SITE (30435): n equals a,t,g, or c
  SITE (30436): n equals a,t,g, or c
  SITE (30437): n equals a,t,g, or c
  SITE (30438): n equals a,t,g, or c
  SITE (30439): n equals a,t,g, or c
  SITE (30440): n equals a,t,g, or c
  SITE (30441): n equals a,t,g, or c
  SITE (30442): n equals a,t,g, or c
  SITE (30443): n equals a,t,g, or c
  SITE (30444): n equals a,t,g, or c
  SITE (30445): n equals a,t,g, or c
  SITE (30446): n equals a,t,g, or c
  SITE (30447): n equals a,t,g, or c
  SITE (30448): n equals a,t,g, or c
  SITE (30449): n equals a,t,g, or c
  SITE (30450): n equals a,t,g, or c
  SITE (30451): n equals a,t,g, or c
  SITE (30452): n equals a,t,g, or c
  SITE (30453): n equals a,t,g, or c
  SITE (30454): n equals a,t,g, or c
  SITE (30455): n equals a,t,g, or c
  SITE (30456): n equals a,t,g, or c
  SITE (30457): n equals a,t,g, or c
  SITE (30458): n equals a,t,g, or c
  SITE (30459): n equals a,t,g, or c
  SITE (30460): n equals a,t,g, or c
  SITE (30461): n equals a,t,g, or c
  SITE (30462): n equals a,t,g, or c
  SITE (30463): n equals a,t,g, or c
  SITE (30464): n equals a,t,g, or c
  SITE (30465): n equals a,t,g, or c
  SITE (30466): n equals a,t,g, or c
  SITE (30467): n equals a,t,g, or c
  SITE (30468): n equals a,t,g, or c
  SITE (30469): n equals a,t,g, or c
  SITE (30470): n equals a,t,g, or c
  SITE (30471): n equals a,t,g, or c
  SITE (30472): n equals a,t,g, or c
  SITE (30473): n equals a,t,g, or c
  SITE (30474): n equals a,t,g, or c
  SITE (30475): n equals a,t,g, or c
  SITE (30476): n equals a,t,g, or c
  SITE (30477): n equals a,t,g, or c
  SITE (30478): n equals a,t,g, or c
  SITE (30479): n equals a,t,g, or c
  SITE (30480): n equals a,t,g, or c
  SITE (30481): n equals a,t,g, or c
  SITE (30482): n equals a,t,g, or c
  SITE (30483): n equals a,t,g, or c
  SITE (30484): n equals a,t,g, or c
  SITE (30485): n equals a,t,g, or c
  SITE (30486): n equals a,t,g, or c
  SITE (30487): n equals a,t,g, or c
  SITE (30488): n equals a,t,g, or c
  SITE (30489): n equals a,t,g, or c
  SITE (30490): n equals a,t,g, or c
  SITE (30491): n equals a,t,g, or c
  SITE (30492): n equals a,t,g, or c
  SITE (30493): n equals a,t,g, or c
  SITE (30494): n equals a,t,g, or c
  SITE (30495): n equals a,t,g, or c
  SITE (30496): n equals a,t,g, or c
  SITE (30497): n equals a,t,g, or c
  SITE (30498): n equals a,t,g, or c
  SITE (30499): n equals a,t,g, or c
  SITE (30500): n equals a,t,g, or c
  SITE (30501): n equals a,t,g, or c
  SITE (30502): n equals a,t,g, or c
  SITE (30503): n equals a,t,g, or c
  SITE (30504): n equals a,t,g, or c
  SITE (30505): n equals a,t,g, or c
  SITE (30506): n equals a,t,g, or c
  SITE (30507): n equals a,t,g, or c
  SITE (30508): n equals a,t,g, or c
  SITE (30509): n equals a,t,g, or c
  SITE (30510): n equals a,t,g, or c
  SITE (30511): n equals a,t,g, or c
  SITE (30512): n equals a,t,g, or c
  SITE (30513): n equals a,t,g, or c
  SITE (30514): n equals a,t,g, or c
  SITE (30515): n equals a,t,g, or c
  SITE (30516): n equals a,t,g, or c
  SITE (30517): n equals a,t,g, or c
  SITE (30518): n equals a,t,g, or c
  SITE (30519): n equals a,t,g, or c
  SITE (30520): n equals a,t,g, or c
  SITE (30521): n equals a,t,g, or c
  SITE (30522): n equals a,t,g, or c
  SITE (30523): n equals a,t,g, or c
  SITE (30524): n equals a,t,g, or c
  SITE (30525): n equals a,t,g, or c
  SITE (30526): n equals a,t,g, or c
  SITE (30527): n equals a,t,g, or c
  SITE (30528): n equals a,t,g, or c
  SITE (30529): n equals a,t,g, or c
  SITE (30530): n equals a,t,g, or c
  SITE (30531): n equals a,t,g, or c
  SITE (30532): n equals a,t,g, or c
  SITE (30533): n equals a,t,g, or c
  SITE (30534): n equals a,t,g, or c
  SITE (30535): n equals a,t,g, or c
  SITE (30536): n equals a,t,g, or c
  SITE (30537): n equals a,t,g, or c
  SITE (30538): n equals a,t,g, or c
  SITE (30539): n equals a,t,g, or c
  SITE (30540): n equals a,t,g, or c
  SITE (30541): n equals a,t,g, or c
  SITE (30542): n equals a,t,g, or c
  SITE (30543): n equals a,t,g, or c
  SITE (30544): n equals a,t,g, or c
  SITE (30545): n equals a,t,g, or c
  SITE (30546): n equals a,t,g, or c
  SITE (30547): n equals a,t,g, or c
  SITE (30548): n equals a,t,g, or c
  SITE (30549): n equals a,t,g, or c
  SITE (30550): n equals a,t,g, or c
  SITE (30551): n equals a,t,g, or c
  SITE (30552): n equals a,t,g, or c
  SITE (30553): n equals a,t,g, or c
  SITE (30554): n equals a,t,g, or c
  SITE (30555): n equals a,t,g, or c
  SITE (30556): n equals a,t,g, or c
  SITE (30557): n equals a,t,g, or c
  SITE (30558): n equals a,t,g, or c
  SITE (30559): n equals a,t,g, or c
  SITE (30560): n equals a,t,g, or c
  SITE (30561): n equals a,t,g, or c
  SITE (30562): n equals a,t,g, or c
  SITE (30563): n equals a,t,g, or c
  SITE (30564): n equals a,t,g, or c
  SITE (30565): n equals a,t,g, or c
  SITE (30566): n equals a,t,g, or c
  SITE (30567): n equals a,t,g, or c
  SITE (30568): n equals a,t,g, or c
  SITE (30569): n equals a,t,g, or c
  SITE (30570): n equals a,t,g, or c
  SITE (30571): n equals a,t,g, or c
  SITE (30572): n equals a,t,g, or c
  SITE (30573): n equals a,t,g, or c
  SITE (30574): n equals a,t,g, or c
  SITE (30575): n equals a,t,g, or c
  SITE (30576): n equals a,t,g, or c
  SITE (30577): n equals a,t,g, or c
  SITE (30578): n equals a,t,g, or c
  SITE (30579): n equals a,t,g, or c
  SITE (30580): n equals a,t,g, or c
  SITE (30581): n equals a,t,g, or c
  SITE (30582): n equals a,t,g, or c
  SITE (30583): n equals a,t,g, or c
  SITE (30584): n equals a,t,g, or c
  SITE (30585): n equals a,t,g, or c
  SITE (30586): n equals a,t,g, or c
  SITE (30587): n equals a,t,g, or c
  SITE (30588): n equals a,t,g, or c
  SITE (30589): n equals a,t,g, or c
  SITE (30590): n equals a,t,g, or c
  SITE (30591): n equals a,t,g, or c
  SITE (30592): n equals a,t,g, or c
  SITE (30593): n equals a,t,g, or c
  SITE (30594): n equals a,t,g, or c
  SITE (30595): n equals a,t,g, or c
  SITE (30596): n equals a,t,g, or c
  SITE (30597): n equals a,t,g, or c
  SITE (30598): n equals a,t,g, or c
  SITE (30599): n equals a,t,g, or c
  SITE (30600): n equals a,t,g, or c
  SITE (30601): n equals a,t,g, or c
  SITE (30602): n equals a,t,g, or c
  SITE (30603): n equals a,t,g, or c
  SITE (30604): n equals a,t,g, or c
  SITE (30605): n equals a,t,g, or c
  SITE (30606): n equals a,t,g, or c
  SITE (30607): n equals a,t,g, or c
  SITE (30608): n equals a,t,g, or c
  SITE (30609): n equals a,t,g, or c
  SITE (30610): n equals a,t,g, or c
  SITE (30611): n equals a,t,g, or c
  SITE (30612): n equals a,t,g, or c
  SITE (30613): n equals a,t,g, or c
  SITE (30614): n equals a,t,g, or c
  SITE (30615): n equals a,t,g, or c
  SITE (30616): n equals a,t,g, or c
  SITE (30617): n equals a,t,g, or c
  SITE (30618): n equals a,t,g, or c
  SITE (30619): n equals a,t,g, or c
  SITE (30620): n equals a,t,g, or c
  SITE (30621): n equals a,t,g, or c
  SITE (30622): n equals a,t,g, or c
  SITE (30623): n equals a,t,g, or c
  SITE (30624): n equals a,t,g, or c
  SITE (30625): n equals a,t,g, or c
  SITE (30626): n equals a,t,g, or c
  SITE (30627): n equals a,t,g, or c
  SITE (30628): n equals a,t,g, or c
  SITE (30629): n equals a,t,g, or c
  SITE (30630): n equals a,t,g, or c
  SITE (30631): n equals a,t,g, or c
  SITE (30632): n equals a,t,g, or c
  SITE (30633): n equals a,t,g, or c
  SITE (30634): n equals a,t,g, or c
  SITE (30635): n equals a,t,g, or c
  SITE (30636): n equals a,t,g, or c
  SITE (30637): n equals a,t,g, or c
  SITE (30638): n equals a,t,g, or c
  SITE (30639): n equals a,t,g, or c
  SITE (30640): n equals a,t,g, or c
  SITE (30641): n equals a,t,g, or c
  SITE (30642): n equals a,t,g, or c
  SITE (30643): n equals a,t,g, or c
  SITE (30644): n equals a,t,g, or c
  SITE (30645): n equals a,t,g, or c
  SITE (30646): n equals a,t,g, or c
  SITE (30647): n equals a,t,g, or c
  SITE (30648): n equals a,t,g, or c
  SITE (30649): n equals a,t,g, or c
  SITE (30650): n equals a,t,g, or c
  SITE (30651): n equals a,t,g, or c
  SITE (30652): n equals a,t,g, or c
  SITE (30653): n equals a,t,g, or c
  SITE (30654): n equals a,t,g, or c
  SITE (30655): n equals a,t,g, or c
  SITE (30656): n equals a,t,g, or c
  SITE (30657): n equals a,t,g, or c
  SITE (30658): n equals a,t,g, or c
  SITE (30659): n equals a,t,g, or c
  SITE (30660): n equals a,t,g, or c
  SITE (30661): n equals a,t,g, or c
  SITE (30662): n equals a,t,g, or c
  SITE (30663): n equals a,t,g, or c
  SITE (30664): n equals a,t,g, or c
  SITE (30665): n equals a,t,g, or c
  SITE (30666): n equals a,t,g, or c
  SITE (30667): n equals a,t,g, or c
  SITE (30668): n equals a,t,g, or c
  SITE (30669): n equals a,t,g, or c
  SITE (30670): n equals a,t,g, or c
  SITE (30671): n equals a,t,g, or c
  SITE (30672): n equals a,t,g, or c
  SITE (30673): n equals a,t,g, or c
  SITE (30674): n equals a,t,g, or c
  SITE (30675): n equals a,t,g, or c
  SITE (30676): n equals a,t,g, or c
  SITE (30677): n equals a,t,g, or c
  SITE (30678): n equals a,t,g, or c
  SITE (30679): n equals a,t,g, or c
  SITE (30680): n equals a,t,g, or c
  SITE (30681): n equals a,t,g, or c
  SITE (30682): n equals a,t,g, or c
  SITE (30683): n equals a,t,g, or c
  SITE (30684): n equals a,t,g, or c
  SITE (30685): n equals a,t,g, or c
  SITE (30686): n equals a,t,g, or c
  SITE (30687): n equals a,t,g, or c
  SITE (30688): n equals a,t,g, or c
  SITE (30689): n equals a,t,g, or c
  SITE (30690): n equals a,t,g, or c
  SITE (30691): n equals a,t,g, or c
  SITE (30692): n equals a,t,g, or c
  SITE (30693): n equals a,t,g, or c
  SITE (30694): n equals a,t,g, or c
  SITE (30695): n equals a,t,g, or c
  SITE (30696): n equals a,t,g, or c
  SITE (30697): n equals a,t,g, or c
  SITE (30698): n equals a,t,g, or c
  SITE (30699): n equals a,t,g, or c
  SITE (30700): n equals a,t,g, or c
  SITE (30701): n equals a,t,g, or c
  SITE (30702): n equals a,t,g, or c
  SITE (30703): n equals a,t,g, or c
  SITE (30704): n equals a,t,g, or c
  SITE (30705): n equals a,t,g, or c
  SITE (30706): n equals a,t,g, or c
  SITE (30707): n equals a,t,g, or c
  SITE (30708): n equals a,t,g, or c
  SITE (30709): n equals a,t,g, or c
  SITE (30710): n equals a,t,g, or c
  SITE (30711): n equals a,t,g, or c
  SITE (30712): n equals a,t,g, or c
  SITE (30713): n equals a,t,g, or c
  SITE (30714): n equals a,t,g, or c
  SITE (30715): n equals a,t,g, or c
  SITE (30716): n equals a,t,g, or c
  SITE (30717): n equals a,t,g, or c
  SITE (30718): n equals a,t,g, or c
  SITE (30719): n equals a,t,g, or c
  SITE (30720): n equals a,t,g, or c
  SITE (30721): n equals a,t,g, or c
  SITE (30722): n equals a,t,g, or c
  SITE (30723): n equals a,t,g, or c
  SITE (30724): n equals a,t,g, or c
  SITE (30725): n equals a,t,g, or c
  SITE (30726): n equals a,t,g, or c
  SITE (30727): n equals a,t,g, or c
  SITE (30728): n equals a,t,g, or c
  SITE (30729): n equals a,t,g, or c
  SITE (30730): n equals a,t,g, or c
  SITE (30731): n equals a,t,g, or c
  SITE (30732): n equals a,t,g, or c
  SITE (30733): n equals a,t,g, or c
  SITE (30734): n equals a,t,g, or c
  SITE (30735): n equals a,t,g, or c
  SITE (30736): n equals a,t,g, or c
  SITE (30737): n equals a,t,g, or c
  SITE (30738): n equals a,t,g, or c
  SITE (30739): n equals a,t,g, or c
  SITE (30740): n equals a,t,g, or c
  SITE (30741): n equals a,t,g, or c
  SITE (30742): n equals a,t,g, or c
  SITE (30743): n equals a,t,g, or c
  SITE (30744): n equals a,t,g, or c
  SITE (30745): n equals a,t,g, or c
  SITE (30746): n equals a,t,g, or c
  SITE (30747): n equals a,t,g, or c
  SITE (30748): n equals a,t,g, or c
  SITE (30749): n equals a,t,g, or c
  SITE (30750): n equals a,t,g, or c
  SITE (30751): n equals a,t,g, or c
  SITE (30752): n equals a,t,g, or c
  SITE (30753): n equals a,t,g, or c
  SITE (30754): n equals a,t,g, or c
  SITE (30755): n equals a,t,g, or c
  SITE (30756): n equals a,t,g, or c
  SITE (30757): n equals a,t,g, or c
  SITE (30758): n equals a,t,g, or c
  SITE (30759): n equals a,t,g, or c
  SITE (30760): n equals a,t,g, or c
  SITE (30761): n equals a,t,g, or c
  SITE (30762): n equals a,t,g, or c
  SITE (30763): n equals a,t,g, or c
  SITE (30764): n equals a,t,g, or c
  SITE (30765): n equals a,t,g, or c
  SITE (30766): n equals a,t,g, or c
  SITE (30767): n equals a,t,g, or c
  SITE (30768): n equals a,t,g, or c
  SITE (30769): n equals a,t,g, or c
  SITE (30770): n equals a,t,g, or c
  SITE (30771): n equals a,t,g, or c
  SITE (30772): n equals a,t,g, or c
  SITE (30773): n equals a,t,g, or c
  SITE (30774): n equals a,t,g, or c
  SITE (30775): n equals a,t,g, or c
  SITE (30776): n equals a,t,g, or c
  SITE (30777): n equals a,t,g, or c
  SITE (30778): n equals a,t,g, or c
  SITE (30779): n equals a,t,g, or c
  SITE (30780): n equals a,t,g, or c
  SITE (30781): n equals a,t,g, or c
  SITE (30782): n equals a,t,g, or c
  SITE (30783): n equals a,t,g, or c
  SITE (30784): n equals a,t,g, or c
  SITE (30785): n equals a,t,g, or c
  SITE (30786): n equals a,t,g, or c
  SITE (30787): n equals a,t,g, or c
  SITE (30788): n equals a,t,g, or c
  SITE (30789): n equals a,t,g, or c
  SITE (30790): n equals a,t,g, or c
  SITE (30791): n equals a,t,g, or c
  SITE (30792): n equals a,t,g, or c
  SITE (30793): n equals a,t,g, or c
  SITE (30794): n equals a,t,g, or c
  SITE (30795): n equals a,t,g, or c
  SITE (30796): n equals a,t,g, or c
  SITE (30797): n equals a,t,g, or c
  SITE (30798): n equals a,t,g, or c
  SITE (30799): n equals a,t,g, or c
  SITE (30800): n equals a,t,g, or c
  SITE (30801): n equals a,t,g, or c
  SITE (30802): n equals a,t,g, or c
  SITE (30803): n equals a,t,g, or c
  SITE (30804): n equals a,t,g, or c
  SITE (30805): n equals a,t,g, or c
  SITE (30806): n equals a,t,g, or c
  SITE (30807): n equals a,t,g, or c
  SITE (30808): n equals a,t,g, or c
  SITE (30809): n equals a,t,g, or c
  SITE (30810): n equals a,t,g, or c
  SITE (30811): n equals a,t,g, or c
  SITE (30812): n equals a,t,g, or c
  SITE (30813): n equals a,t,g, or c
  SITE (30814): n equals a,t,g, or c
  SITE (30815): n equals a,t,g, or c
  SITE (30816): n equals a,t,g, or c
  SITE (30817): n equals a,t,g, or c
  SITE (30818): n equals a,t,g, or c
  SITE (30819): n equals a,t,g, or c
  SITE (30820): n equals a,t,g, or c
  SITE (30821): n equals a,t,g, or c
  SITE (30822): n equals a,t,g, or c
  SITE (30823): n equals a,t,g, or c
  SITE (30824): n equals a,t,g, or c
  SITE (30825): n equals a,t,g, or c
  SITE (30826): n equals a,t,g, or c
  SITE (30827): n equals a,t,g, or c
  SITE (30828): n equals a,t,g, or c
  SITE (30829): n equals a,t,g, or c
  SITE (30830): n equals a,t,g, or c
  SITE (30831): n equals a,t,g, or c
  SITE (30832): n equals a,t,g, or c
  SITE (30833): n equals a,t,g, or c
  SITE (30834): n equals a,t,g, or c
  SITE (30835): n equals a,t,g, or c
  SITE (30836): n equals a,t,g, or c
  SITE (30837): n equals a,t,g, or c
  SITE (30838): n equals a,t,g, or c
  SITE (30839): n equals a,t,g, or c
  SITE (30840): n equals a,t,g, or c
  SITE (30841): n equals a,t,g, or c
  SITE (30842): n equals a,t,g, or c
  SITE (30843): n equals a,t,g, or c
  SITE (30844): n equals a,t,g, or c
  SITE (30845): n equals a,t,g, or c
  SITE (30846): n equals a,t,g, or c
  SITE (30847): n equals a,t,g, or c
  SITE (30848): n equals a,t,g, or c
  SITE (30849): n equals a,t,g, or c
  SITE (30850): n equals a,t,g, or c
  SITE (30851): n equals a,t,g, or c
  SITE (30852): n equals a,t,g, or c
  SITE (30853): n equals a,t,g, or c
  SITE (30854): n equals a,t,g, or c
  SITE (30855): n equals a,t,g, or c
  SITE (30856): n equals a,t,g, or c
  SITE (30857): n equals a,t,g, or c
  SITE (30858): n equals a,t,g, or c
  SITE (30859): n equals a,t,g, or c
  SITE (30860): n equals a,t,g, or c
  SITE (30861): n equals a,t,g, or c
  SITE (30862): n equals a,t,g, or c
  SITE (30863): n equals a,t,g, or c
  SITE (30864): n equals a,t,g, or c
  SITE (30865): n equals a,t,g, or c
  SITE (30866): n equals a,t,g, or c
  SITE (30867): n equals a,t,g, or c
  SITE (30868): n equals a,t,g, or c
  SITE (30869): n equals a,t,g, or c
  SITE (30870): n equals a,t,g, or c
  SITE (30871): n equals a,t,g, or c
  SITE (30872): n equals a,t,g, or c
  SITE (30873): n equals a,t,g, or c
  SITE (30874): n equals a,t,g, or c
  SITE (30875): n equals a,t,g, or c
  SITE (30876): n equals a,t,g, or c
  SITE (30877): n equals a,t,g, or c
  SITE (30878): n equals a,t,g, or c
  SITE (30879): n equals a,t,g, or c
  SITE (30880): n equals a,t,g, or c
gaaggaaatttgtgattagaagccgcgctgttcttatttaagagcgttagcgcaacttccggtattgttgcaagatggccgcgcccagtgatggattcaagcctcgtgaacgaagcggtggggagcaggcacaggactgggatgctctgccacccaagcggccccgactaggggcaggaaacaagatcggaggccgtaggcttattgtggtgctggaaggggccagtctggagacagtcaaggtagtttgggacaggaagtggagaagtagtaaatcgataggttgggactccgtggaatgagggtaaggggcccagagtggatgtagaaagcagagaggggtgaaagatgcttttgaaggaaggtggcttggttggctttgcgttgatttgacatcctgggatggtagtactcatttttctttctttttttttttttttttgagacggagtctcgctctgtcgcccaggctggagtgcagttgcgcgacctcggctcactgcaacttctgcctcccgccttcaaacagttctcctgactcagcctctggagtagctgggactacaggcaggtgccaccacgcccggctaatttttttgtatttttagttcagatggggtttcaccatgttggccacgctggtctcgaactcctgacctcaagtgatccgcccgcctcggcctcccaaagtgttgggattagaggcgtgagccactgtgcccggccggtagtactcattttcttttgctctttttgaatgatattctagccctcacctccttgcttccaattggtttaccaggattctgtggtatagtagtctaagcagaggaaagtttcgttccttgcgtcattccacatcccaagacaagttactgggcagatgagaaacgtagttatgtagcctagtctgcccacactttttgtaagggcttcgtgtttcaattcattagtatccatagtcacctctctctaatatccacctatgatacactgtccagacctggttattatttaaaacttttacatctgcatttttatctatcattcatctctttccccacatgtaatagaaccagcagttctctatcttaaagccttgggcagtgttcttcctcctcctttctcttacccgttagaactaattgaataggcccagaagaaatcgcattggtttagaagtcaggccaggattttaatcttcgttctaaatacacttttttttttttttttttttgagatggagtctcagtctctaccaggctggagtgcagtggcacgatcttggctcactgcagcctccgcctcccgggttcaatcgattctcctgcctcagcctccagagtagctgggattacaggcctgcgcctgtaatctattaaaagaatagaaaacatgattatatcctactaatgggttgaaactgtattattcattcaagaaggtttttttcttctataactaagggtgtctcatggacttagttcttggtcatttgttctttgtgctctctgtgacattacttcaactattcaatttcaaaatctacatcccttttttcgcagactttttggagccatatatctcaagaatgttgctagacatatacattccagtgatacataaaaacttaaccttccaaaacttgtatttgtatataacagtttgtttttagactttttactgaccaccctaatgctccttgggactccaaattgcaacttggaattatttcttttagctgctacagatgtagtccacttctttaacatcaaacttctgatgtcttttccagtgtacagagagttgttaggatagtgtctgtcagtcattcccatcctgccctgcttactccagaattatttttggctttgtgcttgatacattaggattctgtggtttacaaagcagcttcatatataatcactgccctttagtgtctcagctcccaattttcctcaaaatttcctttcttcgtttccactttttcttttttgtttcttttttgagatagggtcttgctctgttgcctgggcaacagagtgcagtggtgtgatggttcactgcagcctctacttccctggctcaagcagtcctcccacctcatcctcctgagtaactgggactgccagcaaatggcactgcgcctggctaatttttttttttttttttgtgagacagggtcccaccgtgttgcccaggccggtctcaaattcctgggctcaagtgatccttccacctcggcctcctaaagtgttgggatcacaggcataagccaccacacctggctactttgtcttgattccatctgtacctttgctcatgccagtctttcttttttcttttttttgagacagggtcttgctggagtgcagtggtacagtcttggctcactgcaatctctgtctcctgggctcaagccatcctcccaccttagcctcccaagtagctaggactacaggcatgtgccaccatgcccagctaatttttgtatttttagtagagatggggtttcgccatgttgcccaggctggtcttgaactcctgaccttaagtgatttgcctgccttggcctcccagagtgctgggattacagccgtgagccactgcatctgcccccatgcccgtcttaaaactgggaataacccctcttccttttacttctgagagttttctttgattaaactgcctcctgcatcattagttttcacatttcttttttttgagatggagtctcgctctgttgcccgggctggagtgcagtggcgctgcaagctccgcctcctgggttcatgccattctcctgcctctgcctcccaagtagctgggactacaggcgcctgccaccatgcccggctaattttttatatttttagtagagatggggtttcaccgtgttagccacgatggtctcaatctcctgaccttgtgatctgcccgcctcggcctcccaaagtgctgggattacaggcgtgagccaccacgcccggccttcacatttcttgttcagatttgcagctcttcacttagtgcatgtttggtgtacgcaaactgagggtggtgactcgatattttgcacagtacctacttactgctcctgtaataaacacagcattcagccttgctaactactaactcctgcctagttccaggatgtctcattggccttgcctaacagccacaggttttttaattaaatccagtgtattagtagataatgtgaagtcacaggttgtgcccttcctcctgtttccctctcagaccattcactggggagtgcaaataaggctgcacagtaatcccccgaagggcttgctgggctccacccccagtgttcctggtttagtaggtctagggtgggcctgagaatttgcctaacaagtttccaggtgcagctgctgctggtagtttggggaccacacttgaagaaccacggggctaggtaacagaagcttatgctgttctctcgtcatgttccctgttcttcaggtagggaagacatatgagctactcaactgtgacaagcacaagtctatattgttgaagaatggacgggaccctggggaagcgcggccagatatcacccaccaggtaactccagggacagtgctcacaaccctttgagcctctgtatggaagggttggcagctgagtgctgcctctcttcagccttaaccatgtctcggtttctgctttgctcagagtttgctgatgctgatggatagtcccctgaaccgagctggcttgctacaggtttatatccatacacagaagaatgttctgattgaagtgaatccccagacccgaattcccagaacctttgaccgcttttgtggcctcatgggtaagaagccttagaacaaagttagaatgaacttgtcagtagggaagaagggaggaagaggaaaagggagaactaaatgtggatttttaagcgagaaaatgggagaacaacatgattaataccaggacaaggactgttattatttttctatgtttgtggaaactccactcctgttcttgcagtagcttcctggctgagtgaaagagggagtctgaacccatcactgtacagctagccatatgcttggcaactgtttgttcctaacatttcaggagtccagtctagatataaagcacacagggaactcatcttatccatggggttttccttgttcgatgactggacagaaggactgtggtctccatctagctctgaactcttttttcccccttctagttcaacttttacacaagctcagtgttcgagcagctgatggcccccagaagcttttgaaggtgaggtattgaaacctgttagttgaaggctggttctgggaatgtttctggggctgacttttctctcttttttactttaggtaattaagaatccagtatcagatcactttccagttggatgtatgaaagttggcacttctttttccatcccggttgtcagtgatgtgcgtgagctggtgcccagcagtgatcctattgtttttgtggtaggggcctttgcccatggcaaggtaaggtctgggctcaaccctgaaattcttggtagagctgaacttagtatagaattcccagagcagtaggcattttaacaatgcttacaatgagctagaagacacatgacagttccacaccctgccccagggcacatcctttgagggctgctgccataattggaagtcacagttaggaccttcttcatcctttgtagggatttgatattcaacagcacagctgaaatactagctcagccatagttttcctgccctaaagaagggctgaaacagctactgagtgacagagttggctgacaaaactgttcttttcttaggtcagtgtggagtatacagagaagatggtgtccatcagtaactaccccctttctgctgccctcacctgtgcaaaacttaccacagcctttgaggaagtatggggggtcatttgacagtagtagaacctgttctgaaaccagaaactgttgatgtcacatcctttgaccctggtctgagctgactgctggaagatgatctttctgcactgagactgtggagtttggggaagccaaggctgtacatttgctatttgtttatcctatgaatactgttcttgcaaacctggttgttttggggttcctaaagtatccagtggtgtaaaactgtttgttccccgggacttcagggacagataggaggttacagagtttgcagtttggttccatgctttgaaggcaggctttagctcccagattcccatgtgctaaaggagagaaccctgatgatggagaagaactgtgaaagagagcagtcaggaatgctagtggtgaaaaactgaacaaacagaagtgattttatctaatacagttccaaggtagaaaaagtggagcaggcagggccttgcacccctctccacccccccatggggggggtggtggtagcggcacatacacaatcatagtaaattggcagaagaaaaacacaatagattcctggctagatggggagagataaggcaatgtgcatgggggaatcagaggggagatgtgagcccctctgctcctcccacaagagtttcccctttgggccgggcacggtggctcacgcctgtaatcccagcactttgggaggcggaggcgggtggatcacttgcggtcaggagttcgagaccagcctggccaacgtggtgaaatcccgtttctactgaaaatacaaaaattagctgggcatggtggcgtgcctgtattcccagctacttgggaggctgaggcaggaaaatcacttgaacccaggaggtggaggttgcggtgagctgagatcccgccactgcattccagcgtgggtgacaaagcaagacgccttctccaaaaaaaagtttcccctttggccccaaatgaagacttggctggcagcagaggcacagctggaagcatcgatcttccacctccctggcttttccattctctgctctggggcaaaggagtgctgtgaaaagggagacgagtagtttctgcaccagtcccgcacaggccacctgcaagacaagaggagtttggaaggctggttagttactcctgtaattcctggtctatagcccttccagatgtttcctagcatgcctcaataagtcacagtagtcattgcccatactgtgttccttagtagccaggctaatccttggaattcaccccagatttctaatactattgtttttttccagtctgttgctctattctgtaacctggtggtagttttagtttagctgtattaacttaccagggaaatggattattccatcttctttaacttctctttccttggcaccattgctttgtgaatataaggcaatatgaatagtaggctcaggaagaagatgtggccaaggaaatagatggatttatacacctgtggagagagaggccactaaggtagacaggcctggagtgtcctttgcaacctttgaggttgcagtgagtccctcccagtctcacaagcaggccttcacttgccttaagccatttgtcccacgtgaagaggcagaaggcagtcatggagtaacccatgaagagccagtggatggtctgttgcaccaaatagtagaagggctggaggacagtaatggcggccagcttgctcagggtggggctctcttgaatgagcctggcagcctggggagggaggaggagctcatcagcatcttgtcccttatattccccttcacccccaccctggaggcctacctgtctttccacaataacaatgaggaattccatctggaagcagaccaggtatcctgagtgcaggccgtgccagagggccaggaatagcaacgagagaccctgagagagttctttatttccaaggaacttgagtcgtttgaagatgtagctggagaaaagggtgggtggggcgaccctcaaactgactggtccttgcatcccgccacctgcctctgggtcctcaccctgaggattggattggagtgctggtgggttcccacgtgtagcccccagagggtacaggaggcagtgctgactgattacttttagagatggaaagcagacccaaggcggagctggagaccgtgtgcgcacgagccacttggttcagcagcagtgactgaggctgatgctgagatcagtggtgaaccagacactctactcaagctgcccacactctagtggtggggacaaacaagtaaagctgttgataaacagggcagtggaggacataagtccattggcagagctggagtaacacccaggtcttaacgcacttttatatcttgcctttttttcaaatatgacagtaatggtttttttgggaggggggtataggtgggggtcaaagtcagtgtgagcgacagggggttctgcccagatgggaaagacgcataggggtgacatggtacacccctgccctccaatctgggaagacagtggaaggaaggaaccagggtccaggctccccaccagcagctcaccgggccacccaggcgttggtgttgatgttgaatgaggcaatggtgccagtgaagcgggggtttgtttcaaagagccacaccttcatgttggcacaggcatcccactttgccttgcccttttcttcaaagccattgaagcccaggcccgtcaaaatgcatactccttcctgagagggaatagctcagttagggctcttgccactccccatactggcccccatggcttgtctaaataggaccttgtttcaacttttctacttactgtgaccagccaacaggtgacatatttgtacagcacaaacttgccccagatcagcatgtacatgcagcggaaccagaaggggtggttcttgagggaagaaagcacagtgcattagggatatcacatgactaggcagtttctctcagcactcttccttttcacacttgtggctggctacttcatacctgcctgagtcctgctgccagatgccctcaatagtctggcctgattgccttcacaataggcagagaggaataagcagagggcctggagaatattcattcgcctttcccttggagagcctcaagggcagcactgtatttaacttctctactgtttgccttcgttggcaaagtgtttggaatgagcatttggaatgttaagtacagaggggcccatattggattttaatttaaggagagaaacctgcccagaattactgaactgttttcaagcctttcagctgggcaggagcaaaagccagcacttccccccttcccttggtttctgaattccctagaagtgcccaaatgtatcagtcaagagaagaaaataggatggagaatcagaagctgctgtgctctgaggggtcacgtggatgtgataaggcaagctaggagcggctcctagagaaggcaacgggtgctaaatgtgcacctggcacagccctgtgcccgcgaaggttgttcagtgctggctgatgaacatgtcccagcacggctggcattgacaactcacagatctagagcaaaaccaacatgcacttgtagatgatatttcctacttctctgctatctgtagggatccttgcctgtccattttctagctctggtgcagtcatgctgctgctgctttagtagacactcacgtcatagtcttcagtgaggagatagtcttctgtgatgtgggggctgagcagtgtgtagcccactaggtagaaaaggcccagactcaggcgcttgagagcaggaatgatgctggaaaggaacgagtgaagttcctggtcacagagagcagagactattcccttcaccctctgaccttcagttatggagaggagtgtttaggggtgtggttgtctacctggaatgggatgagaagctctgctgcccaaagtgtttcctgtttcagggaaagatttctatggctggctatgaggaatggggactgcaaacctcttaagagttgtaggaaagtcagggcagcagacagtggaccagtcttgtgtttacccctcagggatgctactgatctcaaggtcttgccaggtctcacaatctccattgggactgaaaacccagtggaggtaagataataaaaataaccactttgaatctgctccttcatttcttggttgaattgatgctgaaacacaggatggacaagttctcagtgaaggaattcttctggcaattaaactttttttttttttttttttttaccattttaatttttattttctagagtcagggccttgctctgccactccggctagagtacagaggcatagtcattgctcgctgtggccttgaactcctgggctcaagcgatccccttgccttggccacctgagtagctgggactataggcatgtaccaccttgcctggataatttttttttgtagagatggggtctcactatgttgcccaggctggtcttgaactcctggcctccagtgatcctcctgccttggcctcccagagcgttggcattacaggcatgagccactgtgccctcctgcatttcctactgataaatatttttgagacaggattttgctatgttgcccagaatggagtgcagtggtgtgatcaaagctcactgcagccttgacccacctcccctggactcaagcaattctcccacttcagcctcctatgtagcttggactacagatgcatgccactatgtctgataatttttgtatttttttgtagagacagagtctctctatgttgccaggctggtctagaactcacgggctcaagtgatcctcccacctcggcctcccaaagtgctgggattatagaggtgaaaccactgtgcccagcctctatctacctacctacctatcaacctgcctacctacctatcaatcataaatatatttcatatatacatgaaaataggctttaaaggcagaaatgtgactggttcaggcaaaatcctgtggcataaatgtggatttttatgtttgtactagtgttagaatggataactggaagaaccctaaactaaaaagggcccactcctggcacagagtgcctgttacaacagtccagggcctgcatgactcaggtctctatgccagggtcatgctggagaatgcagctttcagaagagtcacttcagagtgagtgaaatacctacacaaacatctggaccaagaggggcaattacctgtttggtatctttcctggtatgtcaatcagctctccctgcaccagcttcatgtagtgattcattgagaactggggccctaccaagaaggccccatagaagtaggagaaaccagcaacttccagcagggaaggaacaccacgtatggcatatttctgttgctcagaggacaaggaattctatgccaagaagagaatgcatggttcaggatagccttgaatctccccacaagagccactttgagtgttccccacctgtgtgccccactgactggggttcttcaaatagccttctctttgggggatgacaaatagttgcttcttgtggaaatgcgtatgtgtgtgcatagctggctgttgctgctttagcaaatgccttgctggcattgatctctggactttgtgcaagagctggatcctgggcaaattagatttgttgatccttgctcagtgctatctgaaagggagattgcacaggctggggaatgagggagaggctccgctctggaatttgggttcagtcttttgttaacaacttttttcttccctttcattaagtcttgaacctctctgccgatgaatgggtacttacctgatctttccctccgtcaaagtagtcaacagccaaacctgagcagagagagaacggatgggtagggtggtgggagaggacactgaggatgtggcctgtagactgagtgcagccagaagtgtatggcggggggcggagggggggtgccgaggaagtttttagtgagatgggggagggacctacatgtaaggaaggcaggcagtgaccatcactcaccaatcagcttcaaagtcagaacacaatgtggcattgtccacttgatatcgtagttgccggtggcagtgtaatagtatccagccagaaggtaggcctaggagaggcagaagtatttattctagcatcactactatttcttctccttgctctgaaattcaatgttctctttcctttttcctttctcctcatcccatcattaaaagccttaataaattcctacaaatggaggtgctgaaaacctgtaatgggaagagcgttgctcaaggcttcttggcaaaatgagggctaaactgagatgagaatttagatgctgggaccacaggtgcatgccaccccacccggctaatttttaattttttttgtttcaccatgttgcccaggctggagggctaatttttgtattttttttgtagagatggggtttcaccatgttgcccgggttagtctcaaactcctgggctcaagcaatctgactgccttggcctcccaaggtgctgggattacaggtgtgagccactttgcctggcctaggcttaggttctttaactcattctaagttgcttttctgtcttgccttgaagtgactctgctcctggatagtgggttaaaccaaagagcctaatggcacagtatgcaaagggttagctggtggcccttccttgaggcaggcaaagagttaccattacaatctgtggatggaacacttgggcctgtgataagccacctacctgaagtcatactgctaagtgctgggagaggggttagaaattaggtctgctaatttctataccacagtcccctgcctacccctgtcccctgaaccgctgtcagctgtagcctgagctgctaagggaaagacgtttaccatctggaagcaaaaggtagtgaggacggcagtgatggtgcggcccattagtcgaaggatgaggaactgaagcacaatacacagcagggagtggtagagctggtttcctggatgcaagaagagagaatttagcctggtttttacactcccaccgtcctgagacttccaatcacaacgtaatatataaagaaaaaatgttggcatcaggatcttttttttcagaataacctcatgttttggaggagaggatggaaattatttattaaaataaaaaagattattagggtgttattttatttcttttctttttttgtttgtttttttagagatgcgacttgctctgttgtccagacttgagtgcagtagctcaatcatagctcactgcagccttgaattccgggctaccacacccagcttgttactgtatttttgaatgtctgaagtgaagaatgaatctaagtggggactgcttggctcggtcattcagttacatccacagcacagagaaactgaggattctttgttgatgaggtatggcaagggtaaccaccctcaaaatgtttttatctgacagaagaatgtacataaaagaaaaaaaggaaaagttaagctgtgttcctcttcatacaaccctctttgcaagtgggagcattataacttccctacctattagattctctcaaggaaattttgttcaagtctgttccttccaggttcccactaattgcggtgtcactgctaatttagtttactcaccaaagttaaaataagcaattgagaggcctgtaaaggtatggaagaggtggatgaggtaggtctccttgtagaaaaggtaatgccgataaaacaaagcaaaggggtaacctagatgggggaaaagataagaagagtgttatttgtgcctggtgccatcccagtttggtttggaagtttatctggcatgaaacgcagcccagagggagagagaaaaaaaaaacaacatacattatatggatggcaacagagaaggcaataacggtatccccaagaaccaaaagttttttgtaaatacaaattttgaactaaagatattaatatttgattgaggcaatataaagctgggtcctaagactaggtttcatttatagcttatgaactattgccagacattttctcttacttgaattttaaaaaatgatacaaggaagctaggcatggtggctcccatgtataatcccagcactctgggaggctgaggcaaggggattgcttgagccgaggagttcgacaccagcctgagcaacatagcgaaaccccgtctctattaaaaaacaagatacaaagatttgagcgtacccatctatgctccagaaacactcatttacactttgtgatctatcttgctagcactgtattatcagattatgaggaaaaatataaattaatatcaggctaaatactggaattgctgactgcatatatagcagttacaagttatgtggagatactcctcacagtctgtaatctgggcatcaaccaagttataaaatccatttaagtatactaaaaaaatgtcttctaaagccatgattcagagtatagtccaaaggccatgagtgaaccacagaggatcttctgatgggtcatgaactgattatacatggccaagggttgcttattgaattaaaaacggtcaataaaatttggtattcctaaactaaaattagcacattccatggctttactgcagactcaccttcagtgttctatctagaggtctggcggccatgcctggcaacatccccactgcactagtgcatatgtggaggatggggatctctcaactgctttttggaaagacattctgcctattctttcattgattattctcttgagttggtcatggtttatactttctgcaattcttgcttttatttttatttattttgagacagggtctcttgctctgtcacccaggctggagtgcagtggcacgatcatcgctcactgcagccttgacctcctgggctcaagtgatcctccaacttcagcctcttgagtagctgggaccacaggtgcttgccaccatgcctggctattttgtaatttttgtggacatgagttctcactatgttgcccaggctggccttgacctcctgggctcaaggaatcttcctgccttggcctcccaaagtgttgggattacaggcgtgagtcactgtgcctgatgaattgctgcgattcttgcttttaaattatgtaactgcagtttttatcatgggcaatacagtttactgtgagtttgcttaactctaaaacgcttagaatagtatcatacagaaataaattgctcaattatttgttaaataagtaaatgcacacaatcatgttatatgttggtttctgtccttctagtcatttttcccccatacattaaaaaaaaaaaaaaaaaaaaggctgggcgcggtggctcatgcctgtaatcccagcactatgggaggctgagacgggcggatcatgaggacaggagatcgagactatcctggctaacacggtgaaaccccgtctctactaaaaatacaaaaaaaaaaattagccgggtgtggtggcgggcgcctatagtcccagctactagggaggctgaggcaggagaatggcatgaacacgggaggcggagcttgcagtgagctgagatggcaccactgcactccagcctgggcgacagagcgagattccgtctcaaaaaaccaaaataaaacaaaacaaaaaactgtactggctggtgcagtggctcacgcctgtaaaccaaggcactttgggaggctgaggtgggtggatcacttgagatccggagtttgagaccatactggccaacatggtgaaaccccatctctaccaaaaatataaaaaattagctgggtgtggtggcgggtgcctgtaatcccagctactcgggaggctgaggcaggagaatcacttgaacctgggaggcagagtttgcagtgagctgagatcgtgccattgcactccagcttgggcaacagagcgagactctgtctcaaaacaaacaaacaaacaaatgccatttgatcttcctggtgccaggatcaactggtgtttttttttttttttgagatggagtttagctgtttttacccaggctggagagtgcaatggcacgatcttggcagctcactgcaacctccggcccctaggttcaagcgattctcctgcttcagcctcccaagtagctgggattacaggtgcccgccaccatgcccagtgaatttttgtatttttagtagagacggtatttcaccatgttggccaggctggtctcgaactcctgacctcaggtgatccacctgccttggcctcccaaagtgctaggattacaggcgtgagccaccacgcccggccaactggtgtttttttttttaattgctgttcccataataggctaggctcttaaatttatagcttcatgcaagtatagttgacccttgatcaacacaattttgaacagcaagggtccccttagacttccctctgcctctgccactgctgagatggcaaccctttctctttctcctcctccttgcctgctcaacctgaagatcatgaggaggaagacctttatgctgatccacttccactgaatgaagagtaaacatattttttcttgcttatgattctcttaataacattttcttttctatagtttactttatggtaagaaatacatatataacacaaatgacatacaaaatatatgttaatcaacttgtttatgctattggtaagtcttctattagtagttaagtttttggagagtcaaaagttatatgtggccgggtgtggtggctcatgcctgtaatctcagcactttgggaggctgaagcaggtggatcacgaggtcaggaaatcgagaccatcctggctaacatggtgaaattccgtctctactaaaatacaaaaaattagctgggcatggtggcacacacctgtagtcccagctactcaggaggctgaggcaggggaatcgcttgaacctgggaggcagaggttgcagtgagcagagattgcagtgagcagagagagccactgcactccagcctggtgacagagtgagactctgtctcaaaaaaaaaaaaaaaaaaaaaaaaagttacacctgtcggccgggtgcggcagctcacacctgtaatcccctactttgggaggcttaggcgggtgggtcgcctgagatcaggagtttgagacgagcctggccaacatggtgaaaccccatctctactaaaaatacaaaaattagttaggcgtggtgcaggcacctgtaatcccacctacttgggaagctgaggcaggagaattgcttgaacccaggaggcggaggtggcagtgagctgagatcacgccattgcactccagcttgggcaacgagcaagattctgtctcaaaaaaaaaagaaaaaaaagttttatgaggatttttgactgtacaaggggtgggatcccataggacctgcgctgttcaaggctcaactgtaattaattctacagatatcttatggattactggctcatgtattcattcaccaagtgtttagtaaatgcctgctatatgccaggtattctgtttatgaagcacgtaattgggtaggaggtggcatgtgatggttcgttttctagctggctgagatgatgggatataggatcactagctctagggaggtggagacatctatgaccctttcaggtagatcaatgagcaaggaaataggatcaagtctcatatatttcacatgggcagaaatttggcagagacagaacaccaggttagcagcaaatattgctaagaactagagccaggaactagaaagtatatagactaaatgtcaatgccttcaatcttttgctttatttttacttttgttttagtaacggggtataaataaaaaaatataaaacagtagataattatctagagcactcataaataagttctaggtagctaagtttctctctttaagcatgaaaacccttaaccatttggaatgctcgaaattaaaaaacaccacacatattactctgcctctttaagttgaatctaatttaacattttctaggtgtctggatcgtatctattccagagtaaagtcatgatggctttatgacgttctgaggtatgtgaaattgtctgcctgactctaacaaggcctacactgtcctgagttctgagttcttgtgtccacttcttatagcctgtctgtccctttccttgctactctgggatcaacagtcacctcttgaacttttggggtgcttggcaatagttcctctccctactcctaatttacggcaggccttagaaaccataaccttattttaaaggtgtaaaaaaaaaaagatttaagacaaaagcaaggggcttgggtgctttccttatggacttaggcctggtaacatctgttctggccacttagaggccttgtgtgctatttcttgttttcaggtgcgttttgcaggaggggacgttgttgagttccaaacaggtgaggtattgcacactagcaaacacatgagaagaaggcggaggaattgggagaaaaataaaaagaatgcagcaggccaggttagcaggaacgttaagacggtgacggagaacagcaaagcctggaagcaagccgccgtggagaaggaagaactgtgctgaggtgagttgctgtgacaacccaggctgattttgagtatgtaaacaccaaaccttgttcttggctgccgctcagctcagcgggctttggagcctggctgcccagccaccacttcagggatgtgctgtttttagggagggtgtgaccctacaagatgtttctgagccttaatgcttttttgtgggagccaatgcttaatatggtggctagagttacctgaagaatctataaaaaatgaccgaagccccttctgctcaccctcccactcatcagagttggcttccgtgggtctgagtgggaaggacttccacttttaacagcatgagacacggttctgacagccccactaacatccgaatgcaggccgcagtgctcagtcctgaggataaaattctcagcttggagattggggttgatgccttacctttattagcaccagatgggtttgtaacaacccagaggtttgtaagaacttgttggccgggcgccgtggctcacgcctgtaatcccagcactttgggaggccgaggcaggcggatcacctgaggtcaggagtttgagactagcctcaacatggagaaaccctgtctctactaaaaaaaatacaaaattagctgggcgtggtagtgcatgcctgtaatcccagctactcgggaggctgaggcagaattgcttgaacctgggaggtggaggttgtggtgagccgagatcacgccattgcactccagcctggcaacaagagcgaaactccatctcaaaaaaaaaaaaagaacttgtttggcagcactgtaactgttccttctttttgattgtttgtttaaagcagggacttcagaaatttattagcaggcgaaggatgatgacctttagtacactccaaacctgaggatcttctactagaatgggacctttataatccctaatgctagggacattcaaaatgcgtgttttttttttttttttttgagacagagtctctgtcgcccaggctggagtgcagtggtgcaatctcggctcactgcaagctccgcctcccgggttcacgccattctcctgcctcagcctctccgagtagctgggactacaggcgcccgccatcacgcccagctaattttttgtatttttagtagagacagggtttcaccgtggtctcgatctcctgacctcgtgatccgcccgcctcggcctcccaaagtgctgggattacaagcgtgagtcaccgtgcccggccaatgctgtggtctttcaagcagctgctgggatacatttaatttgtacaagccctcttcaggggttgtagtcaagcacagggagtggatagaactgtattattcagtctctggacttcactcagttccaagtgctgtttgtgtcagggaccagatctatcacaacgtgcattgttagcgggaacgttttcttatttcctgtacaatagttgtgagattacttattaatcctaaagttgtgaggtttcatctgaagaaacagaaatggactgtttccattaagtctggtaaatttggctgggagtggtggctcacacctgtaatcccagtgctttgggaggctgagacgggagaatcactggaacccaggagtttgagaccagcctgggcaacatagcaagactctgtctctacaaaaaataaaaaaaatagttgggtggggtgggtggtgcgtgcctgtagtcccagctacttgagaggctgaggcaggaggatcacctgagtctggggagacagaagctacaatgagctacgatgatgccactgcactccagcctgggcaacaaagttgttttttttgagaccctgtctcaaaaataaataaataaataaataaaaataaaaaaaatataagcggggcacggtggctcatgcctgtaatcccagcacttcgggaggctgaggcgggcggatcacgaggtcaggagatcgagaccatcctggttaacatggtgaaaccctgtctctactaaaaatacaaaaaattagccgggtgtggtggcgggcacctgtagccccagctactcgggaggctgaggcaggagaatggtgtgaacctgggaggcagagcttgcagtgagccgagattgtgccactgcactccagcctgggcgacacagtgagactccgcctcaaaaagaaaattaaaataaaataaataaataaataaataaataaataaataaataaattgagcaccccaaacaacttttgttaatgtgggaactatatatcaatgtctactgtgttagaaaataagactaaaaactgggtgtggtggctcactcctgtaatcccaatgctttgggaggccgaggtgggtggatcacttgaggtcaggagtttgagaccatcctggccaacatggtgaaaccctactaaaaatacaaaaaccagccagacatggtggcaggcgcctgtgatcccagctacttgggaggctgaggcaggagaatcgcttgaacccaggaggtgggggttgtagtgagctgagatcacgccactgtgctccagactaggcaacagagcgagactccaaatcaaaaaaaaaaaaaaaaggaagaaaataaaactaaaaaaaaagtaaaagatatgattaattcagtaaaaatattaacagtaaaactactacacattatattaatataaataacatactttaaatgtaaaccactatatttcccaaaacaatcaaagaaataaagccatctaatgagaagaatgccactgttttacattttcataaatttatggcctctgtctgacttaatagaagatgactggattctcaaatctgcttctgcatttaatctgttgtaatatgttagtttggttaaaatatacaaagaaaatctggctttacacagacagagaaagtatctgcattttcagataattttggatattctttagcgctacatcaaaacttgacaagtagtagtttcttaacagttaggaacttttgttataataaaacccattggcttctcttgcactttgaatggatattttaccatgcatgactttgtaacatcacacatagatcactgcaaaatactggttccctgttgttaggcagatcttctaaatactgacatatttcattagaatacatatcaaaaaatcatattccttaaatttcaccattgatttcagcagaaaagtctgtatatattgaaaagtggtcaagctcatgggagtggatacaagttttccaaaattctaatttttacttgaaagtgtaaattttatcactggctacaaatattgtcatttgtttaccttgaagtgacaggctcacttcatacagtttcaagagactgtctgccagatgcctaagtctaaaaccatagtttgtctatcattctttcaagtaaaaatggtggtcggtgaaaaaagaagctgctaaatcaatatgcaacttgaataatcgcccaaatgcttttccttgtgacaaccaccgtactctaccagtgtgcagcagaggcggtttatgcatatttcccatttcttcaaacaagtttaaaaagatgtactcaggatcaggcatggtggcccacacctcccagcactctgggaggccaagacgggtagatcactttaggtcaggagttccagaccagcctggccaacatggcgaaaccccgtctctactaaaaatacaaaaattagctgggtgtggtggtgcataccagttaaaaaaaaaagatttattcaaggactgacatttgatacaattaacaatatttagcctgggcgacagagtgaaaccccatctctaaaaacaaaacaaaacaaaacaaaaacaaaaattagccaggtgtggtggtgcacacctgtagcctcagctactcaggaggctgaggtagcatcacctgagcccaggaagttgaggcggcagtgagctgtgatgcccccaccgcactctagcctgggtaagaccctgcctcaaaaaaaaaaaacaaaaaaaatttaccacttcatcaacgattcttaagtgaaactggctctgttttgattgtgagtgcatggcagtaaagaatgcagtgaccactggtacagtttggtgtcaccgtcctgatttgtgctaaggcgccagcagttttaccaccattttgcaacatcagtgcaagtgtcaacatagggaaaagacaaatacatcttagtagtatcatgaaaataatttttaccccaaagagattccttaaagaagtctcaggaacttttaggagtagtctatggactgcatgctgatatggaatgatttgttttaatctttcatcttctaatacccaaatccactagtctttcctttctccctggtttccttgactgccctgctgtgttttcaatctttttgaaacttctctttcactggtttcattggttttgaatacagttatctcttggtgtccatgaaggattggttctagtactcgcagcagacaccacagatgctcaagtcccttatataatatggtgtagtattgcatgtaacctatgcacatcttcacatacactttaaatcatctctggattactcataatacctaatataatgtaaatgcaatgcaaatagctgctatatagcatattgttttttatttatatttttattattgtattattatttagcttagaatccatgaatgtggaacccacaaatatggagggctgactatacacagtttcctggatttttttctactgagatataatttaccataaaattcacccttcaaagtgtaaaatgtaatgttttttagtatattcaaaaggttgtcgccgggcatggtggcttatgcctgtaatcccagcactttgggagccggaggagggcagatcacgaggtcaggagatcaagaccatcctggccaacatggtgaaaccctgtctctactaacaaaaaattagctgggcgtggtggtgcctgcctgtagtcccagctactcaggaggctgagggaggagaattgcttgaacccaggaggcagagattgcagtgagctgagattgcgccactgcactccagcctggcaacagagcgagactccatctcaaaaagaaaaaaaaaaaaggttgtgcagccatccccactatctatctaatttcagaatatcttcatcacctcaagtagaaaccccatacatgttggcagtcatttcccattctctcttaactcccagagcctggcaaccattcatctactttatgtctctatagattggcctattctaggtgtttcatataaatggcgtcaggcaatgtgtagacctttgtgtctggcttatttcacttagcatgttttcaaggttcatccatgttgtagcatgtatcagtacttcattcctgtttatggctgaataatatcccgttgtatggatactctgcattcttttttttaacatttaaaaattttttatagacaaggtctcactatgttgctcaggctggtcttgaattcctgagctcaaatgatctgtccacctcagcttcccaaagtgctaggattgcaggcatgagccactacgcccagcctggatactctgcatataatctacccattcatcagctgacaaacaactgggttgtttccactttaggaacattatgaagaatgctgctacaaacattcatgcattttgtagagacagggtctcactatgttgcctaggccggtcttgaactcctggcctcaaatgatcctcctgctttggcctcccagagtgctgcaattacaggtatgagcccatgtacaagtttttgtgtgaacatatgtttttatgttttcaattctcttgggtatatacctaggaatggatctcctggatctttttcttttttttccctttgggacagagtctctctgtgttgtccaggctgaagtgcagtggcatgatcttggctcacggcaacctccgcttcccaggttcaagtgattctcctgtctcagcctcccgagtagctgggattacaggtgtgcaccaccatgcccagctaatttttgtattttcagtagagatggggtttctccatgttggccaggctagtctcgaactcctgacctcaagtgatcgacctgccttggcgtcccaaagtgctgggattacaggcgtgagccaccgggctgttgcccacgctggagtgcagtggcatgctcacagctcactgcagcctcaactttctaggttcaagtgatcctcccacctgagcctccctagcagctgggactacaggtgtgcacaggaccggctaatttcttgtagagttggagtttcaccatgttgctcaggctggtctcgaactcctgagctcaagcaatctgcccgccttggcctcccaaagtgttgggattacaggcatcagccactgtgcttggccaatgttcactcttactttctgtgcttacttctggcatgggttggctgactacaatttgaatagacccatctttccgtttctttcaccgaaggcattttttctggctcctagatgttgctgacccccaggatccagtcttggccctccactattcttgctacactgcttctttggaaactcatctactctcaagtaacttaatataatctttatgccaaagacagatccacatctttagttctaacttctttttcagttccacatttcctacttccttgctggacagttttaatttgatatttcattaccatctcaaactctgtataactaaggcataaatttctccctaaatcagccttctctgggctttttttttttttttaaattaacagtgttaccattctccaggtcacacaacattcaaaagtgtgttttcctgccagggcatggtggctccacgtctgtaatcccagcactttgggaggccaaggcaggcggatcaccaggtcaagagttcaagaccagcctgaccaacatggtgaaaccccatctctactaaaaatacaaaaattagccgggcgtggtggtgcatgcctgtaatcccagctactcaggaggctgaggcaggagaatcgcttgaacccaggaggcggaggttgcagtgagctgagatcgtctcactgtactccagcctgggcaacagagccagactccgtctcaaaaaaaaaaaaaaagtgttttccttcttcatattggttctctgttatctagtcatgaaatcctgttgattcctcctttccagtctctctcaccatcactgtcaccatgaccatcaccactccctttttcctctgctgatttgcagttaaaacccttatggatctcacccttaaatccttgcaatggcctcctacctgatctctgcctgcaccacgtcttcccagcagtcctataccggggtaatcttccttcagctcctgctcagaaaccatcaatagctcccagctgactactcaacagagtcagcaatcctgtctgttctaccttcaaaataaatccaaaatctgaccacttctctccgcctctactgcttcccctggtctgagttgccactatctctggattattattattaatatatcattattatattcaatgtattatcattatatacttgcctcctgactgatctcaccctgcctttgcctcccttcagtctagccttaatgaagcatctagagggttctattcaacttaagtcagcaggtcactcctctgctcaaagccctctcaaggcctctattctcactcagatcaaaaggctgattgccagcacccgcaggttctgtccctctgcccgggccccactgtcctctgactcatctctcaatctggcctctacccttctgctccagccccaaagctttcccttcctggaatgttaagcaggtccagccttggtgccttcacatggtaagttccttgcctggaaggctctttgcacagataagctcaaatccttcctacacctcaggtcctttgtaaaatgtcaccataagtatcagtgaggacttccctatcttatctagaagtgtatacaacactacccctccccaccctgtaaccctcccccatcacacacttcttgttcttctttcctgctttttctatttttcttctcagtacttattaccttttgacataccatatatcttacttttcagtctttcaaagcagggattatcatctactttagtccctaccgtaccccagtgcatagtacagttcctggtacacaaaatttctcaaaaagtattagctgaatggccgaacaatgagtgaacaagtgctctgtactctaggcagtcaatacaatatttattaagcactcactatgtggttagcattgcattaggcattgggggaatatggtagaattttaagaggtgctttctattcttaaggagcaaaatcaaacaatgatgttctatgctaagggctaactgtatggaatagccaatgttgtagaggttaaagagaaatcaatctcgaccacagtggtcgggagaagtagttcttgaacagagaagagatgacggcattccaagggaggataatgtagtaaagacacagcggtaggaaggagcatggggcattcactccaagagactgggctaatttcaagggaggaaaaatattgtaacaaaatggatgggaaagtgaaaaaccaggcagagtctgaaattgataaatgggaaaaaaaaaatcaattgactaggtgtaggagaaggaaaaggacaaattaaagatgtttatgccactgatataatggtcttcaggtcttcaaacctttttgctggcatagctcctagaagaattttgaaaaactgtatatcctcctttcacattttaaagttgccatctaaaccttatgtttttatttctttatttttttattttcttgagacagtacttcactctgttgcccaggctggagtgcagcggcacaatcacagctcactgcagtttcaacttcctgggttcaagtgatcctcctgcctgagcctcccaagtagctaggactataggtatgtgccgccatgcccccaaaacaacagcaaattatgtgtgtgtgtgtgtgtgtgtgtgtgtgtgtgtgtgtgtgtgtgtgtgtttcaagacacagtctcactctgttgcccaggctggagtgcagtggtgcaatcttggcttactgcaacctctgcctcccaggttcaagcgattctcctgcctcagcctcccaggtagatgggattacaactgtgtgtcaccatgcatggctgattttcttttctttttttttttttgagatggagtttcgctcttgttgcccaggctggagtgcaatggcgtgatctcggctcaccgtaacctctgcctcctgggttcaagtgattctcctgcctcagcctcccaagtagctgggattacaggcaggcgccaccacacggggctaattttgtatttttagtagagacaggatttcaccatgttggtcaggctggtctcgaactcctgacctcaggtgatcctcctgccttagcttcccaaagtgctgggattacaggcgagagccactgcacctggccgcatggctgatttttgtatttttagtagagtagggtttcaccatgttggccaggctggtcttaaactcctgacctcaagtgatctgcctgcctcagcctcctaaagtgctgggcataagccaccatccctagtcagtgtgtgtgttttgaggcagggtcttgctctgtcgcaaaggctggagtgcaatggcacagtcatggctcactgcagccttgatctcctgggctcaagtgatcttccgacctcagacccctgagtagctgagaccacaggaatgtactaccacattcagataattttaaaattttttgtagagatggcatcttgctatattgcccaggctggtcttgaactgctgggctcaagcaatcctcctgcctcagcctcacaaagtattggcattacaggtgtgagctactatgtttggccgtgtgtgtgctttctaatgcctattgaaggtgtgttttaagtgcttatggcagatgtctgccatgcaatctaaatggcaaaccaatcagctggatcagtcttacttacaacacacctggcctgtccctcaacttttctattctttcaccaaaatggaagttccttatgttagagaacttacagagaaaaggaagacaaaggaaaataggaaggagagttaagctctgcctgacactgtctacttaagtgatgggtaactgattaggttcagtgcttagaacttcatataatgagatacaaaatctcattactgacccactctgccagctagaagagcacttgtagatcatggacatttaggtggggatatagccacctttgatcctttctgttcactagattaagccttgttgctagtacaggcaggagccaacataccttccacactccagcaatcctgtacaccttgggctgagtcatatgctgaacagttattcatgaatacagattcttacttagaactgaagaattacctgctccaaacccttcattaggtagataagagactaaggtccaaaggggataactggcatgcccaaggttaacagagcagagctcaaattagaatccacatcacctgatttccattctactattcttgccacatgccttggcacttggcagtgacctgggagtgaatcactaataaccagctgtgtgctcttttaaagctacagctctattattctttgatgtccagataacaatctatgctccagcacctgtttatagacataagcacacccatttttatgtttgcttatcctcctattgaaaaatattttaaaagttcattttaatgctaaatttaggtgtactttctttgttaatctaattcttgagcactctgcacccttcagcagttcatttctgaaagttacctccacctaaatagctcaagcattgtgacagctgtgatacaggactcatggaaactgggacaagtgatcaaaaatgtctgagggaggaacaatagaggggacattttaaaggtaagctattggatagttgttacctgtgagaaagaaagaaaaagggttaggttaagaaatgttagttttttactctctcaacccagccaaacaacctaaacttgaactgtcccaaaggcctaccaaaattctttaatttcttcacttaagctgagtgctcttaataagcaagacttctgaggtgtagtgctagtgattaatgttatacacacccgttggctgactggtgaaacctgctgcaataactaaaaattattctataaaaatgtatagacagagagaatgttaaagctaaaagaggccgttgactcatttctttgttttagtagaacaggtgcaacagattgaggcactttaagacatctaaatggctttactagcaaagataaaaatcacacttgcctgtactcagggaattttatcacattctaattctttgtaaatcagtgaatcccctggtgcaacttctagccagattatctgggctttggaatcagaattatctagtttaaaatttagctctgcagcttgggcaaattacttacattctttttttttttttttttttttgagacagagtctcgctctgttcctcaggctggagtgcagtagtgcagtcttggctcactgaaacctctgcctctcaggttcaagcaattctcctgcctcagcctcccaagtagctgggactacaggcgtgtgccaccatgcctggctaatttttgtatttttagtagagatggggtttcaccatgttggtcaggctggtcttgaactcctgacctctggtgatccgcccgcctcagactcccaaagtgctgggattataggcgtgannnnnnnnnnnnnnnnnnnnnnnnnnnnnnnnnnnnnnnnnnnnnnnnnnnnnnnnnnnnnnnnnnnnnnnnnnnnnnnnnnnnnnnnnnnnnnnnnnnnnnnnnnnnnnnnnnnnnnnnnnnnnnnnnnnnnnnnnnnnnnnnnnnnnnnnnnnnnnnnnnnnnnnnnnnnnnnnnnnnnnnnnnnnnnnnnnnnnnnnnnnnnnnnnnnnnnnnnnnnnnnnnnnnnnnnnnnnnnnnnnnnnnnnnnnnnnnnnnnnnnnnnnnnnnnnnnnnnnnnnnnnnnnnnnnnnnnnnnnnnnnnnnnnnnnnnnnnnnnnnnnnnnnnnnnnnnnnnnnnnnnnnnnnnnnnnnnnnnnnnnnnnnnnnnnnnnnnnnnnnnnnnnnnnnnnnnnnnnnnnnnnnnnnnnnnnnnnnnnnnnnnnnnnnnnnnnnnnnnnnnnnnnnnnnnnnnnnnnnnnnnnnnnnnnnnnnnnnnnnnnnnnnnnnnnnnnnnnnnnnnnnnnnnnnnnnnnnnnnnnnnnnnnnnnnnnnnnnnnnnnnnnnnnnnnnnnnnnnnnnnnnnnnnnnnnnnnnnnnnnnnnnnnnnnnnnnnnnnnnnnnnnnnnnnnnnnnnnnnnnnnnnnnnnnnnnnnnnnnnnnnnnnnnnnnnnnnnnnnnnnnnnnnnnnnnnnnnnnnnnnnnnnnnnnnnnnnnnnnnnnnnnnnnnnnnnnnnnnnnnnnnnnnnnnnnnnnnnnnnnnnnnnnnnnnnnnnnnnnnnnnnnnnnnnnnnnnnnnnnnnnnnnnnnnnnnnnnnnnnnnnnnnnnnnnnnnnnnnnnnnnnnnnnnnnnnnnnnnnnnnnnnnnnnnnnnnnnnnnnnnnnnnnnnnnnnnnnnnnnnnnnnnnnnnnnnnnnnnnnnnnnnnnnnnnnnnnnnnnnnnnnnnnnnnnnnnnnnnnnnnnnnnnnnnnnnnnnnnnnnnnnnnnnnnnnnnnnnnnnnnnnnnnnnnnnnnnnnnnnnnnnnnnnnnnnnnnnnnnnnnnnnnnnnnnnnnnnnnnnnnnnnnnnnnnnnnnnnnnnnnnnnnnnnnnnnnnnnnnnnnnnnnnnnnnnnnnnnnnnnnnnnnnnnnnnnnnnnnnnnnnnnnnnnnnnnnnnnnnnnnnnnnnnnnnnnnnnnnnnnnnnnnnnnnnnnnnnnnnnnnnnnnnnnnnnnnnnnnnnnnnnnnnnnnnnnnnnnnnnnnnnnnnnnnnnnnnnnnnnnnnnnnnnnnnnnnnnnnnnnnnnnnnnnnnnnnnnnnnnnnnnnnnnnnnnnnnnnnnnnnnnnnnnnnnnnnnnnnnnnnnnnnnnnnnnnnnnnnnnnnnnnnnnnnnnnnnnnnnnnnnnnnnnnnnnnnnnnnnnnnnnnnnnnnnnnnnnnnnnnnnnnnnnnnnnnnnnnnnnnnnnnnnnnnnnnnnnnnnnnnnnnnnnnnnnnnnnnnnnnnnnnnnnnnnnnnnnnnnnnnnnnnnnnnnnnnnnnnnnnnnnnnnnnnnnnnnnnnnnnnnnncaaaaaaaaaaaaaaaaaaagcgaaaatatttgcaaaagtagcatacatgtacttccttcaggccacttaaaatacttatgcatgtctaaatattttatataagcatacctacacctaacttcttaaaaattgagtattctttttttgagacggctgtcgcccaggctagagtgcagtggcgcgatctcggctcactgcaagctccgcctcccgggttcacgccattctcctgcctcagcctcctgggtagctgggactacaggtgcccgccaccacgcctggctaattttttgtatttttagtggagacggggtttcaccgtgttagccaggatagtctcgatctcctgacctcgtgatctgcccgcctcagcctcccaaagtgctgggattataggtgtgagccactgcgcccggccgaaaattgagtattcttttaatggattttaagatataaaatctcaggctcagaaatttgagccacctaggggtgagaaattttggcctttgcccgcttcgaactgacttaactaaattaaatctatagaaagtaaaaaataaaggtctgtgaatgtacccagtactctcaggaagaagcatatttgccatgaagctaaaaaagcttcagtttcactccccttccaaggctctggggggtggggtgggggcgggagctagcaacgtgctcacatggtcatatatttttgtaaaacttatagaagatatttttgtattctttttcttaaagaagatatccaagattgtataagcttcagatcccagaaatcctagatttaaaaaaaataatcaaccaccaccccaacaaaattaggcacatgcctgaaaattctgctgctactgccagaattctgcgggtaggggcttcatccaaggtgttcctaataataggcagagtccccagattagttccggtgaggcttttgggaggggttatttggcgcggtgttggtgttggtaggatcctggctgtgaggctgaggcaggcctgaggagggctggggctgacaggtaggcagagttggctgggatgtgaggtgcaaggggtggtacttcggaaacaaactttgaagaggagaaggggcagcaagactgtgagtctggactttgtgatacactgtcacccctagtttagtgtgcctggttagggagaatcaagcagcatggaacccctcttcctttttcactaacatttttctgtatagtggttgaaacccagtgttaagagactgcatgacattggaaaagaaggggaggagaaaaagagtccatatga

SEQ ID NO: 2646 - DNA, 1723 bp, Homo sapiens
  SITE (4): n equals a,t,g, or c
  SITE (5): n equals a,t,g, or c
tttnnttttttttttttttttttttttttttttttttgagacagagtctcgctctgtcagccaggctggtgtgcagtggcacgatcttcggctcactgcaagctctgcctcccgggttcacgccattctcctgcctcagcctcccgagtagctgggactacaggcgcctgccaccacacctggctaatttttttgtatttttagtagagacggggtttcaccatgttagccaggatggtctcgatctcctgacctcgtgatctgccagcctcggcctcccaaagttctgggattacaggcatgagccacagcgcccggccaaaatccgcacatcttaaaggtaaggcttgattacattttacatatgggtacatataaatgtgtgtatgtgtataaacatatgtatgtacatatatatctgtttatatacaaattatatatgtgtaggtacacctgtgtgtgtatacatgtagatatatagataaccatatctatgtaacaaccacccagatcaagatatgaaacatttctaaagagtggtccctggctacactttctgctaaaaaatacctatcctttccctaagctgaattattattttgactttttcttaactatagattagttttgcttgtttttgaacttcatataaagggagtcgtacagtatgtacatttctgtgtctaacttctattgctcaacattcatgggatgtatccatgttgtgggtattagtagttcttcctttttatcgctgagtactatttcattgtatgaatatacacagtttcttcatgcattcttctgttgatggacacttagattgtttccatttaggctattatgaataaggctactgtgaacaccccgaacaagtctttttatagacataatcattcatttctcttgggtaaattccccacagtggcaatgctgggtcatccagtgtgtctgtgtctcatttcattgaacgttggcagttctttcaaatatacattgagatttctctaattctctcttcccatctttctcctctgccaccactctaaaccactcttctgcttctgttaccagacctgtttcctgacttgcgttttcctctccacaggacaagaagaggtatttacgcctcctggagattcacaaaataatgcggacgctaccgactgccagatctttacactcacccctccacctgccccgaggagtccggtcacaagggcccagcccatcacaaagacacccaggtgtcccttccatttttttccacgaaggcccagaatccattttaggtttccaaacagacctttcgtcccttcaaggtgtaaccaccgttttccattccagccattttattggccacaccgttaccttacttataggtatttccccagaagaagactccagagaggaagctcatctgaggaaagctgagagggaagagaaacccaaacatactgaagcaaaaaaaagcctatccttcagaaaaaagcaacaaaaagatttctgttttatctttcgaaactaaaactattggatttgaagattaagtatcctaaacatcactgactagaaactgttctctttgtcagcagtgaagatattggatcataggttattgatggttgcaaaattggacaataaccacgttatttttatcctcaacctcttatggtcacaggatatttatgcaaataaaatctttaaatgggtggctctagta

SEQ ID NO: 2647 - DNA, 5775 bp, Homo sapiens
gccacgcgatccactgggcttctgggcacagaagtgcctcaacaggcacaggcaggctccccacagccacaaggaaccctgctgccaaggaagcagctcctgttggggtcatcagatttttaatctggctcagcaaagccatggctgtccagccttaaaaaaatgggtgatgtgggagaaatggagggtgtgtgaagagcacagctgggcctcgagaactcagggccagccttcccagcttgggtcctgtttcggagcccaggccttgcttccccttagccgccccagccagattcttttgcgccccctgctggcacacacaaagacagacccaggagcgcacatgtgaacgtgcgcatgcttgctgccagttacccagttcatgaacacgtgaagccttgacttcaggttaagtaataaaaatttattgagaattcctgggttggtgtttatctcctcccagccttgagggagggaacaacactgtaggaaatcactgagaaatcacgcactgtccccaacagccccagttaacacagggaggaggaaagtaattccccagaaaaggggctagtcttcagtcttccttaatccaagaggggttcagggaaccggtgtgggggaccatcgcatgatactggggcggggtagggctgtgctggacccctggctggctcctcaaaaactggagaagcagatccacttcctctgggggtggagttcttggtgactaggctcatttcttacccttgatgaggctgtcactgtaggaaaaaaaagatagataatgacattattaggggacataaatgtgagaggcaggacactctaggccattccctctacgaccctcctaccctgattgagggtttgtcttcggggaggtgggaaagggggtagggtaggaggcgggtactggagaaggtggcctgcaggaccccacagaagcaacaacagcttaccttcccctgtggtgccagatcgccagatgaacaagaaacagagaagagaaatgcacatgttaattgacagcttcaggccccactcagctttgaaccctcctttgctcccaagagaaaagataaacagggttgacagccaggaatctcaggctcatgaaaggaggaggcatgttctcatggccactgctatttctcatctcctttcctaacatccctccattcaccagaggagtttgagggctcttgagtaagaaaactgagtatcatctttcatcactttttggttagatgaaaactttataattaaagtgctttttatgtgaataatcctatttgatctcataaaatcaatcctatgagatgcaagatagaaactgtcaaccacccccttttctaattttggttcaatgtctctgagccatatgaatagctgtagcaggctccagagcccaaacaaccagactcaggtcccacgttcttggtgataccccacagtgtggccacatctctcacctggtgaaactttcatcctgtaggttcagcacaaggttgtcagctgtgagatagatacgattctgtgatgtggcgatctacagggcaggaaataagacagatgcttgcattaagcaaagacctcaattccgacccctgcaattcagcagctacttaacatggaacacatgcagattagggcaggggtgcagcaatgagtaacacatggtttctgctcgcacttagggatccagagcgctgagcagcagctatgattagaacaaaaggtcagggaacccagaggaatcattcttgacaggaggagtatcggagaagccaattttttatttatttatttttgagacggagtcttgctctgttgctcaggctggagtgcagtggcatgatctcagctcactgcaacttccgcctcctgggttcaagtgattctcctgcctcagcctcctgcgtagctgggaatatagctaaacgccaccacagcgggctcattatcttttgtatttttagtagagatggggtttcaccatgttggccaggctggtctcgaactcctgacctcaggtgatccacccaccttggcctcccaaagtgcggggattacatgcgtgagccaccgcgccggccagagaagccaatctgagtagaaaccggaacaagcaaggttcgaattccctcacctcaatgtgccttaactgaaagcactttctcaaggcagccccatcagagacgctgggctgacacactcaccgtcttggagatattctgggctgctcgaatcttgcgaagtttgatgtagccagggttcttgctcagtgcttctccaaggtgaggagggttaaggtacacgcaagggcaggtctcaatccctggccctgtccttaccacactcccttgctccagtcctcctctgggctgtcagatccaaggttgcgctcaggtggcttgtgcccagccctaccgtggaccccacctgtgggcctccctgcaggctgctgccaggaactaggggcagcaccagaaatgaaggcaaggccaccaatgctattgatctggccttacagtggggagtcatggctcaggtactaccactaagatttcagatctcatctgtagtccccacccccaacaaggagccaagggccagagagcacggagtcgcattcgccttagtctcatcagcctgcccatgaaggagaatggggaactcaggtgccctaggggctgggctgagatctctccagcagaaggatatcatcttggcagcctcggcctcaccctcggcctgcacaattttctgccgctgttcctgctttgctttttctaccaagaattgggcccgctgggcctcctgctgggctgtggtgggagagagtcagggagaccctgtcctgggtcaggagccccacccatggagtctttcctcctcctgcatctcagaagccctcaccccacggctcttgcgactcacccacttgtttggcttctacagcagctgtgtactctcggctaaagctcagctctgtgatggccacatcatccaggatgaggctgaagtccttggccctctctgtcagctcccggcggatcaacagggatacctgagggcaggggtgaagaggggaagggaggggtggtttgaggggactggggagctgaaaggaaggttgcgacccctaacccttcactctcaatacaacatgcactgccttagcttcctgtcaggcaaacctgtaacataagcctctctgctcgaagaggtgcaggaaaagccaagacttggccattttcctctgtgcttcctaacaccgagtgctatcgagttctaatgctggctctccttatttcacagtggcaattagcacagcttttaggtggaaatggcactagggtgacaatgcttttctaataagctgcctttcctaattcccaatactctgggcctaggaaggaaaggctgacaccacgcagatggtggtgggagtcagacctgggcccgctgggtgatcagctgtgaggcattgaacttggccaccacactcttgagcacctcgttgacaatggacggcaacactcgttcctcgtagtccagccctaggcgctggtacatgctaggaagctcctgagcattgggtcgagacaacactcgcagggagatattcaccatctgtaggtctgagattgaggtcagcagtggctggtcaaggccaaacaccctttcccaagcattttctccttcatgttcctccctgtatgccctgtgcaatggtgtacagcctggcactaccctggggggaggagagttaatcaggctgacaaggaagacaagacgcagcacagctgaaatgcaccctcacccactgtgaagccttgaactgcaaaccccgtcaccagcagagctgactactctttccccctctgtactctgtgcaacctctaacgtgggcgctttcgtgctgtaccgtaatcatgtctcctgtaaggacttgggggacaagaattgtgtttaatgaatcttttattcccagggcccagtctagtaaatgaataagcgacctgcactaggtatagcacaaagaagtacattacaggttacaggtgagctacctgacccagggtgtatatgtgtgcgtgggtggggaggaggaagaggtctggggaactcaaaggcacggcttttatgtatggtctagaaggagagaacaggtgaactagtcaagcttagggacaaacttctccagaacagagtgtactagtggatgtaactgtagatatagtaagtcaagcagttagaaaaaaaaggctttaaaacaaagctttgatctaggcagtgaacaagacgagggacaaacaatactcttattgaatacacgtcagggaggagacagtaaaaagcacgcaaacacagtgtgttcagaatttgctgctttgaccccaggaggcaggtatttttgttacagctcttgcagatgtggaaagaggcctaaaggcctgacactaccatattcccctggggtttcttgccagctaccttgatcatcccacctgccatgtgattaccaagtgctcagacctacctttggagcctgtaggggaggagatttttcgaggtctggcccgaatgtcatagataatggggtactggaaccaagggatcctggagaggacagggataggtattaagaggccacagtttcggccgggcgcggtggctcacgcctgtaatcccagcactttgggaggccgaggcgggcggatcatttgaggtcaggagttcgagaccagcttgatctacatagtgaaaccccgtctctactaaaatacaaaaattagccgggcgtggtggcgggcgcctgtaatcccagctactcgtgaggctgaggcaggagaatcgcttgaaatcaggaggcggaggttgcagtgagccgagatcgcgccactgcactccagcctgggcgacagagcaagactccctctccaaaaaaaaaaaaagaaaaggccgcagtttcactagccttgcccggtttcccctcaccacgcgttttttggcctgctcctctccacgaccacagacaaggagagattctcttgtccctctggaaaacaacagtttgtatgctgctggaggttctcgcagcacccactatcctaggggcagggatgaggagggtgggaaaagagcagcgttgaatcctgttgcacgtccgactatagccactgctgggtcggcgtcaagggtgaaaggtcagggtcagcaggctctgcccgccattacctgaagtgaaggccctcggccaggatagtgtcctgctgcactccaccgatccgattgaagaagatggctctgtgcccgccttccactgtggggagatgggtggtgatcaggccaggccgctgctcagaggaaatgctaggcccgtggaggggcgcggggacagggcaaggggtttgggggagggactggaagcgtccggcgagcaggcggaggttgctcaccggtgaacacagattcgcgcacaccgtaggccacggcgccggcccccagcaacagcttcagggccgtgcccatgccccggggcccggcgggcagccgtcccgccaagtccttcaagttctgggccatgtctgatcttgaggccggcggcactggaggtcagaagggggtgccggcccgcctctaccccgctccggcttaggtactgcacccttcacacgagggttcgggcccgtaaggctggcgaaagaaagggcagcggaagtgcgctccctttgaaaccctcccccttagcccactacggacccg

SEQ ID NO: 2648 - DNA, 738 bp, Homo sapiens
ccaaataccattattgattgattgattgactgactgagacaaggcctcactcctgttgcccaggctggtgcagtgatgtgatcatggctcactgcagccttgacttctggggctctggtgcatcctctcacttcagtcccctgagtagctgggactacagacacatgctaccatgcccagctaatgcaaatatcatttttaaaaggcgactgaactggacgcctcatatgagctcccatggctgcccagacatgctttcatgtcagtgattatataattttttttgtaaattagcttatgcaaataatcttgtggaccctaacttatacatgcttctgcaaagaaacatgtttaacgataaagttatactggaattcaaaacatgatgttttatggaatgtaagacattggggtatagataaaaagtggttggaaaaaatatatatatttatttttagagatgaggtctccttctgtcatctaggttggaatgcagtggcatcatcatagttcactgcagtctcaaattcctgggctcaaatgatcctcccaccttggtctcctgaatagctgggactacaggtgcatgccatcatgcctggctaattaaaaacaaaatttatttatttatttttgagacagaatcttgctcttttgcccatgctggagtgtagaggtatgatcttggctcaatgcagcctcaacgtcctgagttgagcggaggaccccgggctccag

SEQ ID NO: 2649 - DNA, 460 bp, Homo sapiens
cagcatttaagccaggaagacagagaaatgttggtagaatactgaaggacatagctagttaggaaaatagaatcaattaggaaaaaggaagtgaatgcttagttttcttgtatgaaaccagaggcaggagtaggctatcccatctaaaaaagatgtcaggtggatcaggtttgatgtcttatgcctgtaatcctagcactttgggagaccgaggtgggtggatcacttgagtccagctgttcaacaccagcctgaggaacatggcaaaaccctgtctctacaaaaacaaaacaaaaccaaaacacacatgaaaaaacaattagctgggcgtggtggtatgggccagtaggcccaaccacttgggagactgaggtgtgaggatcacttgagcctgggaggagaagattgcagtgagccaagattgtaccactgcactccagcctggatgacacagcgagac

SEQ ID NO: 2650 - DNA, 460 bp, Homo sapiens; identical to SEQ ID NO: 2649

SEQ ID NO: 2651 - DNA, 11337 bp, Homo sapiens
gtctttggccacaattttcttattttcttgttccactccacctcgtagcagaaatatcacggattctgtaggcgcttcctggttctaggttgtggagctcctcagggcttggaagtgagtggaaagaaatgttcaacttctgtttctcttctctttccctctcctcctttcccctcctgtgggggaaacaaacgaacaaaaacaaaaattaatttaaaaaatgtaatttcttcaaagactttgcacgtgagcagtggcgtggccagtggtgatccttgtgtgcatggaatattgagggcgtgctcctgcctccagagaaagtggtcgagcaggacagctggcatccacggcttccacatccccagtgcctccatccttcatctttcaccagtactgacaggaacactgctgtgtcggatctgaactgggccccaaaaacctctaggtagcaggcaggtactactccattggaggtgacatccctctggtgacgctgaaaacctggattgtgttttctaactctgtctatctgcttcacacctccagatgtgaatcttcagaatattatttgctgggctatgggatggagactagtctcacaagcctaaaggacttcctttaatatttcacgaaagcattacatttatttttttctttcttttttgggacggagtatcgctctgttgccaggctggagtgcagtggcgcgatctcagctcactgcaacctctgactcccgggttcaagtgattttcctgcctcagcttctcaagtagctgggattataggcatgcaccaccatgcccagctaatttgttttttgtatttttttttttagtagagacagggtttcactatgttgaccaagatagtctcaatctcctgacctcgtgatccgcctgccttggcctcccaaagtgctgaaattacaggcatgagccactgtgcctggcctacacttcttctatttaggttcactgtccgtatttggaaagaacatgctacaacttgaaggagagatcacaagatatactaaaaaatattttgaaataaaaacaaaaacataacacaataaaacttatggagtgcagcaaaagcagtgctaagagggaaatttatagccataaatgcctatgttttaaaaacaagaaacatctcaaatcaataacttcactttatgacttatgggcctagcaaaagaagcacaaactaaatctgaagctggtagaaggaaggagattaagattagagcagaggacgtgaaatagagaatagaaaaaatagaaagtcaattgaaagaaacaaaatgttagttatcaacaaaattaacaaactttgagtttgaatgactaccaagaaaaggacacacatagatgaaagtgagaacatgattaccgaccttacagaaataaagcttgtaagagaatacaaatgccaataaattatatagcctatatgaaatggaaaactagaaatacacaaattaccaaaactgactcaagaaaaaaataaaaattctgcatagacttataacaaataaaacgattgaatcaataatcaaaaatctccctttgaacaaagaaaagtgaaagactacagggcttcatttgtgaattctaccaaaccattaaggaagaattaacaccaattcttctcaagctcttccaaaaaatagaagaggtaacagtatttcatagctcattttatggggccagcattatactgataccagaactagacaaagaaatgacaagaaaagaaattatagaccactcttccttaagaatacaaatgcagagatcttcaacaaatactaaaatattaaaaggattatacactaggaacaagtgggatttatcccaggtagttcccctcagtgaaacataaatcgatcagtgtatagagcacaataaaagaatgaagggaaaaccctacataattatctcaaatgatgcagagaaagcatttgacaagaaccaacagcatttcatgataataaacaatcagaaaaataggaataggatggaattactccaacatgattatggacatttatgataaacccacagataacagcacactcaatggttaaagactgaaagcctttccctaggaccagggacaggacaaaatgcctcctttcatggctggtattccactttgtatcagaagctctagacagataattaggcaagaaatgaaaggcatccaaattggaaatgaagaagtaaaactatctttatttacagatagcatgattctatacgttgaaaatgccaacacagcaagaccctgtctctacaaagaaattttagccaggcgcggtggctcatgcctgtaatcccaggactttggggggccgaggtgggtggatcacctgaggtcaggagttcgagaccagcctggccaacatggtgaaaccccatctctactaaaaatgcaaaaattagccgggcgtggtggtgcacacctgtagtcccagctactcaggaggctgaggcaggagaatcatttgaacccgggaagtggaggttgcagtgagccgagattgcaccactgcactccagcctgggtaacagagtgactctgtctaaaaaaaaaaaaaaaaaaaaaaaaatgctgggcgcagtggctcacgcctgtaatcctagaactttgggaggccgagacgggtggatcacgaggtcaggagttcgagaccatcctggctaacagtgaaaccccgtctctactaaaaatacaaaaaaaaaaaaaaatagccaggtgtggtagcaggtgcctgtagtcccagctacgtgggaagctgaggcaggagaatggcatgaagctgggaggcggaggttgcagtgagccaagatcgcgccactgcactccagcctgggcgatagagcaagactccatctcaaaaaaaaaaaaaaaagaaaaaaagaagaagaagaaagctgttataggttttggggaatatgttccccaaaagacatgttaaggttgtaaaccccagtacccgtgaataagaccttttttggaaatagtctttgcagatgtaatcaagttcaatgaagacattagggtgggcctttatccaatatgactgctgtctttagaagaatagatgcagacagacatgaagaaggccaggtgatgacagaggcagagattggagtgaggcctctacaagccaaggacagccacggactgctggcaaccgcacgaagctagggagaggcaaaggaagactaccctgaaccccgcacaggaagcatggccctgctgacaccttgactttggacttcggcctccagaactgtgagaaaatacatttacgttgtttgaaaaagaaaagaaatatatatacagatgccaagaggagaatgaagaaagataagaaaattaaaggatcagtccagcaggtctgacaattgactatcatagttccagaaatagcaaagaaaatgaaggaaattttctaagaaataatacaagcaaaattctcagaattgaaggactctaccctctggactgagagcactcccgacctcagtgacgcatattaagaaaaggactcataccaaggtatatcattgtgaaacttcaggatactaagaatgaagacaatatcctagaagttcccacagctgggaagacagtgacccacaaagccataggaatcagaatagcgtgagacttctcaacagtaaaagcagcaggcaggaaaaattctccaaaattctgtagaatattgacttttaacttagaattttatttccagcaaaacatttgccaaatatcaatcaagaacaaagacattttttcatgtctgtaatcccagcactttgggaggccaaggcgagaggactgcttcagctcgggagttcgagaccagcctgggcaacacagcaagatctcatctcttaaataattattttaaaaatagaacaaagggccgggaatggtggctcacacctgtaatcccagggctttgggaggctgaggcgggcggatcacctgaggtcaagagtttgagactagcctggccaacatggtgaaacctcatctctgctacacaaaacaaaacaaaacaaaacaaaacaaaaaaacgaaaaaaattagctgggcatggtggcacgcgcctgtagtcccagctactcagggaggctgaggcaggagaactgcttagacccaggaggaggaagttgcagtgagccaagattgtgccactgcactccagcctgggtgacagaaggagactccatctcaaaaaaaaaaaaaaaaaaaaaaagatgttttggatatgcaaagactcaaataatttcccatataccttcgttttgggaactgctagaagatgtgctccagcaaagtggacatggctttttaggtcaggactataaggagacagacttgggctgtccatggccctgaggcagaggcagcttgaaaaagaagtcagcccacagaagggaagaggatcaagagacagacagagaaagagcctgaaaatatcaagctgtcaggtctaatatgcctgcagatggcctatcatgaccttcccagttatttaagctgctacattctccttccatttaagctagtttgagctggcttcctggcacatgcaaccaaggagctctgtctcatacagttcatgaagtacataggccaacacttggtacagaggaagtacaaaatcattagtagcccttactactaccaataataacactaaaactaaaatgagagtggtgtgagtaatacataaaagtaagtgaactttttttttgagacggagtctcattctgtctccaggatggagtgtagtggcgtgatctcggctcactgcaacctccagctcccgggttcaagcgattctcctgcctcagcctcccgagtagctgggattacaggcacgtactgccatgcccagctaatttttgtatttttagtagagatggggtttcaccatgttggccaggatggtctcgatctcctgacctcatgatccgcccacctcggcctcccaaagtagtgggattacagacgtgagccacagtgcctggccataagtgaacttttatatgctctttcctgtgttttaagaattttccagcctgggcaacatagtgatacccccaactctacaaaaataaaaaatgagctgggcatggtggcacacacctgtggtcccagctactcaggaggctgaagtgggaggattgcttgagcccaggaggtggaggctgcagtgagctatgatggcaccactgcactcagccttgaggagagagtgagactctgtctcagtaaaataaaataaaataaaataattattattcttacatgttcacacttctacctttcccatggtttttgttcgaacaacccttaaactcaatttctctttggagacttcccttagttttcttgtcaggtgattcctcattgacggctgaaggtgggatgaacatgtggtttgccttttttgtatctgctgcttttggatcaatattcttcatttccctgggaggaaaacacagagacatatggaaaaaggctggagtgattaacatgtcctcaatgttctgtatgtcctataaactgatagatccacgtgaccatttacaaaacatgcattgaagtataacatagaaactaggagtgcacagattctaagtgtgcagctcaagaaattttcatatactgagcacgcccatgtaaccagcactcggatcgagaaagagaacgctgccagctccttagaagctgtctcacatccctgctcagtcactatcctacttccttaagagcaaccctgccctgatgtctagtagcacagttgtgttttaaggcaccgcttttatctgtagacaaaactttgagaatcactttattaatataaggcatgatgagcttctcaacaatatctttttttctttttttttttttgagatggagtcttgctctgtcgcccaggctggagtgcagtgacatgatcttggctcactgcaacttccgcctcctgggttcaagcgattctcctgcctcagcctcccgagtagctgggattacaggtgcatgccaccatgcctagctaattttttgtattttcagtagagacgggtttcacagtgttagccaggatggtctcgatttcctgacctcatgatccgcccacctcggcctccccaagtgctgggattacaggcgtgaaccactgcgcccagcaacagtatcttaaacaacaaaaagtgatgtatttagcaatgcaactgctaacacacagttacaaacttcctcttgacaaaaaaatctttactacaattcacctaatgagaatttatttattaaacaagagtatcctttatttctgaaatatataagctataaacttaatcctggatattctatatgaatttaatgttaattttaaactagttctgaactttaaaacgttctggccatggaatggaagggttatttgcaacttccagaagaaatgcatttctttggactcatcttcctttgaactggatgaaatgtggacgtggtggctggaacttgagcagccatttcttaccatgaagttaaatcatgggctgaagctaaatcatgggctgaagctagtggaacaatatgataaaagatcttgagaccctgtcactatgaactttcatatctactggagtccttgtaaatgagagaaaagaaattgtaataaattttagccactgtttgagtttttctgtcactctaagccaaacctaattataactgatacaattacctacctatgggcctagttctgagaaaagtctttacagaccttaatttatttgatcaatacaaccctacaaagtaggaaatactatcaaatgactgaagtacaacaaaacgactgaggatcagtgaggtgtgtgcaaataacccttccatttttattccatggctaaaacttagccccatagccagacctgcctgtggccttaaaaaggcaaaaatagtttaatagtccatggtcacagaaccagtaagtaaaaagacctgtatcccaaccttagcctctgccattccatggatcccgccatcaaggcttgttacgactattgggagagacagatatgagagcaatcataatgcctggtgcccagaaggtgctgaaaatctgttgggacaatgaactacagaataaataaagcataatggactgggcgcagtggctcacgcctataatcccagcacttcgggaggctgaggcaggcagattacaaggtcaggagatcaagaccatcctggctaacacggtgaaaccccgtctctactaaaaatacaaaaaaattagccgggcatggtggcggacacctgcagtcccagctacttgggaggctgaggcaggagaacggcatgaacccaggaggcggagcttgcagtgagccgagactgcgcctctgcactccagcctgggcgacagagcaagactccgtctctaaaacaaaacaaaacaaaacaaaaaaagaataaataaagcataatgaacaacagttacagaggcagaagcaaagagccccaaagagcagtccctatgtcttctcccttctccatcccgaccctctcctccctcacttacatgttcaatctctcccccttcacacaggcttgggtcttctaccttatgtttatttatttatttagagacagggtctcactctgtcacccagactggagtgcactggcatgctcccggctcaccgcaacttctgcctcccaggctcaagcgattctcctgcctcagcatcccaagtagctgggattacaggtgtgcgccactaccacccagctattttttctatttttagtagagacggggtttcaccatgttggcccggctggtctcaaactcctgacctcaaatgatccacccgcctcggcctcccaaagtgctgggattacaggtgtgagctactgtgaccagccttctaccttatgtttaaatagcccctgttacttaccatctgatcttgcctttttgatgcagaattttattccttctgcttcctaggaatcccatccatccacagggacttacatcttccccttcacgtcccaggctctgccttccgactttagccttgttgagactgccctctaccaagtcgcctacctgtctctgccccacgttttggagtctggccactacattgctgcttgctgcttccctactgtcctttgtccccttggctttatggtcagtgtgtctgcatatatggactctcctccttcccttctggtcactcctccccttacagaatattctgtcctccctgacttatgtggttgccctccaagattgtcctcaacctcagcttccacatctgtaaaatggggataagtaaataattgtaccactttaaacacactgtcttataacctacacttcggtccaataatatgttgtgaccatctttccttgtaaaacaaaaatagagggaggtttttcttggctgcagagtatggaggtatgatagttttatttaaccaatcatcttttgatgaacattaatgctgaactgcattcctgtggtgttggtggtggtgatgtctaatggggttttgtgaatgtgtgtggtctgtgtcccatagtattttataaataactcaattgtggccgggtgcggtggctcatgcctgtaatcccagcactttgggaggctgaggcgagcagatcatgaggtcaagaggtcaagaccatcctggccaacatggtgaaacccagtctctactaaaaatgcaaaattaaaaggccaggcatggtggctaacgcctgtaatcccagcactttgggaggccgaggggggtggatcacgaggtcaggggatcgagaccatcctggctaacacggtgaaaccctgtctctactaaaaatacaaaaaattagccaggcgtggtggcatgtgcctgtaatcctagatatttgggaggctgaggcaggagaatcgcttgaacctgggggacggaggttgcagtgagccgagattgcaccactgcaatgcagcctggcgacagagcgagactccatctcaaaaaatatataaaaataaaaataaaacccaattgtattatattgcataacaaagtatttatctacatattcatatttttctgtccctcttattatgggagacatggatagctgtctagccaatagcaattccctctttctcgtttgtaaactgaatcccattttgttttggacaacaaagtgcccagttctatggaaggtccagtccagttgtggaaatctcgccctccttggccagatatttcccatgcttcccttgcagacagggtggctccatgaaagagttataggggcatgaaggaaagacatgagagagacaaagaaagataaaagaaagtgagctattctttatggaaaaatgccagctaataaatgtagaaggaatggcagaagtagaaaaatcaccattttgcaaccttaaatgtaatagttaatcaggcaaagaccactgatgagtgctaaaaccactgtgtgaaagatgttggggaagcacattcacacagtctgggagaatcacatcatttattcctgactaattagaaagacaaacatgtgctcttacaatgcagagatctggtagataccagtttaaccaagtgtttaaacttagcatcaccagtagcagagcaacctgacatgatatgcctcctaatgggatgcaacataaatatacaacatcacctgtgaaagattttgggcaaaatgatttaacttgaatctaatcaaacctctagcatagacctaatgtccagtgtacagaaaacataggctatattggaacaaattcaatgctactttgaggaaatatcagaaaaacccagaatgtggcttgagcttttcaaaaaagtccatgtcataaaaaaacaactaataagggggggggggcaggatactgttatagattcaaagacaccaaagagataaaactaaatacaatttctggctaggcacggtggctcacgcctataatctcaacagtttgggaggctgaggcaggggcagatcacctgaggtcaggcgtttgagaccaaccaggcaacatggtgaatccccttctctactaaaaacacaaaaattagccgggcatggtggtgcacacctatagtcccagctactcgggaggctgaggcgggaggattgcttgagcccaggaggcagaggctgcagtgagccaagatcacaccactgcactccagcctaggcaacagagtgagactctggctcaaaaaacaaaaaacaaaatataatttgtgattcttgattggatcctggagcagcaggtaaagccaaagacacactgagttaggcacagtggctcgtgtctgtaatcccagcactccagaggaggctaaggaaggaggatcacttgaacccaggagtttgaggctgcagcaggctgtaattgagctgctgcactgcagcccgggtgactgagtgggaccctgtctctaaaaattaaaatacattttggggacaattggggaaatctgaatttggattagctattagagagagaaagcaaatggggcaaaatgtgaatacttggcaaatgcctgatggacagttcagtgtactatcctgatggacagttcagtgtactatcctgatggacagttcagtgtactatcaactttctgaaaggtttttctaagtaaaataaaatttctgaaaaaggcagaagacagaggaaaatgtccataatatgctgctagtgggaaaaaataggtctaaaaaacagaccaacagtatgactctacactactttatttagtgatacggatatatgggcccagaaaaaaaagactggaaggatttataggaaaatgttggcaatgtgtatctcttggtacttttatgtggtttccgggtcctttgtttgctttcattgaacacataatgtttttgtagttagaaaaaaaaaataacaacaaaaaaagctctggtctctgttattaggagtttataatctgaccacaagaaagctgattatgcttatgatggttacaggaaacccccctgccccaccaacccatttaaaaatgatgatgatcgtgtgctgcaaaagataagtgcggaacaacggcattccccaaagccccttccatacctggagaagttgtcttgcagctcctttagatgcttgtcaaaataattccattcagtccaatgatgctggtacaactgattgaggttgtctttccgcttcttcatgctgcacagggtctcgctgatgacatcagtatacgttggggtgcagtcagtgg

SEQ ID NO: 2652 - DNA, 227 bp, Homo sapiens
ttatttctattttagattaaatcagacaacatgtgcatgctttacctataaagtttctctcaattcttggacaaagattcactcaaatgagctggaaggtgagaggttaagaaggcagaagcctgggagtcacacagaaacacattacagatgtcatgtccctgggctgagtttagaaaagacaagatgtttgccaggcagaaagagggcatattggaaataggctg

SEQ ID NO: 2653 - DNA, 157 bp, Homo sapiens
ctgggcatggtggcacatgcctgtaatcccagctacttgggaggctgaggcaggagaatcgcttgaacccaggaggcggaagttgcggtgagccgaaatcgcgccactgcactccagcctaggcaacagagtgagactctgtctcaaaaaaaaaaaa

SEQ ID NO: 2654 - DNA, 311 bp, Homo sapiens
gtgatgtccagagaaaaatagctgattgggccacaatcacaacaaaaactaataaaacagtagccatttttttctgatacttggtccacagtcagtatgttaaactatctttcaaaacatttcttcccaagggcatacaatactttctgtctcagatccttaccaaccacccctcaccaccaataaaaagtgagaccaaagtacctctcagtcaacagaaataaaaggtttccttaaaaattcagagtaatactcagacaaaattggaattaaggcatacatagtcatcactcagtggaaaaaactgtgtg

SEQ ID NO: 2655 - DNA, 314 bp, Homo sapiens
aagggccgggcgcggtggctcacacctgtaatcccagcactttgggaggccagggtgggcggatcacaaggtcaggagatcgagaccatcccggctaatacggtgaaaccccatctctactaaaaatacaaaaaattagccgggcgtggtggtgggcgcctgtaatcccagctactcaggaagctgaggcaggagaatggcgtgaacctgggaggcggagcttgcagtgagccaagactgcaccactgcactccagcctgggtgacagagcaagactccgtctcaaaaaaaaaaaaaaaaaaaaagagagaaag

SEQ ID NO: 2656 - DNA, 654 bp, Homo sapiens
gccttgtcttcagagacaattctccttgaatctcatgttcttcatgtttagacattaacaagcaatttgctcagatttatttacattccaggatagtaaagatagagaatgtctccctccctggagactttcccagagaagatttggttgcattccaggttaataaagattatatatatatatacccaaagaagaggatggacaataaaacaatataacattatttccctcacatcttaattatgtgtattttcaatcatgtagaaatattgaaaacacagtacaacctatataacatccatctagatttaacaatttatatgtaatttttcctgaaataccagtggtaagttatagatataacattataaccataaataattgagcattcatctcctaaaaataaggacattctcccacatacctggaatatcattatcaatctaattctatgatatatccagtccatttccaaatttctcccattgtccccaaaacatattttacagttttaatgaggtagaattagcatacagaaagtggaacttgtttaaagtgtacaatttgatgagttttgacgtgtgcacctttccaaccatcatgacaatacaaataatgaacatatcaatcaccccaaaaaagtttccttatgcc

SEQ ID NO: 2657 - DNA, 654 bp, Homo sapiens; identical to SEQ ID NO: 2656

SEQ ID NO: 2658 - DNA, 323 bp, Homo sapiens
ccccctttccccacattcttcccacatccacaggcaatcatggatctgttttctattgttatagattagtttgcgtttcctacaattttatacacatggaataatactataggtactcttgtttggctccttccatccagcataataagtttgagattcattcatgttgttatatgcgtctatgttcattcctttttattgctaagtgttatttcattatatggacataccagaatttgtttatccattcatgttttgatggaaatttgtatttccagcttttggctattacaaataaaactgatgtgaacatttgtttacaa

SEQ ID NO: 2659 - DNA, 339 bp, Homo sapiens
catatttatactttcttttcctgagaatttggtagatgctgctcttctaaaattgagtgatgttattaagaagtcttagacaaacttgctctcttttttcttgtatataatgtgcctttctgccatatgattctttttttattcttgaagttaaggatctatggaagcatatgctttggtcctgatctttgtgtattaattttacctgagttatagtgagccattccaatcattcatttcaaggaagttttattttgcttaacattttttctgatccatttcttctcttcttcagggacatcaattatgcatatgtaagatgtctttgtcaccttctac

SEQ ID NO: 2660 - DNA, 323 bp, Homo sapiens; identical to SEQ ID NO: 2658

SEQ ID NO: 2661 - DNA, 339 bp, Homo sapiens; identical to SEQ ID NO: 2659

SEQ ID NO: 2662 - DNA, 6112 bp, Homo sapiens
ttcatattctgtgtgttctccaagaatgcttaatcagtgtctggagtccttggtgcagaaagtacaaagtggggtggtaataaactttgaaaaagcaggaccagatccttcccctgtagaaggtattattgcacttttcttttagacattcaaaacttgctttattgtttattcaactagaactgaaaacttactgtgatttggccttaagataggcaaggccaaattattaagacagaaaggctgttggtaaagagggaagattaaataggaaagtcaaggtaaactaatagtagtctagtagcatcacctttttgtattaatgattgtctattgcctgacattttgatgagtcaaaagccttttcaaagatttatcgataagcaactttataatttctttgtagtattatacaattgcctctcaacatatatatgcttctcctatgccctttaattcccaaagtgttcagtcctagatgtttaactccttagctacttttgtaccagggatcaaactgattgaaagtaaatggtttattgtgggtcaaaaatgaggaaccaggctttgccattaagcttgattcttctaactctagctgagtcccacctggctttttcttggcttctgtaatcatgaactatttccaatagccagtggatataaggagttatagtagaaccaatggatggtttatagttgagaccctctgcattgtatgttacctatttcaagatttaagagtcattgctgggcacggtggctcacacctctaatcctagcactttgggaggccaaggtgggtggatcacctgaggttgggagtttgagaccagcctgaccaacacggagaaactccgtgtctactaaaaatacaaaatgagccaggcgtggtggcgcatgcctatgatcccagctactcgggaggctgaggcaggagaactgcttgaacccgggaggtggaggttgcggtgagtggagatcacaccattgcactccagcctgggcaacaagagtgaaactccatctcaaaaaaaaagaaaaacaaaaacaaaaacaaaaaaaaacaaaacacacacacacacaaagatttagagaatcatttaatgataattggcagaggtggtccactaaagtaggtacctgggagaagagaaagatcatagagatgaaagaatgggggcactgagagggtactatagggaaggaatgggtgataacaataagttgtgtcatgtctgctttaacgaaaccaaacttaaaaaaattttaattgttacagtgtatttattttaaattattttaatgctttgtttagagtttgttactagtaaatgtttactggattgttgaagatagttgctgttttgctaaaattattttagattaaaggtaggtgctttggtctagatttgcttattaagttctttttttaggcttcggttaaaatgatttctaagaaatactcaatttgcagtacttatttattctagtatttattgtgtgcctggcactgtttttgacatttgggatatgatgataaaggtggcaaattgggtgcttgctcttatcatctgatgaagaaaacatgccattcatcaaacagatattcaccgtaaagtatgttttgtgtgttccagttgggaaggcaaaggatgctgcggacctcctttgaactggcgaactcatagttggaatttgtacttattgtctaatgaattacaatctagtctaaatattcagcagacatagtgttctgccatttaagaaaaataggaaaacctggaaaaagatattaggaattttttattaatttaagtaataattgatataatttaactttttatgcttatccccccttatgatatatgctttctttgtcttaatttctttgctatagatgggcagccagatatatcaaggccttttggatctcagccttggcatagctgtcacaaactcatatatgtcagaccaaatcctaaaactggggttcctataggtcattggcctgttccagagtctttttggccagatcaaaattcgccaacactagtaagtaccagagactgtaactatgtaatagtaaccattcagctgtctttcctattagtttcaaattctgttgtcaaagctgtgattaatttatggggattagacagatgttcaaagtgctatgataccctgttacttgctttattatgttgctttgctatgataaccctgttactttgtttattatgaagtaatagaaaaaaggcatctccttcgtttagaatctaatactatgcttgcgatttttattcttggcttctgggttcaaaatttcctctttagactctaaatgaggatttgtctctgggacacaatttaggatttaaatgaaggcttagaaaataattttgatagtttgcctgcaattttttaggacttagtcttaaattcatattgatatgtatggttttagttatatacagtgttgcagattggaggtttaagctagaacagattttctgattttgtttacctgaattatttttaggaaaaatgaagtttgctgagcgatcatggtgaattatcagtattcattatataattcttaaaataatagggtacatttatacaaattaatatccatttagtcgtgttagtgtactctttttttccatattttttttctaagtatctgagggcattaagggatattttgtgggagagcatggcagtggttctccttgattttacctttagaaaataagaattgtatttcagagatcattaagcagtctaataatgtttgatacaacaaaacctttttgaaaccttttgtacttcaaacctgtatcagcttttcaggataatttttattttgagtttataaagtgatatttcctttattcattagggatttaataaagtagtgcatgaagttaaggttttctaaatttcattgaagtatcttcattataccttttctttttttctgatagaaccatcatagttttttagtctggctttatggagaaacttccaatttctttggtcattttactttcttttctggagctctttcaactcttacagaacagataccgtatttgtatgaaatattgtcatgttggttatttattctatttatttaacatgtacaggagaacatacagtacctgagttgtaatggaaagaaatccaaaaccagtatcagaacccttatctattaatgctgctctagcagtctatcacaaattcttagaagccatagagggtaggtaggacttcaattggagaaggaaatagtatgagaaaaaaaatatggaagtgaaaaagaacaaggtatgtttagaggagtaacaagtagctgagtacgggtggatcataacatgtatataggacattgagagtactattaaactaaccaaattgcttatgactttaaatgcagggttaaggaatattagcttttaaacagtggagttcaaagagcagtcgaagatgtttttaacagacatctttagaaaaattgatttggtggtggttatatgcagtaaaattagaaggggagatgagttgaaaggcaggtaggttacctatgagggctattgatatggttcacgtaagagattttaagtggttgaattatgatgatggaagagagaataataaataatattggaaagaactggcaaactttagtaactgaaggatattaggggaagtgaaatttttataaattacaatattgaagaaatattgctactgaagttaagtgtaatttacaagatgtgaatttgaatcacggcactattagttattaattagtacctttggttatcttttgtaagcttcaatttcccatctgttaagtggcttatagctccatctcatagggttgttttgggaattaaacaaaatcatatatgcaaaattttcttggccaagttctagaggatctttccctccactttccctcttggatctccgtatttttattcacagaataagtgtgttttgtggactgattcaataaactgtgtgtcaggtgcatgctaggcacaggagcacaagatgagtaaaacagtgcttcccctctgaacattacccatctatgggcatgtcagacacgtacacatcatagagtacagtgtgccaactgtaatggaggggtggggcagagccagaggaggtgggcctgacagcctggtgtgtttttggagtacagagtgggaaggggtatgagggaagaggtcttttagaggttgttacatgccaactcatttttctaaactttgtttgcaatatgcaagggagaaaataagtacttggcatggctgaagtatggagtctgtatggcgtggtggtgggaaggcagatagggaccagatcactgaagatctttatatgtgatattaagtgtctagaccctatttttaggtgattggctgttacttttaccgaacagttttagatagggaaattatatgatcctatttatatttcactgccatggattgatcagacagggactgattagaaactaaacaaagcaaaaagcatttgtactagtctaatctgagaaatgatgaaggcccaaattaaagtggtaagaaatagaagataacatttctagagagatgagagtttagtattgacagaaggcagcaactagtaatgactacctaccatgtttatgtgttctggtaagtgccttagaatttgtgatatcagtttatccaggtctttgtgacagttaaatatggaggatgaggggaagatatcaagaataacggctaggtttttagaacaggttttgtagcttgggggagaagaaacaaattgtacatattgtgtctgaggaacctgtggaagattcaggttatgtctagtgggtagttagatacagcagagaaataggagccatctggccccaacagtagatttgtgaaccaccagggtataagcagtaactgaggccaatagagtcctttatagctatgacatttaaaattatttcctcatagctcattttgttcacaatttgtgagatttttaggaagaggactattaagaggtagattggggagtaacatgcctttttaaaaaaagtattacttttttatacctctagaacaggggtttctaaaataagggtgtgtatcctatagagtttaccaaaatgattgctggaatagggaaggaaacattagaagttctatttatggttatttttctcctattttcataccattttggtatatattttgttatgtacatctacatttataatttgtataattagaaatatatagtgtgttcaaaaactgatcaagatctatgattactttggaagtcgctactctctataagtaattgctacaaatgaagacttgtgagagtttctatatacatttctaattttttggatgtaaaaattaatgaatactcaattactaaattttgcgtaagacctaaaaatattttcatttctatagattttcaagtgtttatctttttgttgtgaatattacataactttagcattacattttcaagtgtttcctttcagcttaatgttgcttttagcagtaaatcaaactcttactagcaagacggaggaactgagtaaattttgataatgaggaatatttagttttgtttctgaaatttcatgtaagtagtaattacaagactttcccctttagccacctcgtacatctcatcctgtagtgaagttttcctgtacagactgtgaaccaatggttattgataaacttccttttgacaaatatgagttggaaccttcaccactgactcaatttatcctggaaaggaaatctcctcaaacatgttggcaggtaagctgaacaacttacagtgaccccaaaatttaaatgaggcatttcttaaaaagctgaattgaatcaatggtttatgtaacattctttaaaggttattaaagttttaaccgctcctttttaacaggtgtacgtgagcaatagtgcaaaatacagtgaacttggtcatccttttggttacttgaaagccagtacagcactgaactgtgtcaacttatttgtgatgccttacaattatccagtccttcttcccctcttag

SEQ ID NO: 2663 - DNA, 6112 bp, Homo sapiens; identical to SEQ ID NO: 2662

SEQ ID NO: 2664 - DNA, 1061 bp, Homo sapiens
ggtgtttattaacatttattaagtgtactcttgctaaacattcttaaatgaattaagcagtattcagcccgcccagcagcactttgaagcacagatattatttaacagataaggcagtggaagctcaggaggtttcatcacttgcccaaggctgcatagctgtgaagggcagagctgggtgtaagcctaggtcaatttggagcccaggaccctattaatctggtccatagctgcccagcctaggacacgactaaaggcattcatcagactgacttgctgggtggcaagaaactggcccagtcttgttttcttaggcccccaggaatgcgagggtgggcagaaagagtcgtggtggctcctaccccatcgccgccccatcgtggttagattataatggacgcattcattactgccatcctcaggaagcttcaactgtagagcaaggctttgcggggccctgccatgcacattgtggccatccaggagccagcagcaaccctggtgatctggtcatcttgtctcttacagacaagtgatgactgcaacctgttctcctgacttgacttggctcaaaaagcctctgcgactcacctgcttcttttgccaccatgtcctcttctgcccaccctcacattcctggtgccctaggatgacaagattgagccagtttctttaccactcagccagtcggcctgataactgcctttggccgatccctagactgagcagctgtgggcaggatgagcagggtcctgggccccaaagctggccacttctatgtgaggagctacttgtgccacattcctcaagtgcctgtcagctggcgggctcttggggtcccatggatggagtcttctgctcatatgtcacaggcaattcacaggcacctgctggcccaatcatgacctgcggtggctcagtgtgagccgcatgcctcacctctgtgacagtaggcaccgtccagtgaataagtccacttaatggttcatctcaaggaaacagtcctcaaacaaaaggcttggtatacggtgatgttcactgcccagttaattatactggta

SEQ ID NO: 2665 - DNA, 4171 bp, Homo sapiens
ggcagaggtggaggagacactgaagcgactgcagagccagaagggagtgcagggaatcatcgtcgtgaacacagaaggtacgccctccctcccgccatgacccgcacccaggcaggcccagaagcagccataacacagcatagcacttgctgttcactaagcccttcatgaatctgatctaattttaggcctttttaatttttaacacctccagtgttcttttttttttttttttttttttcattaaggctagtcaggtgaagcagcgggagtggagaagggacaaagaaatcggtaactggttgtgagcaattagttgtaaactgcattcagaccagccacctccagtgtcctcacaaagggaaaatccgctcaatcccaccaccctgacagatcacacttcagtcttccatgcttactcagcctcgtccagcacagttccagaggaccataatcatagttgttacccttgggcatatgtttacacttgagctttttaaaatattgcttcatggtttacataaacaaattaagtgccacgacaatgttcattagcccaattttgttgtttctactttttagtaaatccattaagtggatattacatccccatttgtgttgattctgctttattggctggatagttctctagttaactcctctgtgcctgcagctcccctccaccccaacaaccctttctgagtggtatctgtgtaggtagaagtgtacagatactaactttcccagactgcactggacaggaagggagctagcatttatcacatacccgctctgtgccaagattctggctggtgcagccctgtcgtctgcattttgcaatggagaaaactgagtctagaaatgtaattgatcggcctaccatcacacagtcgagatttaaatccaagcccgtctgagtgcgcttgggtgctttctcccgcgccaggctgtaaagaaccagaatggcccccagaccctcacgctccaggcagcagtaaggacagggactctggaatccagcagttgtgagtttgaattctgcctcatctcctgactagctttgtgaccttggccaagtcgcttaagcctgtaaatggggataatacttatatctaccttataagttgaagagtaactaagaatgaacagcgtaaagcatttagtacagtatcgtcaccatctgttttgagctgtgaggcatttgttcatacaaactctgatttacctgattgggttcccctgttgggttgggagcatccacatgcttcatgcctctaggccacagtgtttcccacacgtattcattctttgaaatcacccgggggtcctgttaaacatagctttccaggcctctgcaccaaaaagtctaatttattagagccaaagcaagacctgaggaatctgtgtgtttacgaagcaccccaggagattcttatgatcagacaggtttagaaaattctgctttaggggatagattctaatcagaagaggctgcagtgagagccacaggcctaagattcacagcagttctgtctccttccgaaggccttcccttggagagactgcctcagatcatgttttcagggctgtggtccttaaacccaggggtcctgtgctaccctgggagtagaggtagaggctggggttcctgtcctccacttcagtcagagcacacacactaagaaccatcagttcatgtttctacattggttttaatttggaaaggggtttggccaatttaaaaactaccctactggagtagccggccgggcgcggtggctcacgcctgtaatcccagcactttgggaggccgaggcgggcggatcacgaggtcaggagatcgagaccatcccggctaaaacggtgaaaccccgtctctactaaaaatacaaaaaattagccgggcgtagtggcgggcgcctgtagtcccagctacttgggaggctgaggcgggagaatggcgtgaacccgggaggcggagcttgcagtgagccgagatcccgccactgcactccagcctgggcgacagagcgagactccgtctcaaaaaaaaaaaaaaaaaaaaaaaaaaaaaaaaactaccctactggagtttacaaaaataacataaaccagtttatgtgagacttgggaggagaggagtccactgagacactgctgctgatagagcagcgtgaccagtgaaggaagaccaggaccatgcctgactcacctctgttcccgtgtcattcaccacaggccgcagagtcaggtcagtgaacgttaaatgaaccaaccacagtgggtgttgccatcagcccctttgatttggtaattcttgaggactgtgttgagaggaaataatcccaaaggaaaaaacctgaaatttttgcaagcatgttagatgccataatcagtagattaataattgttataatggctgggcgtggtgcatggttgctcacacctgttctcagcactttgggaggccatggcaggacgattgcttgagccaaggggttcaagaccagcctgggcaatgtagtgagaccccgaactccacacaaaaaaaagaaaaattaggcaggtgtggtggcacacgcctgtagtcttagctactcaggatgctaagacaggaggattccttgagcccgggagttcaagactgcagtttgcttcaaggcttcttgctcaaagctttgattgcactccagcacagagcaagaccttgtctctttaaaaaaaaaaaaacaaaaagtaacaatgaagtgtgtaggcccttcagtgcccagcccaggggctgctcccacaggccaggatttaccagcagccctgtgggtggaagtggtacagcagtgcctgtgtctgtcacatgtctggtgtgctgccaggcacggtttgtttatgtgtttcttggctgcctcgtagggtagacattattgcggccacctttacagacacacttggacatcccaagaggtcaggccatgcccggttgcggggccccccaaattctctagcccagtgtattcagtgggctctaatttgttcagtgctcttagagagcctcttatgtgtgtcttcagtctaggccttgttttggagaagcagagttctcgcaattcctacttaagcagaatgaaagccatcaagggcaacaaagtggaggtgctgtgtccttggatagaatgttgatttccagccaggcgtggtggctcacgcctgtaatctcagccctttgggaggccgaggcgggcgtatcacctgaggtcaggagttcgagaccagcctggccaacatggtgaaaccttgtctctactaaaaatacaaaaattagcctggtgtggtggcgggcacctgtaatcccagctattcgggaggctgaggcaggagaatcgcttgaaccaaggaggcagaggttgcaatgagccgagatcacaccactgcactccagcctggacgacaagaatgaaactcggtctcaaaaaaaaaaaaaaaatgttgatttccaagtcagcagagccctggcaagcacagagctagacagaacgtgctccccagccctgtctagttctgattaaaccatgtggtcatttcatttacaggaggctgggagcccttgggacactgtggagacaggagcaggccccctgctcagggctgcccctgatcagttgggtggcctgaggcaactcctttccccgcttcagccctcaactgcctcgagtcctgtgatggtccagggaatctcttttgggcacttcttgctctaagacctgaaagacttttgtcactaagagagaaactgtcttctgggactggacattttgactccaaggagacaaccccaggggccaacagccccagctgtgacccccaggcttccacatgaactcacaaaggagaggccctcattcttgccttaaaactgcccctaaagccaagccttttcactgggaagccctagctgcttaccttttggatactagtgagtgctgcttttttgtatactcatggggctgattgcaccatagctgagaacgtggaatgcagaatgagcccacctggctttgaatctgggccctacttaacttatcagctatgtggttttgggcataagccactttctctgttaagttttctcatttgtaaaatgtgggtcataattctgccttcctctaggggaagcttt

SEQ ID NO: 2666 - DNA, 117 bp, Homo sapiens
ggaggctgaggcaggagaatcacttgaacctgggaggcggaggttgcaatgagccgaggttgcaccattgcactccagcctgggcgacacagcaagactccatctcaaaaaataaaa

SEQ ID NO: 2667 - DNA, 301 bp, Homo sapiens
ctgcatcatccatgctgttgctgagctatttctccaagtctcaccatcactctaggtgaagaagggtggtgaggaccttaatgttttcttcttacattgcagtgcggaatatgtatcttatagaatattttacaaatagtgcttctctagctaaccaagacaagcagccacacatatgtcagaaaaatcatctggcaaatgatgcctcacatcctgctggcctcaccttggattccagacatggctgcagtaaacagttctgtgctagcttctcacatcaagaaaatatcttttgtggccg

SEQ ID NO: 2668 - DNA, 14781 bp, Homo sapiens
  SITE (12028): n equals a,t,g, or c
cttggttttctctcattatgccttttgcaacggttatcttttttgtcatgatcctggatttctacgtggattccatttgttcagtcaaaatggaagtttccaaatgtgctcgttatggatcctttcccatttttattagtgctctcctttttggaaatttttggacacatccaataacagaccagcttcgggctatgaacaaagcagcacaccaggagagcactgaacacgtcctgtctggaggagtggtagtgagtgctatattcttcattttgtgtaagcatttccccccttttttttattttaacaaatttctatttatggattttgatggtcacatcatttacttattttgggaaattcttcagtgcttgcatttagtgccgacagttactgtgttggttttggtagcttaaacttcgaaaatttaaacatattgttttttctctttgtagctgccaatatcttatcatctccctctaagagaggacaaaaggtacccttattggatattctcctgaaggaacacctctttataacttcatgggtgatgcttttcagcatagctctcaatcgatccctaggtttattaaggaatcactaaaacaaattcttgaggagagtgactctaggcagatcttttacttcttgtgcttgaatctggtaagatttttaaatgttaattgacatatcctaaaagcataatattttaattttgacagttctggtataagtttagtacttcccaaatttctgataataagatgagctaaaatttaaattttttctaagtataatagcaagattacgagatcatattcagattccttaggcaatccttaaggcatgtgccaccgtgcccagccacttaagcaaacaatttgtgaggcattttagaagcattgatttagtatgttccttcaaatcagtaaatatagtagcatttaaagagttctaataacttacaggatctcactattagcaatcagtgttataaatcacctattgctaacattttataacctagtttattatttttatagacatataaacaaaaccatttttaaatagtttctaaaatggatttatcttagttttttacaatttaatagtttgtaaaatgggtttatcttagtttttacaatttgtgtgaaatagggtttctaatgtaagtggcagttaaataactaaacaattatagcagatcttcaagtaaatttggataattaagggttaaaatcctcctaattgaaacagtgcccaacatactcctcccttttttttggtgacatttttagctttttacctttgtggaattattctatggcgtgctgaccaatagtctgggcctgatctcggatggattccacatgctttttgactgctctgctttagtcatgggactttttgctgccctgatgagtaggtggaaagccactcggattttctcctatgggtaggtacattgactgtcgaggtggtatatcttaagtgcaaattccatcttaaggaacagaattatattattatattattttaatacaaataatttccaaatttatttttaaaaaatgtgaagtaaataagggatgtgaatgggcatttgataaatatgaatggaattaagctcaaagattatgctcccttggcggagcacagtggctcacgcctgtaatcctagcactttgggaggccaaggcaggcggatcacctgaggtcaggagttcgagaccagcctggccaacatggtgaaacctcgtctctactaaaaatacaaaaattagccgggtatggtggcacgcacctgtagccccagctactcgggaggttgaggcaggagaatcgcttgaacccagaaggcagaggttgcagtgagccaagatcgtgccactgcactccagcctgggcaacagagtgagactatgtctcaaaaaaaaaaaagacagggccaggtgcggtggctcacgcctgtaatcccagcactttgggaggccgaggcgggcggatcacagggtcaggagatcgagaccatcctggctaacacggtgaaaccccgtctctactaaaaatacaaaaaaaattagccgggcgtagtggcaggcacctgtagtcccagctactcgggaggctgaagcaggagaatggtgtgaacccaggaggcggagctttcagtgagccaagatcgtgccactgcactccagcctgggtgacagagcaagactctgtctcaaaaaaaaaaaaaaaagagagtaaagaaggactttgatgaatatataacattttaacaaatgtatatattcgttaaaatgttatatattcatatataacatatatattcatatataacgtgtatatatatgtgtgtgtatatatatatatatatatatatatatgtgtatatatatatatatatatatatgtgtatatatatatatatatatatatatgaaggaccttccaggcattaatatgatatttaaaatattgctaattttctattattaattacttagtagtatgaaaatttggacttgtttcctcatttataaagtttatactttaaaaatatttgtccttttccttttctgaaaaatgttctatgtttttaggtacggccgaatagaaattctgtctggatttattaatggactttttctaatagtaatagcgttttttgtgtttatggagtcagtggctagattgattgatcctccagaattagacactcacatgttaacagtaagtctttttattttcctatttggatttctagtcatacttacatagttttttctatcctaaagtttaattgtttgcagttattgctctaagaaggttttattttttacttatatcaacataacttcctatcttgctgtttacatttatactgctccctcttagaaattctcttttttttttttttttttttgagacagagtctctgttttccaggctggagtgcagtggcatgatctcagctcactgcagcctccacctctcaggctcaagcgattctcgtgcctcagcctcctgagtagctgggattacaggcatgtgccaccacccccagctaaattttgtatattttgtagagatagagtttcgccatgttggccaggctggtctcgaactactgacctcaagcaatcctcccaccttggcatcccaaagtgctgggattacaggcatgagccactgtgcccggccagctatagcaacttttaatgttctccctgtaccaccaaagctttacatgtgctgtttcttgtagttggcatgtcctttccttacttctgcccttcagcctccatcaagattttgcttatgtgaaatactttttttcttttctttttttcttttttttcaagcaattctcctgtctcagcttcccgagtagctgggactacaggcgcctgccaccacgcctgcctaatttttggaaatactttcttttaatccccctcttctctccacaaagtttgttagattccttttctcagtattctcattatgttttgtgcattcttcttttagcaacattgagttgcagttgtttaatttgtcattcttccacaattaagatatgtaagtatcttcaggacctgaattacatattattaactcttaagttcagttctagcacctggcttgtcgtaggaaatcagttgttaaatgacaaaaagcagctctggctcttgctggtggaagcatacatgagtaaaatgtttctataatacagtttggaaaaatagacttttttggattttttagtgcctgtatcctttgatattgactatttatcatacataaacattcacacaaacatatagaagtacatgactctggccgggtgcagtggctcacgcctgtaatcccagcactttgggaggccgaggtggttggatcacctgaggtcaggagtttgagaccagtctggtcaacatagtgaaaccccatctctactaaaaatacaaaaattagccgggcatgatggcgcacacctgtaatcccagctagttgggaggctgaggcaggagaatcacttcaaccacgaggcagaggcttcagtgagcccaggttgcaccaactgtactccagcctgggtgatagagagactctgcctcaaaaaaaaaaaaaaaaaaaaagtagtacatgattcattgtacccttatttataatagtgaaaaaatggaaacaattcactgtccaccaatgaaaaaagtaattaaataaatttgttatctatataatagaatattacagagctattgaaaagaatgagatatatctgtatatactggcctgaaaatatttacgagatgtactagtgaaaaacaaattgcaggccatgcatggtggcgggcgcctgtaatcccagctgcttgggtggctgaggtaggagaattgcttgaacctgggaggcagaggttgcaataagccgagatcatgccactgcactccagcctggttgacagagcaaaactctgtctcaaaatgaaaaaaaaaaaaattgtaaaatagtattatgattacattgttggttttaaagggtgttatgtgtatgtatgttagtacacagatggaaaatacaccattttaagcgtgactaacccttggtggtagaattataggggactttcatcttctacatttttattttcctgataaaatacacaatgatgaagtatttttcagtaggggagaaggagtacttatgagatgatggagtctctgtaagcagtacttggtttcattcaaagtcattaaccatctaccagcttataaagcctaatgaaattttaaaatctggagtcaaatggtccgaatcaggaagaagtaaataacctccctacacatttaataaagtaaatctcttactacttttgaaaagtaattaaaagtatttgtccttctcatatttatattttccttttataaaacaaatggattgctttaaattgtagatgtaggcaaattaacaccctgagctactactattcaagatcattttgtaagagcagataatcaaggataagtaactttgtttatcctttggagtattattgtggcaccattaaattaaagtaatttcattcactttgttaagaaaaaaatgagaggccaggcatagtggctcatgcctgtaatcccataatcccaacacttttggaggccaaggtgagaagatcgcttgagcccaggagtttgaggacagcctgggcaacatagaccctgtctctaccaaagaaaaaaatttgtttttaatttaaataaatgcgagattactattgtatgtttcctttttattatacttgttttactttggaaaattttactgtgtttaagacataataagaccatatttggaatctgctcattaataaattataattgttggcatataaactgttcaaatttacctagcaatataaagatttcaggtacagtgtatacttgccctagtaagcagtactttcaaactcttcaataaacaaaacaaaactttgcatcatttatttatacataaaccataaaccaagtacataccattcttaattgaaataagtccaaattcctctacttaccaattctgcttgatatttgaaagttaaaatgtttcttctaaaatgttctaaaattcacatttttaaaattttggacttactgaaacttagtaaggttttactgtgaatactttcaaaactgtaaacagaaaaacatatatagctatataataacttttaaataacaagtctatttttaaattactaatttaaaggttttttttctcccttttgctagccagtctcagttggagggctgatagtaaaccttattggtatctgtgcctttagccatgcccatagccatgcccatggagcttctcaaggaagctgtcactcatctgatcacagccattcacatcatatgcatggacacagtgaccatgggcatggtcacagccacggatctgcgggtggaggcatgaatgctaacatgaggggtgagtccttgcaaaatattatcctacttttcgactgtgttctaaatcaaccctctgtgtttatttgtattaagttttgggcttctggtatgatatgatttttaaaaagcaatctgtgactaaaagaaaggtctgaagctatcactatagaaaatattcttacctgaatacacataaaattaaatattattcagcctttaaaaagagggacattctggctgggagcatggtggttcacgcctgttaatcccagcatttgggaggctgaggcgggagtaccacctgaggacaggagttcaagaccagcctggccaatatggtgaaaccctgtgcctactaaaaatacaaaaattagccggacatggtggcaggtgcttgtaatcccagctactcaggaggccgaggcagaagaatcgcttacaggtgtgagccaccatgcctggccgtcacagaaaattttttaaaaagaaaatgaggctgggaacagtggctcacatctgtaatcctagcactttgggatgccaaggtgggaggattgcttgaggtcagtagttcgagaccagcctggccaacatggtgaaactctatctctactaaatatacaaaacttagccaggtgtggtggcaggcgcctgtagtctcagctactcaggaggctgagacacgagaatcacttgaacctgggagatggaggttgcagtgagccaagattacgccactttactccagcctgggcaacagagtgagactctatccaaaacaaaaagaaaatgaaaatatatttgttcttaaatgttagtttttaaatgattataattatatagtccttttcatagtgacagctgaatagatactagttgcaaggtaaacacagtgtgctattatgaaccttcattacaaaaaggaaattcttactccttttttagaaatttttattgcactataaaaaaatggaggaagtactaatcatttattatgctgaattgtttattctgattgcttaatataagtaatgtgggtaatgtcaaaacttgcctcaagtatgatttttgggaagcctttccagacaaagtacaccataaaatttggcacgctgtgtcatgagtgcctatgtccttatatttttaccactgtattctgaattccttgagggcagtgaccatgttttaggcattttgaagtactagccagtagcagagtatgtggtgcacagtaggtatccagtaatattagtagaatgtattaaaaaactaaattagatgtgccttaatttttaatgtccttatatattttatttgtaggtgtatttctacatgttttggcagatactcttggcagcattggtgtgatcgtatccacagttcttatagagcagtttggatggttcatcgctgacccactctgttctctttttattgctatattaatatttctcagtgttgttccactgattaaagatgcctgccaggttctactcctgagattgccaccagaatatgaaaaagaactacatattgctttagaaaaggtactgtatgtaatttcttcactactttcttccttgaaaatcacatttttgaagtctttgctggaagtaaaacagacaaccaaataaataataaaacaaaacgaggccaaaaaagaaatataaagtagcatttaaaatttaataagttgacctaacaagaaatatgcaagatataaatgagaaaaatacagttttacttaaaggatataaaacagggaccgaatagatggatgagattttcttggatgagaagactctttattataatgatgttgattttattttatttagatttcaatttagttgccttcattggatatttttgtttatggtttgggatgttctaaaattatttggaacttacttggaagagttagcacttgagaataagaaaacatacataaacttacagaattaattaataggatcctactttgcaattataaagtagcagaattaagtgacaaaactaacagtttagatcgagaccatcctggctaacaaggtgaaaccccgtctctactaaaaatacaaaaaattagccgggcgtggtggcgggcacctgtagtcccagctactcgggaggctgaggcaggagaatggcgtgaacccgggaggcagagcttgcagtgagccgagaccacgccactacactccagcctgggtgacagagcgagactccacctcaaaaaaaaaaaaaaaaaaaacctaacagtttggtccttgcacaagaataaagacataaatcaacttttaaaaaaataataagttcccattcttgtgacctgggattgtttcctggacagcacaaaaaaaaaaatagtaacaataataataggttgtctgtaaaagaagaaataataaaaaatgaaaataaatgaagaattatggtatgtaatgtaaaagaagaaataaaaataggttgtccagaaacagacccaggagtttatggaattcagtatatagcaaagatggtattttagatcactggggagaaatagttgacctaaataaccagcttttggttaattacttctttactttgtggggaaaaaaaagctatatctctataccatattatataaaaatacatttccagtggattaaatatgtaaatgacaaaaaaattatgaaactactaaatagagaaatatttttgtttgtttgttttttgagacagtcttgctctgttgccaggctggagtggaggggcgcaatcccagctcactgcaacctccacctcccgggttcaagcgattctcctgcctcagcctcccaagttgctgggattacaggcctaccacacccagctaatttttgtattttagtagagatggggtttcgccatgttggccaggctggtcttgaactcctgacctcaagctatccacccaccttggcctcccaaagtgctgggattacaggtgtgagccactgcaccccgccagaaaaatatgtttataatcacaaagatagggaaagactttttaatatacttgaaaccagaggccaaaaagggaggataaaatttacaaatttgaccagttgaaaattgccagttggtggaagatttcattaacaagtataaaacataaaaggcagaccaggaaaaaacatttgcagcacatataaacaggcaaaggtttactgtccataattctttaagtcaagaaaaagacaatcttagctgtgcatggtggctcatgcctgtaatccagcactttgggaggctgaggtgagcagatcacctgaggccaggagttcaaggtcagcctggccaacatggtgaaagtccatctctactaaaaatacaaaaattagggtcgggcacggtggctcacgcctgtaatcccagcactttgggaggctgaggcaggcagatcacgaggtcaggtgattgagaccatcctggctaacatgatgaaaccccatctctactaaaaatataaaaaattagccgggcatggtggcgggcacctgtaatccaagctactcaggaggctgagtcagtagaatcgcttgaacccaggaggtggaggttgcagtgagctgagatcacaccatggcaacagagcgagactggcaacagagcgagactctgtccttccccacacacaaaaaaaaaaattaggcctggcacggtggctcaggcctgtaatcccagcactttgggaggccaaggctggcggatcacaaggtcaggagattgagaccatcctggctaacatggtgaaaccccgtctctactaaaaaaaaatacaaaaaattagccaggcaccgtggtggggcacctgtagtcccagctcctcgggaggctgaggcaggagaatggcatgaacctgggaggcggagcttgcagtgagccgagatcacgccactgcactccagcccgggccacagagcgagactccgtctcaaaaaaaaaaaaaaaaaaaaaattagctgggtgtagtagtagtgcacacctgtaatcccaactacctgagtggctgaagcatgagaatcacttcaacccaggaggcagaggttgcagtgagccaaaaatcacaccactgtactccagcctgggcaacagagcaagactgtctcaaaggaaaaacagtcatgtagaaaaataagatgagaatataaaccagcaattcctagaaataaacaaatataaaatagactctctttcacctcgtggtttactacatcatattaaagtaattgggatctgctgatgaaaagatagcatcttgaatatttaagttctatcatcttaacccattgttttcataaataaaattagtaaagttatctcacctcatagttagtggatagtagtacatcatggggtttttttaagtttttgtttgtttgttttgtttttaaatagagctggggtttctcaatgttgcccgggctggtcttgaaatcctgagctcaagcttcggccttccaaagtgagggattatgggcgtgagccaccgcgcctggcctaaagtattttttatttcaataataatatatgtctgttgtaggccgggcgtggcggctcacacctgtaatcccagaactttgggaggccgaggcgggcggatcacaaggtcaggagtttgagaccagcctggtcaatatggtgaaaccccatctctactaaaactacaaaaaatacaaaaattagctgggcgtggtggcacgtgcctgtagtcccagctattcgggaggctgaggcagaagaatcgcttgaacccaggaggcagaggttgcagtgagccgagatcacaccactgcactccagcctgggcgacagagtgagactctgtcttaaaaaaacaaacaaacaaacaacaacaagcaacaaaaaaaatatatatatatatatgtatatatatccattgcagaaaacttcaaaatatagaaaagtgcaaaaaagaaaaaaaaaatcacataattttaccacctggaaagaaatactttttgtttccttcccattctacaaaaagccatgtaaagaaacatttttacaagttgtttccatattaaaattttgaaaataaaaatggcaaaaaactttcgtaatgttttataaattttctccccacttaataatgtcatgttgattaatattctaatacattgttaatgactgcattattacattgtatgggcagtcaatcatttatttaaccaatcctctgttgttgaacattgaggatatcttttgaatgtgttatctctatataacaaataatgtgcatatgaatgtgtccgtgtaaaggagaacttgtagttcattgactgtgtctaggtcatgattagaataggcagagttgtgctgtatcagggaaaataagggtactgctattgataagagcccattttaggtataaagataactgtaacagctgggcacggtggtccacacctataatcctagcacttcgggaggccaaggtgggtggattgcctgaactcaggagttcgagaccagcctgggcaacacggtgaaaccccatctgtactaaaatacaaaaaaataaaaataaaaaaaaaatttagccaggcgtggtggcgtgcacctgtagtcagctacttgggaggctgaggcaggagaattgcctgaacctgggaggctgaggttgcagtgagccaagatggtgccactgcactccagcctgcgacagagcaagactgtctcaaaaaaaacaaaaacgaacaaaataaagatacctgtaacacccatttgccttcctactcagagctgccatactagcatcattcctaggtgagattttttttcccccacacatctgtagcctccagaaatagatcagaatattttaggcacctttactttaagctattttcccatctcctattccttcctgcttctggcttctcattatggctggttttttgtttgttttgttttgtattttaaagagcttaatagtgatcctggaccaaggaatctgtgtgtttactttctgtcagaaagcatctccatngtgttgtgtaaagtagcctgtatgaccatttatatcacctcttttatttgacagatacagaaaattgaaggattaatatcataccgagaccctcatttttggcgtcattctgctagtattgtggcaggaacaattcatatacaggtgacatctgatgtgctagaacaaagaatagtacagcaggtaatcttttgtttttaaagtaattttaattgaggtcattcatacccaaaattgtacacctcataagttatatggctcagtagtcatttactattcagaaatatcaatcttccaactcttttttttttttttttttttgagacagggtctcactctgttgcccaggctggagtgcagtggcgtgatctcggcccactgcaacctccgcctcctgggttcaagcagtctccctgcctcagcctcccaagtcgctgggattataggcacccgtcaccatgcccacctatttttgtttgtttgtttgtatttttagtagagatggggtttcgccatgttggccagtctagtctcaaactcctgacctcaggtgatccgcctgcctcgacctcccaaagtgctgggtttataggcaagccatcatgcccggcctaatcttccaaatctgtaacggtaatatagcttactttttacatctagatttgttttatatctaaaaatagctaaaataaatgaagttttgtgtttagaggataagctttaattaatataaaaaaattcatttatgagtttgattaatcttggtttccagtagattatcaaaaaataagttattataaatatattcctaaattagtaataatcaacttggcagggtatatgctatgtttggagatagaggtcagaatagttactaaagccctgttctagatgtgccaaattggaaacaatggctgttttccttttctactgtgaatgtcaaatcagtaatttactgacctaaaagagtctaatattttaactaactaaatgatgaatattacttcgaagatttatcttggactactgtaactgtttgtttgtttgtttactcattcattttagagacaagatctcactatgttgcccaggctggtctcaaactcctgggctcaagcgatcctcctgcctcagcctccctgggccactgtgcctggcctgtaactattttaaaaatgtgacacaggtttaatattccttatctaaaatgcttggaaccagaagtgttttcgatttgcgattttattttttttaatacttgcattacgcttaccagttgagcatccctaatctgaaaatccaaatccaaaatgctccaatgagcatttccttttaacaccatcttggcactcaaaaagtttcagattttagagcgtctcagatttcgtattttcagattaaagatactcaacccgtatcaactatgtacagcatattaagacgtgtgtactaaatgcattactctaaatgcttcaaaatatctggatttttataacaggttacaggaatacttaaagatgctggagtaaacaatttaacaattcaagtggaaaaggaggcatactttcaacatatgtctggcctaagtactggatttcatgatgttctggctatgacaaaacaaatggaatccatgaaatactgcaaagatggtacttacatcatgtgagataactcaagaattacccctggagaataaacaatgaagattaaatgactcagtatttgtaatattgccagaaggataaaaattacacattaactgtacagaaacagagttccctactactggatcaaggaatctttcttgaaggaaatttaaatacagaatgaaacattaatggtaaaagtggagtaattatttaaattatgtgtataaaaggaatcaaattttgagtaaacatgatgtattacatcatcttcaaaaatagatatgatggattctagtgaagaccaaaattacttctgtttactttctatcaggaagcatctccattgtaaatatgtatttacatgtttattacaaagacccaaatgaaaaatttttagtccattttttgcatagcctaaagataaaataggaataaaagttctatatttatggattttctgtatataaaactggtttctaattataacttaagtccattaagtaaaatctgtattgccactttaaatgtaaactaaattatttgggagaaacttcaaccactgatatgagataagcatgagaatagggaagtgtataacatcacagtttttgatgtattacaaaaatcaaccactctataaaataaattttttttacttttggtaatatttgcaaatgaataattaatttattagggtaaagaacttatactaagttgtgtccatgttattcatttacttaccatgttcctttaaagtagaatatttcctttcttgttatatatttgacattccagctgcttatcaagctggtatccaagcagtggtaagctttcatcctttcttagctccataacgttgtgaaacagccagttaagagaatcgtaaataattgtcaactcacagttgaattctctgcctatgtaggtaacttttttctaatttctggaacatatagatatataagaaatatcaagaataggtagttatttcaagtttaataagtaaaacttgttcataaacatttgagcaccatgaaatcaaataccctataactactttctatagtcatatctaatttatattgttttcatttccagttg

SEQ ID NO: 2669 - DNA, 369 bp, Homo sapiens
attttataacctagtttattatttttatagacatataaacaaaaccatttttaaatagtttctaaaatggatttatcttagttttttacaatttaatagtttgtaaaatgggtttatcttagtttttacaatttgtgtgaaatagggtttctaatgtaagtggcagttaaataactaaacaattatagcagatcttcaagtaaatttggataattaagggttaaaatcctcctaattgaaacagtgcccaacatactcctcccttttttttggtgacatttttagctttttacctttgtggaattattctatggcgtgctgaccaatagtctgggcctgatctcggatggattccacatgctttttgac

SEQ ID NO: 2670 - DNA, 8207 bp, Homo sapiens
cttggttttctctcattatgccttttgcaacggttatcttttttgtcatgatcctggatttctacgtggattccatttgttcagtcaaaatggaagtttccaaatgtgctcgttatggatcctttcccatttttattagtgctctcctttttggaaatttttggacacatccaataacagaccagcttcgggctatgaacaaagcagcacaccaggagagcactgaacacgtcctgtctggaggagtggtagtgagtgctatattcttcattttgtgtaagcattccccccttttttttattttaacaaatttctatttatggattttgatggtcacatcatttacttattttgggaaattcttcagtgcttgcatttagtgccgacagttactgtgttggttttggtagcttaaacttcgaaaatttaaacaatattgttttttctctttgtagctgccaatatcttatcatctccctctaagagaggacaaaaggtacccttattggatattctcctgaaggaacacctctttataacttcatgggtgatgcttttcagcatagctctcaatcgatccctaggtttattaaggaatcactaaaacaaattcttgaggagagtgactctaggcagatcttttacttcttgtgcttgaatctggtaagatttttaaatgttaattgacatatcctaaaagcataatattttaattttgacagttctggtataagtttagtacttcccaaatttctgataataagatgagctaaaatttaaattttttctaagtataatagcaagattacgagatcatattcagattccttaggcaatccttaaggcatgtgccaccgtgcccagccacttaagcaaacaatttgtgaggcattttagaagcattgatttagtatgttccttcaaatcagtaaatatagtagcatttaaagagttctaataacttacaggatctcactattagcaatcagtgttataaatcacctattgctaacattttataacctagtttattatttttatagacatataaacaaaaccatttttaaatagtttctaaaatggatttatcttagttttttacaatttaatagtttgtaaaatgggtttatcttagtttttacaatttgtgtgaaatagggtttctaatgtaagtggcagttaaataactaaacaattatagcagatcttcaagtaaatttggataattaagggttaaaatcctcctaattgaaacagtgcccaacatactcctccctttttttttggtgacatttttagctttttacctttgtggaattattctatggcgtgctgaccaatagtctgggcctgatctcggatggattccacatgctttttgactgctctgctttagtcatgggactttttgctgccctgatgagtaggtggaaagccactcggattttctcctatgggtaggtacattgactgtcgaggtggtatatcttaagtgcaaattccatcttaaggaacagaattatattacttatattacttttaatacaaataatttccaaatcttcatttttaaaaaatgtgaagtaaataaggggatgtgaatcgggcatttgataaatactgaatggaattaatgctcaaagattatgctcccttggccgagcacagtggctcacgcctgtaatcctagcactttgggaggccaaggcaggcggatcacctgaggtcaggagttcgagaccagcctggccaacatggtgaaacctcgtctctactaaaaatacaaaaattagccgggtatggtggcacgcacctgtagccccagctactcgggaggttgaggcaggagaatcgcttgaacccagaaggcagaggttgcagtgagccaagatcgtgccactgcactccagcctgggcaacagagtgagactatgtctcaaaaaaaaaaaagacagggccaggtgcggtggctcacgcctgtaatcccagcactttgggaggccgaggcgggcggatcacagggtcaggagatcgagaccatcctggctaacacggtgaaacccccgtctctactaaaaatacaaaaaaaattagccgggcgtagtggcaggcacctgtagtcccagctactcgggaggctgaagcaggagaatggtgtgaacccaggaggcggagctttcagtgagccaagatcgtgccactgcactccagcctgggtgacagagcaagactctgtctcaaaaaaaaaaaaaaaagagagtaaagaaggactttgatgaatatataacattttaacaaatgtatatattcgttaaaatgttatatattcatatataacgtatatatattcatatataacgtgtatatatatgtgtatatatatatatgtatatatatatgaaggaccttccaggcattaatatgatatttaaaatattgctaattttctattattaattacttagtagtatgaaaatttggacttgtttcctcatttataaagtttatactttaaaaatatttgtccttttccttttctgaaaaatgttctatgtttttaggtacggccgaatagaaattctgtctggatttattaatggactttttctaatagtaatagcgttttttgtgtttatggagtcagtggctagattgattgatcctccagaattagacactcacatgttaacagtaagtctttttattttcctatttggatttctagtcatacttacatagttttttctatcctaaagtttaattgtttgcagttattgctctaagaaggttttattttttacttatatcaacataacttcctatcttgctgtttacatttatactgctccctcttagaaattctctttttttttttttttttttttgagacagagtctctgttttccaggctggagtgcagtggcatgatctcagctcactgcagcctccacctctcaggctcaagcgattctcgtgcctcagcctcctgagtagctgggattacaggcatgtgccaccaccccctgctaaattttgtatattttgtatagatagagtttcgccatgttggccaggctggtctcgaactactgacctcaagcaatcctcccaccttggcatcccaaagtgctgggattacaggcatgagccactgtgcccggccagctatagcaacttttaatgttctccctgtaccaccaaagctttacatgtgctgtttcttgtagttggcatgtcctttccttacttctgcccttcagcctccatcaagattttgcttatgtgaaatactttttttcttttctttttttcttttttttcaagcaattctcctgtctcagcttcccgagtagctgggactacaggcgcctgccaccacgcctgcctaatttttggaaatactttcttttaatccccctcttctctccacaaagtttgttagattccttttctcagtattctcattatgttttgtgcattcttcttttagcaacattgagttgcagttgtttaatttgtcattcttccacaattaagatatgtaagtatcttcaggacctgaattacatattattaactcttaagttcagttctagcacctggcttgtcgtaggaaatcagttgttaaatgacaaaaagcagctctggctcttgctggtggaagcatacatgagtaaaatgtttctataatacagtttggaaaaatagacttttttggattttttagtgcctgtatcctttgatattgactatttatcatacataaacattcacacaaacatatagaagtacatgactctggccgggtgcagtggctcacgcctgtaatcccagcactttgggaggccgaggtggttggatcacctgaggtcaggagtttgagaccagtctggtcaacatagtgaaaccccatctctactaaaaatacaaaaattagccgggcatgatggcgcacacctgtaatcccagctagttgggaggctgaggcaggagaatcacttcaaccacgaggcagaggcttcagtgagcccaggttgcaccaactgtactccagcctgggtgatagagagactctgcctcaaaaaaaaaaaaaaaaaaaagtagtacatgattcattgtacccttatttataatagtgaaaaaatggaaacaattcactgtccaccagtgaaaaaagtaattaaataaatttgttatctatataatagaatattacagagctattgaaaagaatgagatatatctgtatatactggcctgaaaatatttacgagatgtactagtgaaaaacaaattgcaggccatgcatggtggcgggcgcctgtaatcccagctgcttgggtggctgaggtaggagaattgcttgaacctgggaggcagaggttgcaataagccgagatcatgccactgcactccagcctggttgacagagcaaaactctgtctcaaaatgaaaaaaaaaaaattgtaaaatagtattatgattacattgttggttttaaagggtgttatgtgtatgtatgttagtacacagatggaaaatacaccattttaagcgtgactaacccttggtggtagaattataggggactttcatcttctacatttttattttcctgataaaatacacaatgatgaagtatttttcagtaggggagaaggagtacttatgagatgatggagtctctgtaagcagtacttggtttcattcaaagtcattaaccatctaccagcttataaagcctaatgaaattttaaaatctggagtcaaatggtccgaatcaggaagaagtaaataacctccctacacatttaataaagtaaatctcttactacttttgaaaagtaattaaaagtatttgtccttctcatatttatattttccttttataaaacaaatggattgctttaaattgtagatgtaggcaaattaacaccctgagctactactattcaagatcattttgtaagagcagataatcaaggataagtaactttgtttatcctttggagtattattgtggcaccattaaattaaagtaatttcattcactttgttaagaaaaaaatgagaggccaggcatagtggctcatgcctgtaatcccataatcccaacacttttggaggccaaggtgagaagatcgcttgagcccaggagtttgaggacagcctgggcaacatagaccctgtctctaccaaagaaaaaaatttgtttttaatttaaataaatgcgagattactattgtatgtttcctttttattatacttgttttactttggaaaattttactgtgtttaagacataataagaccatatttggaatctgctcattaataaattataattgttggcatataaactgttcaaatttacctagcaatataaagatttcaggtacagtgtatacttgccctagtaagcagtactttcaaactcttcaataaacaaaacaaaactttgcatcatttatttatacataaaccataaaccaagtacataccattcttaattgaaataagtccaaattcctctacttaccaattctgcttgatatttgaaagttaaaatgtttcttctaaaatgttctaaaattcacatttttaaaattttggacttactgaaacttagtaaggttttactgtgaatactttcaaaactgtaaacagaaaaacatatatagctatataataacttttaaataacaagtctatttttaaattactaatttaaaggttttttttctcccttttgctagccagtctcagttggagggctgatagtaaaccttattggtatctgtgcctttagccatgcccatagccatgcccatggagcttctcaaggaagctgtcactcatctgatcacagccattcacaccatatgcatggacacagtgaccatgggcatggtcacagccacggatctgcgggtggaggcatgaatgctaacatgaggggtgagtccttgcaaaatattatcctacttttcaactgtgttctaaatcaaccctctgtgtttatttgtattaagtatttgggcttctggtatgatatgatttttaaaaagcaatctgtgactaaaagaaaggtctgaagctatcactatagaaaatattcttacctgaatacacataaaattaaatattattcagcctttaaaaagagggacattctggctgggagcatggtggttcacgcctgttaatcccagcaatttgggaggctgaggcgggagtaccacctgaggacaggagttcaagaccagcctggccaatatggtgaaaccctgtgcctactaaaaatacaaaaattagccggacatggtggcaggtgcttgtaatcccagctactcaggaggccgaggcagaagaatcgcttacaggtgtgagccaccatgcctggccgtcacagaaaattttttaaaaagaaaatgaggctgggaacagtggctcacatctgtaatcctagcactttgggaggccaaggtgggtggatcacctgaggtcaggagttcgagaccagtctctccaacatggtgaaaccctgtctctactaaaaatacataacttagccaggtgtggtggcaggcgcctgtagtctcagctactcaggaggctgagacacgagaatcacttgaacctgggagatggaggttgcagtgagccaagattacgccactttactccagcctgggcaacagagtgagactctatccaaaacaaaaagaaaatgaaaatatatttgttcttaaatgttagtttttaaatgattataattatatagtccttttcatagtgacagctgaatagatattagttgcaaggtaaacacagtgtgctattatgaaccttcattacaaaaaggaaattcttactccttttttagaaatttttattgcactataaaaaaaatggaggaagtactaatcatttattttgctgaattgtttattctgattgcttaatataagtaatgtgggtaatgtcaaaacttgcctcaagtatgatttttgggaagcctttccagacaaagtacaccataaaatttggcacgctgtgtcatgagtgcctatgtccttatatttttaccactgtattctgaattccttgagggcagtgaccatgttttaggcattttgaagtactagccagtagcagagtatgtggtgcacagtaggtatccagtaatattagtagaatgtattaaaaaactaaattagatgtgccttaatttttaatgtccttatatattttatttgtaggtgtatttctacatgttttggcagatacacttggcagcattggtgtgatcgtatccacagttcttatagagcagtttggatggttcatcgctgacccactctgttctctttttattgctatattaatatttctcagtgttgttccactgattaaagatgcctgccaggttctactcctgagattgccaccagaatatgaaaaagaactacatattgctttagaaaaggtactgtatgtaatttcttcactactttcttccttgaaaatcacatttttgaagtctttgctggaagtaaaacagacaaccaaataaataataaaacaaaacgaggccaaaaaagaaatataaagtagcatttaaaatttaataagttgacctaacaagaaatatgcaagatataaatgagaaaaatacagttttacttaaaggatataaaacagggaccgaatagatggatgagattttcttggatgagaagactctttattataatgatgttgattttattttatttagatttcaatttagttgccttcattggatatttttgtttatggtttgggatgttctaaaattatttggaacttacttggaagagttagcgcttgagaataagaaaacatacataaacttacagaattaattaataggatcctactttgcaattataaagtagcagaattaagtgacaaaactaacagtttagatcgagaccatcctggctaacaaggtgaaaccccgtctctactaaaaatacaaaaaattagccgggcgtggtggcgggcacctgtagtcccagctactcgggaggctgaggcaggagaatggcgtgaacccgggaggcagagcttgcagtgagccgagaccacgccactacacttcagcctgggtgacagagcgagactccacctcaaaaaaaaaaaaaaaaaacctaacagtttgg

SEQ ID NO: 2671 - DNA, 294 bp, Homo sapiens
ccaggtgcggtggctcacgcctgtaatcccagcactttgggaggccgaggcgggcggatcacagggtcaggagatcgagaccatcctggctaacacggtgaaaccccgtctctactaaaaatacaaaaaaaattagccgggcgtagtggcaggcacctgtagtcccagctactcgggaggctgaagcaggagaatggtgtgaacccaggaggcggagctttcagtgagccaagatcgtgccactgcactccagcctgggtgacagagcaagactctgtttcaaaaaaaaaaaaa

SEQ ID NO: 2672 - DNA, 105 bp, Homo sapiens
aggctgaggcaggagaatcacttgaacccgggaggccgaggttgcagtgagccaaggtcgcgctattgcactccagcctgggcaacaaaagcgaaactctgtctc

SEQ ID NO: 2673 - DNA, 105 bp, Homo sapiens; identical to SEQ ID NO: 2672

SEQ ID NO: 2674 - DNA, 665 bp, Homo sapiens
cttggttttctctcattatgccttttgcaacggttatcttttttgtcatgatcctggatttctacgtggattccatttgttcagtcaaaatggaagtttccaaatgtgctcgttatggatcctttcccatttttattagtgctctcctttttggaaatttttggacacatccaataacagaccagcttcgggctatgaacaaagcagcacaccaggagagcactgaacacgtcctgtctggaggagtggtagtgagtgctatattcttcattttgtgtaagcatttccccccttttttttattttaacaaatttctatttatggattttgatggtcacatcatttacttattttgggaaattcttcagtgcttgcatttagtgccgacagttactgtgttggttttggtagcttaaacttcgaaaatttaaacaatattgttttttctctttgtagctgccaatatcttatcatctccctctaagagaggacaaaaaggtacccttattggatattctcctgaaggaacacctctttataacttcatgggtgatgcttttcagcatagctctcaatcgatccctaggtttattaaggaatcactaaaacaaattcttgaggagagtgactctaggcagatcttttacttcttgtgcttgaatctg

SEQ ID NO: 2675 - DNA, 472 bp, Homo sapiens
gagctgatgtgcccttcttactaccttacaaaaaaggccagcttctttttaattaagtctcatttgtttaaaccagggattgacattttggttaaaccattggttggcaaattatgacccattggctgattgcctatttttgtaagtaaagtgttactgaaacacagccacgtattgactgtggctgccttcatgctatgacagagttgagtaattgtgacggagactatatggcctgcaggtcttaaatatttactctctggccctttaggtttggtgatgccgtttaaagcacctaacatgaattttctgttacttgtagccagacacattcctaatggaatcaaccaataaccaagatccttaaacaaattagtgacttggcatttcttcctactcaaattactcttttctggttaagtaggtgtgctccagataagcatattcctcattttggactttatctactcct

SEQ ID NO: 2676 - DNA, 472 bp, Homo sapiens; identical to SEQ ID NO: 2675

SEQ ID NO: 2677 - DNA, 9543 bp, Homo sapiens
ttaaataagctgcttctctttccactgtttattattaatgtacaaaatatacaaaaccaaaaaaaaaaaatactcatcctcaaatgcattttggctctaacccaagaccctgcacaaaacccaaccaatccactgttttcatagaaaacaactgatgccaaagtgaaggagagaactgggaaagggcaaaatcatcttgttgaatccacccaggaaggcgcctggtggggattcagaggtggttgacagggtgaagtacctggaagcctccttcacgctggcaaggttccaggtgggagcagggagtgagctgactcccaaaggcagtgcatgtagtgtgactttcaggcccagcacgccgggcccaagttgatgagaagctggtctcactgaagtattttatcaagtctccagactggctatagttggcaaaggcagaccagcaccaccggtctcacctctgccagctaaaacttgcaccggatgcagatacgagttcgccatcatcgaacctagcagacccaggacgcagactgggtgttcacagaaagttgaaggtcccacttgagaaaggactaagaatggtgagcccacgctgggggaggggtggggatgatgtgtgttccagaactcaaatccagctgattgagccctctcagtgcagtgggatatacaatacccctttcagcatctccccaccccatgaggaataatgaacttagctgggatgatttcttaagtgcagctgatcctgtgtcagagttctgtgtgcatgtggggacccgcaatagaagggtaggggtgttcgccaggataaccagctttaggttctcaagcattaagggtaatactggaaaggggtttggggtacagggcgaatcttctcaaaaagtgaagccaactgggtctcctcttcagcagtccaggaacgtttccagtctctctcctccccagactggaggaaaatatgtacatcaatgcgcaccagtgatcagaaaacccccaggaacccaagcaagtgggaactgagggggccggctcctcatcagctggggaaaagggaaaatgggcctcacagaagccataacagggtggaaagagcgaggctgcagtccacaggggttgtgtgaacagggcaggcaaatggtccctagggcagggggggcccattgacacccgggtggtagaaggcacagttgttctcatagcggcagttgcccttcatcatgaaatgtcggcagacagggcggtttgacatgtctgtgggaacgatggcaaaacagttagacaggaaatagctgagggcaatgccaccctcaccaccccttgtccatgacatcctgagaactgtctttcagagacaatcttggggatttgggggaagggcatagagtaggaactgctatgcatactaggacatcaaagagacgggtacctcacgttctgcctagctaccaacagtagtgactctcacccactccccaaaagcttgtatgggacaaccaaaaggcatatgggggacagggagcatcctcacctcctccatggctgtggcctccatcgtgccctcggtggccccctcccccgtggccaggaccatcatggccacggtgctcatgaggtggcggccctcgatggtcatggcctcggtgaccagggacatcatgaggccggtggccatggggccccccgtgtccagggccttcatggggacgatgtccaccacttccacccatgcttccgccagggccttcgtgggggcgatgtccaccaccggcacccattcctccgccagggccttcatggggacgatggccactgccaccactgatgccaccgccagggccttcgtggggacgatgtcctccacccccacccatgctaccaccagggccttcatgggggcgatgcccacttcccatgccaccgccagggccttcgtggggacgatgtccactgctgttgcccatgcccccaccagggccttcgtgaggacgatgcccaccacctccaaccatgcccccaccagggccccctcgtccatttgggggtcctcctccagagcgacctcctctggcgcctcggaatggaggaggaggaggaggaggttcgtttcctcctcggccacctcggcctctatggtatggtccaggacctggtcctggacccccccgcattgggccaccccgcatagggtcgcccgggccatcccagaagggatcacctccccggggagggggtggaggacccagaagacgtggacccactggcccaccagggcctccatggggacctgtaaggggacaaaaaagagagacagtatcagctaccaggaactgccatctcccaacctaaaccaccacctcccaccttccagtcaatcctatactattatcagactgaaattaagcagataagcccattccaaccttttactcaccacctacctggcataggtcccccaggtccagggggaaagtgctgcatgcccttggggcccccaggaccccctggtgggaaaccattggctattgggccagggcctaggagtccatgtggcactgttaatgaaaacaagagtaacacagcatgagcactctagaagactagcatgatctcccatttaggtgcaaccaactgaccctctcaaaccaacctggcagagcaatgctctctctgtccagtcttcccctcccatttcttgcctagtggccacagccctgtattcttctgcatctttgaaaccctgcttcccccaactccactgcaggcttcctcccccagtcccctggggctggccctgaagattacccagcatctgcttgatcttgtccgaatagtctggttgtttcagtagttcctctgaaggatgactgtttgggctaccctgtgaggatgtaagaaggcaaagtcaacagacagaaagggtaacaaccatggcgaaagatagcgccaaagattaggggtaagtgggtagatgtggagaactggggtaaggcgaatgggagacagtgaggagagcgagcttaaggaggctccacagaaggtggaaaaggggaaggagggtgcgtaccatgatggaggtgaggatctcttggacattaatgcctcctcctccagggccttgggggccctttccagcacccatgcttcccataagattggccagaactggaggcaacttggagcctcctgccccatcaggtgagccacctgaccccccaggttccagagtctcaacatacggagtctcatccatggaacactcctgaaagaagaacaaaaaaaatcaggattgacagaacagagacattctcatatgaaagatgcaccgaattcaatgaccatcacaacttccatcatcacagaacattgacttacctcatctagggggatgagtttagggggtatgggctcgtagggctcaggatcaggctcatgaggactatcaggaacaacacaggtgagagaaaaaagaatgatagtcaagttattaattcagaccctgaaagtaatttctaacctccaccccgtaattaccccagctcatgttccctcaggagtgtccaagcactcaacatcccagggcacgaaccccactctgctcacctctccttgttcaggaagagctcctgaaggattcccttctcccgctcagcctggatatatcgctcctgactattgcttccaggggtgacaagaggtgagggcagaaccaggggccgggggcacacccagggcaccttctcctccatgttatcatggctcagacgccgcgctgtctcaaatgcatgtcggtctgacagtatctctcgcttagccgcctcaccaaagtccttgatcttattcacatttactgtcggcaggggaagaaaagcaagagggaaagtaagcacaaccaagtcctttcaaaatcccttaaacacacctattacgtaggaaatgacctcttacctcgttcagtttcatccaattcaaaatagaaatattctctcagtttgccttcctcaggccatgtcacacttttcctcttcctgcctttccgggtcagttggttaggatctccaggactctccactggcttggcatccagagctcctggctccaaagaggctggaagcagaagaggtttcagacccagatccctcctttcagaaaaccccccaaactgaaccagtttctagattacctgtatccatgagctccgggacttcaacagggggaaccggggtgcctggacggtctgcgtccattgcctcagaaggtggtgctggttctggggaagaaggtttggctgtgcttggttctgtgctcgttttcccttcaaaggggcttggctattgtgaaagaaaaggaagttaatgaactgactggaaagccaagggcaaggcaattagtccagggtcccaggcacagtcccccaacagttcctatataaaggaagactctgtctccacaatgtctcacctgcaccagtctatatccaaggcaaaacgcctcttgttgtcctccccgacaactcctagctgctgtgccctttcttctactttaccttttatactctgtcactgaaacctacttctgggagcccataccttggcagccgtaggtgacagtactttttttttcttcttaattttgatgcctggaacaggggctgaattaagagcatccagaaagcccaggccctccatagctacaaaaagaaagagcaccaaatggcatcatcagacctccttcataatcctacacctgcaaacacagtccaggcataaaatgagccagtgaagaccctgcctcaacttaggacacgataagctcaagaggaccaggaagcacatgcaggaggattcacacaggatattcttgttgttattctaggtttctcatggcaggcaagccatagctttggatgtgaattatagctcaggtagctgacgaagtgagcccttgtgaacatgacagatcaccttaccaggtgcccctgaccagtcacagaatggcacacgtccctatcttatctctaaaattactcctaagtgacccctgaaacgggagttccagaggtacaaaaagtaagggataccaagaaatcaaaggaaaatggagggaaataataaaagagaagggaaaaaacttctcgttcccagggacattcattcccataagagtttgctcctggccaggtgcggtggctcatgcctgtaatcccagcactttgggaagctgaggtgggtggatcacgaggtcaggaaatcaagaccatcctggctaacatggtgaaaccccatctctactaaaaatacaaaaaattagccgggcgtggtggcgggcaccagtagtcccagctactcgggaggctgaggcaggagaatggcgtgaacccgggaggcggagcttgcagtgagccaagaccgtgccactgcactccagcctgggtgacagagtgagactctgtctccaaaaaaaaaaaaaaaaaagtttgctcctaattcaaagtacatcttccccactttagactcacgctgtggcgggatgatcttcactttgatctctttggtggcattaggtgttgtgttgagtggcttgtatttcttctctgcagggggagtggcatctcctggagcagctacgttgctgtcagaagaggaactgtcatcaacatctccgactcaccccctcctgctcccttgtgtccacagatccaccccattcagagcctgagaatatggtccatacctctgacgtttgagggggatgggtttaaggttgtacttgtcagaaaccaccactgtgctggcattcttcttcacaggcaccaaggatggtgtctccagctctagtcctggggaaagaagcacggtgtgggcagctgaactcaaaccccagacccccgaattttcctcccgttctcacccgcaaatgttcttctagccttgtaaccaaagcttcctctgctagtcttccctcttccttacgattaacataccacacatcaaatgattcccccataaggctctgggtgtgcacatgcccatgaaccctccagaggccagccgccagtcttaccagtggaacggaacttggcatgactgggtgctgtggtgcgaagagacttgggcttctccctcttcttctctggggcctcctcagcccgggtctcagccttcacctctgtcaaaggtcgctcaggaagggtagttcgactttttccttcatctttacgtttcttcttatctttctctgttgtgaaaaaacaaagcagaaaaggattttatttagatgaacactgtcagaggtgaagcagactgggagcacctaaaggccacatcccaataggaaagaaataaatacaaaggataaaggactaaggagcttaccagcaggctgggtactgctctgagagcggatgacagccatccagtcgctgacaaggactgaggccaatttccggagctctgcaggtgacagaaaggggaaatgcctaaataatgtaaagtaacattcttccaggaacagaaaatgggaggtttgagaaaatattgtgaaaatttatgtaacggagaaagtaacccaaagttttaagaagaacatgagatatgcttaaaaaccaaacccttaaaaaatggaacaatgaattagagttgtgttctacttggataactttcaactctgatgtcatcacaccactctggagtaaaaagacctaatatttcagaatatgtggttaaaatctacattagtaaaagactacacgttgggtgcagtgtacactgcttgggtgatgagtgtaccaaaatctcagaaatcaccattaaagaacttatacatgtaaccaaaatccaccagttcctcaaaaactgacatttttttaaaaagctacgttagttgctttatgtataacacacctaattgttacaacaatctgaagactttttattttcctttatagatgtgaaaacaagaataaaatttgtttctaaatatatgaaaaaatactttgtaactctttccttttgtacttggcaaataacatctctgatctatggcacctctcttctggccaacatttccacttataaactcatttcataatttatcatttagtaataggagtttcacagatgagacacgctaggatgatactatttcccacagcaaattttaagtgtatgtgttttataacaagcaattttaggaatcagcttccagttaaagtatggcaccttatattcagcaacagagaaatgaacaactttggaattgagaacaggaaagagggtacaggttagaggaactttctctttaaaagaaggaaaaaaagcaaggtgaggtagaaagagaaaagtgaagggacaatccaaggatgggaaaagatattaaggtaattaagtggaagtaatagagaaaagcccatgagagagcagaagtggcaccctaccttcatcctcacttgacttgctcagctgcttcaccagtttagctgtgttgttctatgagagatgggagcagcagaaaggtaaatgccaggaggcaaataattccacttagagctaaaaacgacaaaagttacagtcctccctgcttttttttttttttttattttttgagacggagtctcactctgttgcccaggctagagtgcagtggcgcagtcttggctcactgcagcctcgacctcccaggctcaaatgattctcccacctgagcctcctaaataactgagactacaggcatgcaccaccacatctgggtaaattttttgtattttttgtagagacagagttttatcatttttgcccacgctggtcttgaactactgggctcaagcaatccacccacctcagcatcccaaagtgttgggattacaggtgtgagccaccacacctggctgacacattccttttttttttttttttttgagacgaagtctcactctgtcgcccaggctggagtgcagtggtgcgatctcggctcacaataacctccacctcctgggttcaagcgattctccagcctcagcctcctgattagctgggactacaggcgcatgccaccatgcctggctaattttttgtatttttagtggagacggggtttcaccacgtcagccaggatggtctcagtctcctgacctcatgatccgcccgcctcagcctctcaaagtgctgggatcacaggcgtgagccaccgtgcccagccgccacacacctattaaaggagataaattcaaaccaagtcttcttcttctaaattcctattttttttctgctgttctacctcacaggcccaagattacagccacatcagtcagtttgagtttttcatccattagactaaaccaaaaaaggaagaatcagggtttaaagactaaaggtacctgcttgagatggtctacagtgagcggtagatgctgcagggtcagtagaatttgctggaggaggggaatgttgttggttgtctttgaatacgtcagccaattgttaagaagtttgtagccgccaacgtcaataaatctgcaggcaggcaggagagtctatcagtaatgccctttctaggttttgacagtaccacatcctacaatcccagtctcccatcaatgaccgaggaaccccatgcctcaccgccccatcttttcgctacaccttcccattccaaccatccagatccccacttacttgaccaatatttctggtgaacgggtctgcaggagaatgttcaagtaagtgcatcgactcaccatctttcgtgcttccttcatcaaactgcagaagatgagttagggttagaaatgaagcagccagtatctcttctcttagcaaaagcgcctctctgtgaactgcctagagattcctaatgacttgggactttgctccagagaaggggagtcacatatacctctaggaagatgggatggatccagtgtgacatggaaacttatgggagaacagagacaccgcagtctctgacctggggaggagagcatcgctgcctccgtaacacacaggatgaattccattctgcctccaggtgataaggctatccctcaacaactgtccctaatagtctgttcaagactggcttagttatttactctcccctgaaaaacctgagaatccctgaaggaaaataacattatgggtaggtggaacacgaaccaaaacaatctagaattctgttaccaggctaccctgctctcattccaaagcatgactcccttgggaccgtggacgtccaaatctccagtttccattatggtcagaaacaagtgatcatcttttcctatcccttatcctaaaattgttacattttaatcctattgcactgactatctttccctttcctttccaggatcattccagtgtgcctcaactgcagccatgttttaacacacaatattctctactcacagtgaatacaaaaaggggtaaagactcacctgaagatcttggaaatcccatccacacttttgacttccccatctcggttaaggaagctgtccaggcccttgagaagttctttggggtctatgggacccgaacc

SEQ ID NO: 2678 - DNA, 26591 bp, Homo sapiens
cctagagggcacgatagccaggataggactgttctaggaacacacacgaggcgtgttaaagaagactcagaaagatgaaaaccaggaaagagccctgtggccgagatctactctgtatcctagagtattttatgtactttttgaagcattttttcaccagtacttaatagcaactgttagatcaagcattagctccagaggagtaaaaatcagattccacagatttgtactaatgtatctaacacaggtggtaatggcttttaaaaaaaaaaaatgaaaaacagtccaggccgggcgcggtggctcacgcctgtaatcccagcgctttgggaggccgtggcgggcagatcacgaggtcaggagttccagaccagcctggccaacatggtgaaaccaagtctctactaaaaatacaaaaaaattagccaggcatggtggcaggtgcctggaatcccagctactcagaagactgaggcagaagaatcccttgaacccaggaggcagagattgcagtaagccaagactgcaccactgcattctagcccaggcaacggagcgagactccgtctcaaaaaagtccaaacacactaggggttaaataagctgcttctctttccactgtttattattaatgtacaaaatatacaaaaccaaaaaaaaaaatactcatcctcaaatccattttggctctaacccaagaccctgcacaaaacccaaccaatccactgttttcatagaaaacaactgatgccaaagtgaaggagagaactgggaaagggcaaaatcatcttgttgaatccacccaggaaggcgcctggtggggattcagaggtggttgacagggtgaagtacctggaagcctccttcacgctggcaaggttccaggtgggagcagggagtgagctgactcccaaaggcagtgcatgtagtgtgactttcaggcccagcacgccgggcccaagttgatgagaagctggtctcactgaagtattttatcaagtctccagactggctatagttggcaaaggcagaccagcaccaccggtctcacctctgccagctaaaacttgcaccggatgcagatacgagttcgccatcatcgaacctagcagacccaggacgcagactgggtgttcacagaaagttgaaggtcccacttgagaaaggactaagaatggtgagcccacgctgggggaggggtggggatgatgtgtgttccagaactcaaatccagctgattgagccctctcagtgcagtgggatatacaatacccctttcagcatctccccaccccatgaggaataatgaacttagttgggatgatttcttaagtgcagctgatcctgtgtcagagttctgtgtgcatgtggggacccgcaatagaagggtaggggtgttcgccaggataaccagctttaggttctcaagcattaagggtaatactggaaaggggtttggggtacagggcgaatcttctcaaaaagtgaagccaactgggtctcctcttcagcagtccaggaacgtttccagtctctctcctccccagactggaggaaaatatgtacatcaatgcgcaccagtgatcagaaaacccccaggaacccaagcaagtgggaactgagggggccggctcctcatcagctggggaaaagggaaaatgggcctcacagaagccataacagggtggaaagagcgaggctgcagtccacaggggttgtgtgaacagggcaggcaaatggtccctagggcagggggggcccattgacacccgggtggtagaaggcacagttgttctcatagcggcagttgcccttcatcatgaaatgtcggcagacagggcggtttgacatgtctgtgggaacgatggcaaaacagttagacaggaaatagctgagggcaatgccaccctcaccaccccttgtccatgacatcctgagaactgtctttcagagacaatcttggggatttgggggaagggcatagagtaggaactgctatgcatactaggacatcaaagagacgggtacctcacgttctgcctagctaccaacagtagtgactctcacccactccccaaaagcttgtatgggacaaccaaaaggcatatgggggacagggagcatcctcacctcctccatggctgtggcctccatcgtgccctcggtggccccctcccccgtggccaggaccatcatggccacggtgctcatgaggtggcggccctcgatggtcatggcctcggtgaccagggacatcatgaggccggtggccatggggccccccgtgtccagggccttcatggggacgatgtccaccacttccacccatgcttccgccagggccttcgtgggggcgatgtccaccaccggcacccattcctccgccagggccttcatggggacgatggccactgccaccactgatgccaccgccagggccttcgtggggacgatgtcctccacccccacccatgctaccaccagggccttcatgggggcgatgcccacttcccatgccaccgccagggccttcgtggggacgatgtccactgctgttgcccatgcccccaccagggccttcgtgaggacgatgcccaccacctccaaccatgcccccaccagggccccctcgtccatttgggggtcctcctccagagcgacctcctctggcgcctcggaatggaggaggaggaggaggaggttcgtttcctcctcggccacctcggcctctatggtatggtccaggacctggtcctggacccccccgcattgggccaccccgcatagggtcgcccgggccatcccagaagggatcacctccccggggagggggtggaggacccagaagacgtggacccactggcccaccagggcctccatggggacctgtaaggggacaaaaaagagagacagtatcagctaccaggaactgccatctcccaacctaaaccaccacctcccaccttccagtcaatcctatactattatcagactgaaattaagcagataagcccattccaaccttttactcaccacctacctggcataggtcccccaggtccagggggaaagtgctgcatgcccttggggcccccaggaccccctggtgggaaaccattggctattgggccagggcctaggagtccatgtggcactgttaatgaaaacaagagtaacacagcatgagcactctagaagactagcatgatctcccatttaggtgcaaccaactgaccctctcaaaccaacctggcagagcaatgctctctctgtccagtcttcccctcccatttcttgcctagtggccacagccctgtattcttctgcatctttgaaaccctgcttcccccaactccactgcaggcttcctcccccagtcccctggggctggccctgaagattacccagcatctgcttgatcttgtccgaatagtctggttgtttcagtagttcctctgaaggatgactgtttgggctaccctgtgaggatgtaagaaggcaaagtcaacagacagaaagggtaacaaccatggcgaaagatagcgccaaagattaggggtaagtgggtagatgtggagaactggggtaaggcgaatgggagacagtgaggagagcgagcttaaggaggctccacagaaggtggaaaaggggaaggagggtgcgtaccatgatggaggtgaggatctcttggacattaatgcctcctcctccagggccttgggggccctttccagcacccatgcttcccataagattggccagaactggaggcaacttggagcctcctgccccatcaggtgagccacctgaccccccaggttccagagtctcaacatacggagtctcatccatggaacactcctgaaagaagaacaaaaaaaatcaggactgacagaacagagacattctcatatgaaagatgcaccgaattcaatgaccatcacaacttccatcatcacagaacattgacttacctcatctagggggatgagtttagggggtatgggctcgtagggctcaggatcaggctcatgaggactatcaggaacaacacaggtgagagaaaaaagaatgatagtcaagttattaattcagaccctgaaagtaatttctaacctccaccccgtaattaccccagctcatgttccctcaggagtgtccaagcactcaacatcccagggcacgaaccccactctgctcacctctccttgttcaggaagagctcctgaaggattcccttctcccgctcagcctggatatatcgctcctgactattgcttccaggggtgacaagaggtgagggcagaaccaggggccgggggcacacccagggcaccttctcctccatgttatcatggctcagacgccgcgctgtctcaaatgcatgtcggtctgacagtatctctcgcttagcggcctcaccaaagtccttgatcttattcacatttactgtcggcaggggaagaaaagcaagagggaaagtaagcacaaccaagtcctttcaaaatcccttaaacacacctattacgtaggaaatgacctcttacctcgttcagtttcatccaattcaaaatagaaatattctctcagtttgccttcctcaggccatgtcacacttttcctcttcctgcctttccgggtcagttggttaggatctccaggactctccactggcttggcatccagagctcctggctccaaagaggctggaagcagaagaggtttcagacccagatccctcctttcagaaaaccccccaaactgaaccagtttctagattacctgtatccatgagctccgggacttcaacagggggaaccggggtgcctggacggtctgcgtccattgcctcagaaggtggtgctggttctggggaagaaggtttggctgtgcttggttctgtgctcgttttcccttcaaaggggcttggctattgtgaaagaaaaggaagttaatgaactgactggaaagccaagggcaaggcaattagtccagggtcccaggcacagtcccccaacagttcctatataaaggaagactctgtctccacaatgtctcacctgcaccagtctatatccaaggcaaaacgcctcttgttgtcctccccgacaactcctagctgctgtgccctttcttctactttaccttttatactctgtcactgaaacctacttctgggagcccataccttggcagccgtaggtgacagtactttttttttcttcttaattttgatgcctggaacaggggctgaattaagagcatccagaaagcccaggccctccatagctacaaaaagaaagagcaccaaatggcatcatcagacctccttcataatcctacacctgcaaacacagtccaggcataaaatgagccagtgaagaccctgcctcaacttaggacacgataagctcaagaggaccaggaagcacatgcaggaggattcacacaggatattcttgttgttattctaggtttctcatggcaggcaagccatagctttggatgtgaattatagctcaggtagctgacgaagtgagcccttgtgaacatgacagatcaccttaccaggtgcccctgaccagtcacagaatggcacacgtccctatcttatctctaaaattactcctaagtgacccctgaaacgggagttccagaggtacaaaaagtaagggataccaagaaatcaaaggaaaatggagggaaataataaaagagaagggaaaaaacttctcgttcccagggacattcattcccataagagtttgctcctggccaggtgcggtggctcatgcctgtaatcccagcactttgggaagctgaggtgggtggatcacgaggtcaggaaatcaagaccatcctggctaacatggtgaaaccccatctctactaaaaatacaaaaaattagccgggcgtggtggcgggcacctgtagtcccagctactcgggaggctgaggcaggagaatggcgtgaacccgggaggcggagcttgcagtgagccaagaccgtgccactgcactccagcctgggtgacagagtgagactctgtctccaaaaaaaaaaaaaaaaaagtttgctcctaattcaaagtacatcttccccactttagactcacgctgtggcgggatgatcttcactttgatctctttggtggcattaggtgttgtgttgagtggcttgtatttcttctctgcagggggagtggcatctcctggagcagctacgttgctgtcagaagaggaactgtcatcaacatctccgactcaccccctcctgctcccttgtgtccacagatccaccccattcagagcctgagaatatggtccatacctctgacgtttgagggggatgggtttaaggttgtacttgtcagaaaccaccactgtgctggcattcttcttcacaggcaccaaggatggtgtctccagctctagtcctggggaaagaagcacggtgtgggcagctgaactcaaaccccagacccccgaattttcctcccgttctcacccgcaaatgttcttctagccttgtaaccaaagcttcctctgctagtcttccctcttccttacgattaacataccacacatcaaatgattcccccataaggctctgggtgtgcacatgcccatgaaccctccagaggccagccgccagtcttaccagtggaacggaacttggcatgactgggtgctgtggtgcgaagagacttgggcttctccctcttcttctctggggcctcctcagcccgggtctcagccttcacctctgtcaaaggtcgctcaggaagggtagttcgactttttccttcatctttacgtttcttcttatctttctctgttgtgaaaaaacaaagcagaaaaggattttatttagatgaacactgtcagaggtgaagcagactgggagcacctaaaggccacatcccaataggaaagaaataaatacaaaggataaaggactaaggagcttaccagcaggctgggtactgctctgagagcggatgacagccatccagtcgctgacaaggactgaggccaatttccggagctctgcaggtgacagaaaggggaaatgcctaaataatgtaaagtaacattcttccaggaacagaaaatgggaggtttgagaaaatattgtgaaaatttatgtaacggagaaagtaacccaaagttttaagaagaacatgagatatgcttaaaaaccaaacccttaaaaaatggaacaatgaattagagttgtgttctacttggataactttcaactctgatgtcatcacaccactctggagtaaaaagacctaatatttcagaatatgtggttaaaatctacattagtaaaagactacacgttgggtgcagtgtacactgcttgggtgatgagtgtaccaaaatctcagaaatcaccattaaagaacttatacatgtaaccaaaatccaccagttcctcaaaaactgacatttttttaaaaagctacgttagttgctttatgtataacacacctaattgttacaacaatctgaagactttttattttcctttatagatgtgaaaacaagaataaaatttgtttctaaatatatgaaaaaatactttgtaactctttccttttgtacttggcaaataacatctctgatctatggcacctctcttctggccaacatttccacttataaactcatttcataatttatcatttagtaataggagtttcacagatgagacacgctaggatgatactatttcccacagcaaattttaagtgtatgtgttttataacaagcaattttaggaatcagcttccagttaaagtatggcaccttatattcagcaacagagaaatgaacaactttggaattgagaacaggaaagagggtacaggttagaggaactttctctttaaaagaaggaaaaaaagcaaggtgaggtagaaagagaaaagtgaagggacaatccaaggatgggaaaagatattaaggtaattaagtggaagtaatagagaaaagcccatgagagagcaggagtggcaccctaccttcatcctcacttgacttgctcagctgcttcaccagtttagctgtgttgttctatgagagatgggagcagcagaaaggtaaatgccaggaggcaaataattccacttagagctaaaaacgacaaaagttacagtcctccctgcttttttttttttttttattttttgagacggagtctcactctgttgcccaggctagagtgcagtggcgcagtcttggctcactgcagcctcgacctcccaggctcaaatgattctcccacctgagcctcctaaataactgagactacaggcatgcaccaccacatctgggtaaattttttgtattttttgtagagacagagttttatcatttttgcccacgctggtcttgaactactgggctcaagcaatccacccacctcagcatcccaaagtgttgggattacaggtgtgagccaccacacctggctgacacattcctttttttttttttttttttgagacgaagtctcactctgtcgcccaggctggagtgcagtggtgcgatctcggctcacaataacctccacctcctgggttcaagcgattctccagcctcagcctcctgattagctgggactacaggcgcatgccaccatgcctggctaattttttgtatttttagtggagacggggtttcaccacgtcagccaggatggtctcagtctcctgacctcatgatccgcccgcctcagcctctcaaagtgctgggatcacaggcgtgagccaccgtgcccagccgccacacacctattaaaggagataaattcaaaccaagtcttcttcttctaaattcctattttttttctgctgttctacctcacaggcccaagattacagccacatcagtcagtttgagtttttcatccattagactaaaccaaaaaaggaagaatcagggtttaaagactaaaggtacctgcttgagatggtctacagtgagcggtagatgctgcagggtcagtagaatttgctggaggaggggaatgttgttggttgtctttgaatacgtcagccaattgttaagaagtttgtagccgccaacgtcaataaatctgcaggcaggcaggagagtctatcagtaatgccctttctaggttttgacagtaccacatcctacaatcccagtctcccatcaatgacccaggaaccccatgcctcaccgccccatcttttcgctacaccttcccattccaaccatccagatccccacttacttgaccaatatttctggtgaacgggtctgcaggagaatgttcaagtaagtgcatcgactcaccatctttcgtgcttccttcatcaaactgcagaagatgagttagggttagaaatgaagcagccagtatctcttctcttagcaaaagcgcctctctgtgaactgcctagagattcctaatgacttgggactttgctccagagaaggggagtcacatatacctctaggaagatgggatggatccagtgtgacatggaaacttatgggagaacagagacaccgcagtctctgacctggggaggagagcatcgctgcctccgtaacacacaggatgaattccattctgcctccaggtgataaggctatccctcaacaactgtccctaatagtctgttcaagactggcttagttatttactctcccctgaaaaacctgagaatccctgaaggaaaataacattatgggtaggtggaacacgaaccaaaacaatctagaattctgttaccaggctaccctgctctcattccaaagcatgactcccttgggaccgtggacgtccaaatctccagtttccattatggtcagaaacaagtgatcatcttttcctatcccttatcctaaaattgttacattttaatcctattgcactgactatctttccctttcctttccaggatcattccagtgtgcctcaactgcagccatgttttaacacacaatattctctactcacagtgaatacaaaaaggggtaaagactcacctgaagatcttggaaatcccatccacacttttgacttccccatctcggttaaggaagctgtccaggcccttgagaagttctttggggtctatgggacccgaacccatgatggtggtttctatggtaagaggacaaaacaaacaaacccacagaataaatgggtggcaaggactacccgagtaggccctctaataaaccacatctctatatttgacaaagtataatgactaattattcaactatgctattttttagatatgaaaaatcgacacagaccacttgccactactgagaaaatagccctggcaagttaagcatggggagcatatgtgactgaacaggaaagcaattcgattggaggagtagggcagcacacctgtccctccctcccagcagcatccttcctaggatggctgaacttcactagatcgtattaaagctaagatcagttcccataacaagatgttcaactctccagggcatttacacctatcgttaagtcctgtcttccctagttgctgataaatttggcttgaaaaacagcctatagcttgatagaaattgggccaatcttgggtgtttgagctaaatgtcttataagacttgagtcctttttatcttagcccattaagagtcataatcactacacatggcaagatatgtatcagctgaagtggtagatgatggagaacaaaacaaaacttgaaaacagaatccctccctaaggagatctgggagtaggtgccagagattgagacaaatggatgcatggaaatcaagcaggtcctcctagaccttgaatagactgtcactcattagccaaacactacacaagtttttactgtctctaagttaaaaggaagctagtggtttgtgctttcaaaagcaaagatgcgaatctggtcctctcctcaaaaatcacgctgtacaagatcccctaggaaagcctaaaactgaaaaccatggaacctaaaaagggaacagataaagccaaatgctagaaaaattcccttttaagcagctgttttagaccaggttgggaagggaattagttaaaagctaagctccttttatggaagggacaagccagaactgaagttccagaaaggtaatttaggatcaatatggttctgattgggatttttatctacactgcctctaaatacttgcttctaagacccaaaaaagaggctgggtgcagtggctcatgcctgtaatcccagcactttgggaggccaaggtgggcagattccttgagcgcaggagtttgaaaccagccttggcaacatggcgaaacctcatctctacaaaacataagtcgagtgtgatggtgtgcacctgtagtcccagctacccgggaggctgacgtgggaaaacgggaggactgcttgagcccagggatactgaggctacaatgagctgtgattgtgccactgcactccagcctgagagacagagtaagacgctgcctcaaaaacaaacaaacaaaaaaccaccaaaaaagaaagccacttcagcaatatctgcctttgggcaataaggcccacactgagtagcaaggaagaggcaagaacaaaaccttcctcatcctacatctagcacagaagtaacagacacaatcccagcagaagggtagaaaaatcagtattttacaaagatgagtagttttgtgccggaaaaaacacaggtttcttgtaagataatgcaaattagttctacttgttctcaaacaaaagaaaaaacatagcataacaatctcagcctttttgtcctcccaacaaaaacgtcagtaagtttccaaatgtgtaggtcctaacaacctaggcgagcagcagcagaagcagggaggaggcagccaggaagggtaggagtataatcttggctctggagatcataacctgtgggctgaacagagggagagatgaggcaagaaatgttgagaagtcgctgctgccctggaacctccacaaatacaagtggaacctgaggtcagagaaaaaacattcaaggagaatactggaaaagattagatgtccgtgggccaaatccactcaagtgtggtgattcctacacacacagagacagacacagaaataaaggtattcttcccatgtagtgagatactataaagtgatctatagaaactataaagagatacgataaagggacacataaaacagatatcacatctgttggagactggaaaagcaatgtatgggttccaataacaacatatcataagcaatcaagagactaagaaatttttaaaactccctctctctatatatacacacatacctaccattagattcctaaagcaaaatatatgcaatttgacaaaaggccttgaattaaacatcatttcaaaccagttacccttgactgattcaaacccagagttgaatatatataaccctggagaattcctttttgcatatccaactacaagctaagccaataaatagacctactacccctatttccttcagacactaaataaactgtcatctgagctcaagtgttccttaagaggatgggagacaagaaagaagagccagtcttagaaaaatggaccaatgagtacaaagctaaattctgtccagtgccctctgctggaaatgggatccagggacttttttattcccacatgtataaacaagaataaaagacattaatagtcaaagggaagctaagagacaaagcaaaattagcgttaaatattcattttccactacttatattttggaaatataagtgaaattttgtctcatgagcaccaatcttgataaaatgtaagtgggttttctcatgatggccttccttcaggaagattagttcttatttaaaattaaggaccccaagtgtcttataacctagtttccttgctttgaagtcagtatattttggaaaaaaaccaaacaatttccaaggcgctcaagtggaaaggaatgtaaagtccaacatttcgggcacagggctacagcagagaaggcaaactgagttgatgaaggcaggcaggggccgtgactaagtgttgtaacattacctactcaagatctggagtctagaatgaaagcttaagaaagctttctggaaccacaagtaatccacggcatgattatgtcttcttttaatgagctgctattttcttgactgcagaacatacagaaggtggggagtgaggtagcaaccccctggcctacctccacctcatcctaagctatgcgttccttatggagaatgtttcaggcagagccatactctactggcacaaggcattggggaattttctaccatttttaccagagataaacgtctgtgacaccaactcctgccttcaaaatgaattttacttgagggttattcaattaaatagggtgaaaaaatatccagcatagctaaagttattccacacccatcaccaatgaaacaggactgaattggttcaggataaaaattctgtgcaagtcagagctctttaaaaaataactgtcttctaacaaaaggagaaaaaagtcccaaatttaccttaatttagaggcacttctggaaatgaaaatgatttgtacctaaccccttatgttccccttcctttcttcagtgttttaggcacttcctagtttgacacaatagtggactgaattatgtctctcaggtgattcatcacaaggtcatagctttcttccaagtagtaagcccctacccctcagtcattttgcaaacctgatacatgagctcctcaaaagcttatctgccttccaataaagatgcaaaatgatataccaccctgactcatagaaaaagaccccagactagaactctggccacaaactacaaggatcaggttttccaagattttctgaatggatgtggttcccctagtagacctggcttcccatctcccatgttaaggaagatcttctttattaatcccctggctcactagagatcaggaaccccagtgggtagaatgttcagctcccaaggaagatatgctgcagaggcacatggcaaactgcttaaaagaaaaaaacaaaacaaaacaaaaaaagcttgtagtcaacagacatgtgaagagtccctcccatccaatccagaagcttaagtaataatttgagaatctgtacccagtaggaagttagccctaagtctcacccaggtcaccagagggcagttatactttccaattctgcctagaacctccacgcttcagtgcaggacttttaaaaattaaaattatatggagagtctgataaagatttgactttgaaaaatttgggggaagaaaggaaccagacacccaataccaccctcagatagggcatggcttctgaacatgcaccaaatgccacagcactgcatgagttgaaaaatgaagaggacatcattttttcattaatgcttttaggaatttcttttagaagggaaggaaaaagaaattcaaaaaaggtggctctttggggaaaaaaaaaaaatgaaagttgtgaaatgtaataccagaaaggttttgcttaccagaaaccgtagcttgattccccctgccttgagtttacaactgccgcctcctttcctaaagattcacttcttatcctagtaccaatgtacaggaactaatcaagtgcagaacgtgatacagcactgaatacagtttatccccaaactgagaggtgggaatgagggcgatttagaagaaagtcctgaaagtacccaccttcccccgattctcattacacaaagcgaccaaatgcaggaggcccactggttcctaagcagaaatggcacacttcagtgtcattaggcccgtttatctccaagttactcttgcaagcccttgtgtctttcccatctccctctacacacatatatacatacacacacgctcacacacatcctcaaagcttcccagtcttaggtttgcctgttttttcacccctggcagctgaagtggggaaaaattacaagcagttgtgatgagtgaaggaaagtgaaaataaaaactggttctataaaaactagaactacacagagatggacagccttgatacttaattcctataagctcctatccctttaagatattttatataatgaaaataaggaaaatgtcttctccctagcagcaacgagcacaggcagtgcaaaagcatctgctcaggggtggagcttcaagagggtggagagaggaggaagaaagctgattacatcacctttcaaggctgctcctcccacttgaccaagtttctagggcggccctaagctcaggatggcaaaagggggagaaaaacaacaaagacggagggacgccattttgtaatggagaaagaggacttaaactaaaaagccacccggctctgccggtagcttcagttacattataaaacacctttttagtaaaaaaaaaaaaaaaaaaatcaaaaaccagttccccatcgtgaataatctttgacctattttgatcagtaagagcgtagtgaaaattaaagcaattaaaatattaaaaagaacaattttctgcagggaagaactgaatttgcaacggaggttcaaccggctaccatcgaccacccccatcctccctatagagggaaagggggaggaaggacttggacccctctcaacaaatagggttgaggtgggaggacaggaaaaaaaatgggtcaagacacaacctgcaacgccgcttggaagacaaaaggacaaggaaagtcgccatattgaagcagggaagaaaaaaattccttttaacgacacaaatcttttagaaagctagcattcaattgcactaaatggcttttaaaattatactcctaaattccacatttcccaacctttccaccctctatttaactgtacctcccccaccaaaaaatatcaagttaaaatgttaatcactcttttgcttttaaatacctatgcaatctgcaacaattataagacattctttacctccccaactattatcttgtatgtactggcactaagattatattttgtcctaagtgtcttgcaatctttattcctagattgccacctattttaaccacacaaatataccccaagcaaattacattaaaattgagaggatttaacagtcatttaaaaagttatagcgagctattacttctctctgcccatctccttaccctgcaatctttatgtacagattgcttattaatctggcaaattgaaaggcaccctgcttgtctcacacacaaagaagtggtacttctgggccacaagatccaccatctcttgtatgtgagctcattaacccttttgaagactgctgctaaccagaggaaggtaaccattcctccttatataaacacatatggctttggcagtctggaaattggctggattaccaagggttaaccatcaaaatcctcacttgctggccctccctccaccctctctttgcctgcagcaaggcagggaagagataggtggtaggggagagagaacaagactgtttagacccacaggccctttttaatggagattaagtgaccagattggtccttctccagttctctatttgttctatggtctcatttcttcctctcattatttttggtttcacaacgggaaacgttgatttcttgttgcaaggctggtttttgaaaattcgacacttactatccaatttttttgcgacgtcagcacctcgggctcaggggggagggggtaaaattttggaggaaaaaaaataaaacaaccaaccaggacccaaaactcaattatttagggggcctcattggatcaaaaagtcttttaaaaaataaaggccaactcagtattcatttcccccccacccaactccatttagggaggggggtcgcagaaaaaagttctgagtggattcaaaaaagtaaacgctggatgagtgaatttgggtggtttgggaagggagggtggttgattatttttgaagttatgtagtgacggtccttcggccacagatttcaagtcccaagcagcgtgggctggtggggtgggcaagataggtgggaaggggcagaagacacaagtggttgggctggtggctgctgttttccctttcccccctctctcaggatcctttcaagggcttagatgttgctgcggcttgtttctgttttcctcgtggccggcctgtctttctccgagaaaattcaaacctgggataaaaggaacacaagggagaaagatgtaatcagtacgggttgcttcaaaacactcacaaatgccatctttgttgtccccaaacaaacctgtgtcccatcctgatcgcaaccgctttaagccgtggctctcaaatgaacccatccatccctatcccgcttcccagatccaacgctctccgcaaaattttacccactagacgacaaagtaggcaaacttacctctaaacgaaccccagaatggcggccgcccgctcgggtggagtcttttatacccggacgccgcccaacgcgcccaaacgtgctagtgaaacgcccttgtcgcgagacattatacgcgaggcgtgaactcattggtcaacccaaatgacaactcgccaactgattggctactctcacttcacctttgctccgcccctttccctggcactctcttccgcctccttcctgcctccctgtcgcgtgcgcgtgaccaggagcctagcacctccctttcctctgcttccgccacttccgccctggagaacatttctcacccaggattggtagaaacctaagagcgcatgcgcactgagaggataccgctaaaaatcgccttcaaaattgcttaaaaggcaaactttaacaatgcgatctaagagtcgtagtgactggccaaaaaaaaccgcaattttggggtctaattcgattgtgacgcagttgaaattagcttctcccccatgccttccctttcacgcttccgtcctgacgcaaacgtggggccgccttccgcactgcgggcttgtccttggccctgccctactcagtttcctgaagcatgcgcagttgcctttccgtcaattcctgtcctgggcgtacgtcaagatggcggcgtctgtattaaacaccgtgctgaggcggcttcctatgctatctctcttccgaggttctcacagagttcaggtaactcttcgaaagacattttgcacaacctcaagttggttataccttctcgaggttgtcgctccactgtcaggaatccacgagtggagaccttcccacgtgtgtcttagctgtctaggcagtacttcctgcaaccccccccccacaccccgcgcattttctaatcccgagccgaggactaaacgccagggttaggtatcatcctttttccaaaatgccatttcagtaaaataacttaagtgatggaattgacccctgtccaccctcagtcatgcataaccagctttttaaaaattatttaactaattaaggggccatgctaatctctgtatcgttgcaattttagcataacatatgtactccccaagcgagcgccacaaccagctgttaactatgcaagtggtgactaaatctgtgttgctctggaatgtccttggggaaattagggatcccaatttctaccaaccttgctatttctcaataaggtcaggatatattcttacgacctgaggacagtttctcagctctctttattaaatcagtttcttatcggagttatgagagcttaactccgtcctttgaattgaggtttccctccagtcttgtgtactcacctctctggaggttcttggtggggcacggtgagataggaaggcttgcccagctgccactccctaaagtgggactgaagagtggtgacagaggtcaacacagaaataataacagccttggtagctttaaaactagcgttaggactcaagtttgttctgccctgtagaatgttgaccttcagcttttatgaaaatgggcaactcagtgacttcattggattgatttggagactcacctgtcttctgcatcccctccccaccacacatcttagttccaagaacctagatatccttcctcttactttattcttccaccagagtcaatttatttccaaaaagcaagaataccttttatgtactagatttttttttcttttttctttacacgaaatctcactctgttgccaggttggagtgtagtggcgcaatcttggctcactgcaacctccgcctcccgggttcaagtgattctcttgcctcagcctcccgagtagctgggactacaggcgcatgccaccacgccgaactaatttttgtatttttagtagagataaggtttcaccatgttggccaggatggtctcgatgtcttgacctcatgatccgcctgcctgggcctcccaaagtgctgggattacagacgtgagccactgcgcccggccttgtactagactttttatttgtcttctgaaataagattgttttttaggcatatatcccctaacttagcttttctttcaggatccaattgtagaaaaggagagtggttgttgatttatgtcaatttaaacccaacaaaaatacttaacttacatatgcattcctgttatattccattaatgcagtatgtgtgcattcctcctttccaaagtgtgataagcaaaacaatttagtcctttccttaaactcattcttttatttttttcttctcctttgtaggttcccctccagactctttgcaccaaagctccctctgaggaagattctttgtcctcagttcccatttctccttataaggatgagccctggaaatatctggaatcagaaggtacctctaaagggggaaagggagggtcagataggatttgagataagtggacagagccacccactacactcccacccaggaataacttgtatgatctttcatttcagaataccaggagcgatatggttctcgccccgtctgggctgactaccgccgcaaccacaagggtggtgtacccccacagcggactcggaagacatgtattgtgagtttctgagagtgggatgtggagtgcggggaggccacaagtaacagtaacagcagcactttttctgacgtgtttgaacatccttaactgctgttttttttctctctacagcgtcggaataaagttgttgggaatccctgccccatctgtcgagatcacaagttgcatgttgactttagggtaaggagagtcttttctttttagggtaagaaaaataaagattaggggctgggcgcggtggctcacgcctgtaatcccagcactttgggaggccaaggcaggtggatcatgaggtcaggagatcaagaccatcctggctaacacggtgaaaccccgtctctactaaaaatacaaaaaattagccggttgtggtggcgggcgcctgtagtcccagctactcaggaggctgaggcaggagaatggcgtgaacccgggaggcagagcttgcggtgagctgagatcgcatcaccgcactctagcctgggcgacagagtgagactccgtctcaaaaaaaaaataaaataaaattaaaaaaattaaaaagaaaaataaagattaggagcccctttgcagtgccaaagagattactgtaggtgccccacacttcgtatatccaggaggccctacagtccgttttatagtaactgtttctggcattataaaaacatccctccagccttttaccttctactatggattgtactgaaagttttatcctatgcctatgaaatttacagtctaaattggcaggtaagagaaatggctgttttttttttttgagacggagtcttactctgttgccaaggctggagtgcagtggcgtgatctcagctcactgcaacctccgccttctgggttcaagcgattctcccgcctcagcctcccaagtagctgtaactacaggcttgtgccaccaagcccagctattttttgtatttttagtagagacagagtttcaccatattggccaggctggtctcaaactcctgaccttgtgacccacccgcctcggcctcccaaaatgctgggattacaggtgtgagccaccacacccagccagcgaaatggctatttctagtgggagagccaatatccaaagattcgtttgtattcattacagttattaccaaatatattggcccactttcttcctgaggttttctttatttccttgtcaatgttcagtgccatgctggcacctggggctggagggcaggtatatgaagcaagatagagtccattatttttcaaaaagccttcaatatgtgagaaggacaggatttgctccttaaagaatttgaaaacatattggctgggtgcggcggcccatgcctgtaatgctagcactttgggaggcccaggcaggtgcttcacctgaggtcaggagtttgagaccagcctggccaacgtggtgaaaccctgtctctactaaaaatacaaaaattagccaggcatggtggcaggcgcctataatcccagctacttgggaggctgaggcaggagaattgcttgaacccgggaggcggaggttgcagtgagctgagattgcaccactgcactccagcctgggcgaaagagtgaaactcctcaaagaaaaacaaaacaaaaagaatttgaaaacattatatcaataaaacagataatgggaaagtgttcttctgagcttgcagcaaaagtattagagcagaagctatatggctgatcatcagggaagtagtagagcatttggataacagtcagaaaatgggggtatttgactgcaataagaacccttctaacacaggttatttaggagtcccatagataatttcccagtttcaattgcatataattggttataaaaagagattatggccaggtgcggtggctcatgcttgtaatcccagcactttgggaggccaaggtgagtggatcacttgaggtcaggagtttgagaccagcctggccaacaaggtgaaacaccgtctctactaaaaatacaaaaaaaattagctgggtgtgatggcgggcgcctgtagtcccagcttctcaggaggctgaggcaggagaatcactggaacctgggagatggaggttacagtgaaccaagattgcaccactgcactccagcctgagcagcagagcgagactccgtctcaaaaacaaaacaaaacagagattataattaattacataactgagagagagaaatgttacaaatttagtagcatgggtgattctgcttgcattctactctacaatgtacctgcttttttttcaagagtctcatttcctagttaatttgctgagagagagttctatgtaaattgtaaaattattcttagtatataaattatattcagcatactattaaatacattagttgtttatacatacacattacaatatcattttttgggtgatttctgggatttccaatgaccagccccagtttttcacctaaaggctgacgttagaacttaacctctgcagcccaggcgcggtggctcatgcctgtaatcccagcactttctgaggccaaggtgggtgtatcaccaggtcaggagttcaaggccagcttggccaagatggtgaaaccgcatctctactaaagatacaaaataattagccaggtgtggtggcaggcgcctgtaaccccagctactcgggaggctaaggcagagaattgcttgaacctgggaggcggaggttgtggtgagctgagatcgcgccactgcactccagcctgggcaacacagggagactctgtctcaaaaaaaaaaaaaaaaaaaaaaaaagaacttaacctctgcataagagatttctatgggagcacagtgacagaatatgggatgtgcaaggatggattcagtgaattgatgaagccaaactgggacatgaaggaggatggcatctggagagctgtagaggggtgaaggtggtccatgtgggtgtgtagggattgtgtactttcgatgtccaaagatcctgctgctctccctgcctcttttcctcacgtttctctaccactttcccccacagaacgtgaagctcttggagcaatttgtctgcgcccacacgggtatcatcttctatgctccatacacaggttagcccatcatccctgcaccaccagagagcttttccttgtggcatgccttgtttatgtagttggccaataggtatttgttcagtggctcctgcttatagcctaaaaggtctggctgaaccttttggaaatcttggcttgctgggggctaaagtaattaaatgtggacaaaagaaaacaacaaatacagccaggcgtggtggctcatgcctgtaatcccagcactttgggaggccgaggcggctggatcacctgaggttgggagttcgagaccagcctgaccaacatggagaaaccctgtggtgatgcatgcctgtaatcccagctactcaggaggcggaggcaggagagtcgcttgaacccaggaggcacaggttgtggtgagccaacattgcgccattgcactccagcctgggcatcaagtgaagctccatctcaaaaaaaaaaaaggaaaaagaaaaaaacaagtacttctgtaagcaaactatctaaatgtagtttttaattgataaacagtgattaattcctttctatagggtcttttaacttttacaaaagacttctcacaaattgtcacataagttattttatatcattgtcaattggattagattttccaaacttggaatcgtaaatttaacaattcagaattatatttattccctaactacagtcacagggcaaatctggcccactgtcacgtccatttgttttcatattttctgcaattgcttccatgctacaatggcagagttgagtagctgagacagagaccacaggacctgcagagtttaaaatatttactatatgactctagacagaaaaattttgctaacccctgctctgaagcaagacaaatttgcagagaataattttttgttgttttttttttttgagacgaagtttcactcttgttgcccaggctggagtgcaatggtgcaatcttgcctcaccacaacctctgcctcccaagttcaagtgattctcctgcctcagccccctgagtagctgggattgcaggcacatgccaccatgtccggcaaatagagatggggtttctccatgttggtcaggctggtctcgaactccggatctcaggtgatccagctgccttggccttccaaagtgctgggatgacaggcatgagccaccgtgcccggcagagactaatctttgtttttgttttttttgggggggtgtgggtggggggatgaaatctcatttactctgtcacccaaggctggagtgcagtggcatgatcttggctcactgccgtctccacctcctgggttcaagcagttctcctgcctcagcctcccaagtagctgggattacaggcacgtgccactgtgcctggctaattttttttgtatttttagtagagacagggtttcaccattttggccagtctggtcttgaactcctgacctcaagtgatcctcccacctaagcctcccaaaatgctgggattataggcatgagccaccgtgcctggccttgcagagaataatctgaattcaccattgttgtgggtggcagtacaatcagtgttcagtttgtcaagagtttcttatagtcaagctgtaaaggctgaagggactattattgttactctctcagattgccttccccaactctgaaatctcttttccctttattgaatctttgtggattgttcaactcaaccctctaattaaccacacttgcccattaaattgtgttctccctgtcttggaggttttaccattaaatggcttctctatagtggctagaccctcctaaatctttatcccagctctccaaaagatgggggagattctttcctttgggcagatggggaaactgaggtccatggaggggtcaggggaaaggggtcattaggtaaagccaatccttcccaatctacccctctgtcaccatatggaagcagttgtgttctattatttactgtgccttaaagaacaagatatttttctccccacaggagtctgtgtgaagcagcacaagcggttgacccaggccatccagaaagccagggatcatggtgagcatgagacggggcacacagcagttttgtttaggtataaggaagatgacttagggctagaaaatggatataaatgctcacacctgttcaagatggtagcacccagcatgttcttcctgacgttacattgtcccctgtcctttctcctgagtgtcttactttatcattgtcctgtctccttgttctttgtctttccatccttttccctcctattttacaactgctggtctcaatgccttaggaagttctttatataaatgtctggccctggactacatggcactgctgcataagttagtaaaaagtatacccctctgctagggcagatgcagcttcatagtccttgttcagcactgcacagctttgtaagcaagagccccagcagtatgtcagcccacacttgccctctgggccggtcacctgtttgcagtatacaacatgcataaatgtacctggtggctctgactggtccttccctttataatcctttttcttacttcatctaaaccaccctcctcattgcctcttaaatttcttttcttttttaatcccttaggtctcctcatttaccacatcccccaggttgaaccacgggaccttgacttcagtacctctcatggggctgtgagtgctactccgccagcccccaccctggtctcaggtgacccctggtacccatggtacaactggaaacagccaccggagagagaactgtctcgccttcgccggctttaccagggtcatctccaagaagagagtggccccccacctgagtcaatgcccaagatgccccctagaacaccagcggaagcctcctccactgggcagacaggccctcagagtgctctgtaggagctgtagactgggaagagaggccaggcgtggtggctcactcctgtaatcccagcactttgggaagccaaggtgggctgatcacttgatcccaggagtttgagaccagcctgggcaccatggtgaaacctcgtctttaccaaaaaatacaaaaattagctgggtgtggtggtgcacacctgtagtctcaactattggggaggctaaggtaggatcacttgatcccaggaggcggaggttgcagtgagttgcagtcacacccctgcactccagcctgggtgacagctagaccctgtctcaaaaaaaaaaaaaaagactgggaagagagctagagggactaggagataatgtgtatgtaggtttatgtgatgggatatcaccctgaagagttgtgtcttttgtggccagtgacaaatccaggaaatgaatgttgctgatagggataaatcttgaggctgagggcgggtggtacagatgtgtatgggaaaccccaacccctatatattgtaaatagatgggctgggctaaacattgttgccgtttcatacttctaccaactcagcttttacacaataaagctctactgtctctggtttgctt

SEQ ID NO: 2679 - DNA, 388 bp, Homo sapiens
cctagagggcacgatagccaggataggactgttctaggaacacacacgaggcgtgttaaagaagactcagaaagatgaaaaccaggaaagagccctgtggccgagatctactctgtatcctagagtattttatgtactttttgaagcattttttcaccagtacttaatagcaactgttagatcaagcattagctccagaggagtaaaaatcagattccacagatttgtactaatgtatctaacacaggtggtaatggcttttaaaaaaaaaaaatgaaaaacagtccaggccgggcgcggtggctcacgcctgtaatcccagcgctttgggaggccgtggcgggcagatcacgaggtcaggagttccagaccagcctggccaacatgg

SEQ ID NO: 2680 - DNA, 20247 bp, Homo sapiens
agtgacgtcgtgtggggcgggtccgaccgcgcacaatgggccatggagttcccgttcgatgtggacgcgctgttcccggagcggatcacggtgctggaccagcacctgaggcccccagcccgccgacccggaaccacaacgccggcccggtgacagctcaaacccaccctctggcccttttctcccggttcctctccaaacctggtccaggcaccacgcccccttctcactgactagtgatcgccccttttgatgtccaggcctgcctttttggtgacctctgaccctgggcctagtgggattgatcagcgcttggatctgtgacctttcaccccgggcccaaaatgtcccaatcaaaggatgtggttgacctggcctttctgcttcctcacaataaccttaagggaggagggagtgtgccaccttgaaaggtgtgacagaagtttgggtttcagaagggtggggtgggaaatcagattggaagactcccaggcaaaggcagggagccttcagtgttaaacctgggttggagttgtggcccaggttcccaggactgactgcctaggacccgctaatttagtgagtatctgactctttatttcttctctttctctagtgttgatctacagcagcaaattatgaccattatagatgaactgggcaaggcttctgccaaggtactggagagtttttagatggagtaaagggaggacctctgtggggatggtatataagggaggcctgggtccttcggagagacttgcagaaagtctgacttaatcttccctgcaggcccagaatctttccgctcctatcactagtgcatcaaggatgcagagtaaccgccatgttgtttatattctcaaagacagttcagcccgaccgtgagtgccacatgctcttccatcccatacttaattccttccttcctcagcccttcccccatctttgactatctcttgcagatagataccactagcctgttcattattttccccgtcctacagggctggaaaaggagccattattggtttcatcaaagttggatacaagaagctctttgtactggtgagtgttattggatgctaggagttcgtataccttggtttctgagaacaaaagtgctggaggttagggggcagcagagatgccggggttcctaaaacatttttattgtttctctcttaggatgatcgtgaggctcataatgaggtagaaccactttgcatcctggacttttacatccatgagtctgtgcaacgccatggccatgggcgagaactcttccagtatatgttgcaggtatcactgacctcttcactggttcatccaaactaggggctcctttgccctgagcccttccagaagccctgcctcccaccccccatgttcccatgtcattctattcccttcccaggcttctggcttcctgttggcatgctttccccatacttcctcctaccctgagtctccttttccctgcagaaggagcgagtggaaccgcaccaactggcaattgaccgaccctcacagaagctgctgaaattcctgaataagcactacaatctggagaccacagtcccacaggttagaggtttcagagaatagatccccactgagcattcccattgaatttatttgttatttatggcaaagaagtagtgacttatttcctatcacataggtttcattttctacaaccaggctctttctttctcttgtggtaccatctctcatcctgtagtgacttctttctcatctattttgatttttttttttgagatggagtctcgccatgctgcccaggctggagtacagtggcgcaatctcagctcactgcaacctccacttcctggtttcaagcgattctcctgcttcagcctcctgagtagctgggactacaggcacccaccaccacacccagctaatttttatatctttagtggagacggagttacaccatactggccaggctggtctcaaactcctgaccttgtgatctgcccgccttggcctcccaaaatgctgggattacaggtgtgagccaccgcatctgactttttttttttttttttcaaagcagagtctcctgctgttgcccaagctggagtgctatggcaggatcttggctcactgcagcccaaccttctgggctcaagcgatactcctcccttagcctcctgagtagctgagactacaggcatgcaccaccatgcctggctaattttttattttttgtagagatgaggtctcactatgttgcactgggtggtcttgaactcctggctcaagagatccacctgcctcagcctcccaaagtgctgggattataggcgtgagccactgtacccagacttattttgattctttaccacaagttgtttcctacacctaatttttcttttttttttttttttgtgagatgtagccttgctccatcgtccaggctggattgcagtggcacgatcacagctcactgtaacctctgcctccggggttcaagtgattcttgtgcctcagcctcctgagtagtagggattacaggcatgcaccatcatgcccagctaatttttgtatttttagtagagatggagtttcaccatgttggacagactggtcctgaactcatggcctcaagtgatgtgcccacctcagcctcccaaaagtgctgggattacaggtgtgagccaccgcacacaacccttatgcctaatttttttttgagacagagtcgctctgtcacccaggctggagtgcagtggcacgatctcagctcactgcaagctccgcctcccaggttcacggcattctcctgcctcagcctcccgagtagctgggactacaggtgcccaccaccatacccagctaattttttgtatttttagtagagatggggtttcaccgtgttagccaggatggtctagatctcctgaccttgtgatctgcccgcctcggcctcccaaagtgctgggattacaggcgtgagccaccgtgcccgaccccttatgactaattttcaacccaaacatagccagctcattttcacctccttgttttcacatagttcattactcatctggtcagtcagtatttattaagggtccagaataatatgcattccctgtcctcatggagctttggcctaatatagggaaggaagtcttgtttataactaagtgcagcaaaatgttactaatgctacccattcatccaataaacattgagtgcctggcagtgttctgggcactaggaatggtttactcaatgaaacagacaacagcctgggcaacatagcgaaactctgtctctacaaaaaatacaaaaaaaaattagccaggcgtggtggcacgagcctgtagtcccagctacttgggaggctgaaatgggagaatcgcttgagcctgggaggcagaggttgcagtgagccaagatcgcgccactgcattatagcctgggcaacagagagagaccctgtctccaaaaatgaaaacaaaaacagaaaaaaaggccaggtgcggtgcggtggcccatgcccgtaatcccagcactttgggaggctgacgtgggcgaatcacttgaggtcaggagtttgagaccagcctggtcaacatggtaaaaccccgtctctattaaaaatacaaaaattagcggggcatgatggtgggtacctgtaatcccagctacccaggaggctgaggcaggagaatcacttgaacccgggaggcagaggttgcagtgaaccaagattgcaccactgcactccagcctgagcgacagagtgaggactccatctcaaaaaagaaaaagaaaaagggccaggcatggtggctcatgcctgtaatccccacactttgggaggccaaggcaggaggatcacctgatatcaggagttcgagatcagcatgtggaacatagtgaaaccctgtctctactaaaaatataaaaattaactgggcatgatggcgtgcgcctgtaatcccagctactcgggaggctgaggcaggagaattgcttgaaccccggaggcagaggttacagtgagccgaggtcctgctacagcactccaccctgggggacgaagcgagactcttgtctcagaacaaaaaaaaaaaaacagaaaaagaagggaacagacaaaagtccctgtcttagtggtggagcttatattctagctggagagacaaacaaacataataaacaatatggttaataagtgctctggaaaaatgagagcaagtaagggtttgggagtactcaagtaaggtggggatgggagtatgtgggattgcaggttgaaaggggatcatcactgagaaagtgtcatttgagcaataactgaaaggaagtaagagtaaaaactggccgggcacggtggctcatgcctgtaatcccagcactttgggaggccgaggcgcgcggatcacgaggtcaggagatctagaccatcctggctaacatggtgaaaccctgtctccactaaaaaaaatacaaaaaaattagctgggtgcctgtagtcccagctactcgggaggctgaggcaggagaatggcgtgaacccgggaggcagagcttgcagtgagccgagatcgcgccactgcactccagcctgggtgacagagcgagactccatctcaaaaaaaaagaataaaaaccaaggctgggcgtggtgacttacatctgcaatcctagtacttagggaggccgaggtgggtggatcacttgagcccaggagttcgagactagcctaggcaacatggtgaaaccccatctctacaaaaaacacaaaaattagccaggtgtagtggcacgcacctgtggtcccagctacttgggggtctgaggcaggaggattgcttaagcccaggaggtcgaagctgcagtgagccgagatggtaccactgcactgcagcctgggtaacaacgtgagactgtctcaaaacaaacaaacaaaaaaaaagagtaagagccaagaaatatctggagagagagcatcccagacagaaggtaccaccagtgtatggccgtgaggtgggagtgtgcctgaaagagcaaattggctgtgtccagagcagcatgagtcagcggaggagtatggtaggagatgagaccagagaggtaatgcggaggaggggccttataggctactgcaaagactggcttttattttaagtaaaaaataagatcaggccaggggtggcgactcacacctgtaatcccagcactttgggaggccgaggtaggtggatcacctgaggtctctactgaaaataccaaaattagctgggtgtgatggcaggtgcctgtaatcccagctgtttgggagtctgaggcaggagaatcactagaaccgggaggcggaggttgcagtgagccgctgaaattgtaccactgcactcctgcctgggcgacagagcaagactccttcttaaaaaaaaaaaaaaaaaaaaatagcgccaggtgtggtatctcattcctgtaatcccagcattttgggaggcccaggcaggtggatcacaaggtcaggagttcgagaccagcctggccatatggtgaaaccccatctctactaaaaatacaaaaattagccgggtgtggtggcgggcacctgtagccccagctacttgggaggctgagatagaagaatcgcttgaacctgggaggcagaggttgcagtgagctgagatcgcactactgcactccagcctggataacagaacgagactccatcaaagaaaaaagaaaaagatcattttggctgtgatcttgattttttcctttttaacaagatcactttggctgttaagaacaggcaatagccgggcacagtggctcacacctgtaatcctagcactttgggaggccgaggcaggtggattgcctgaggacttcaagaccagtctggctaacatggtgaaaccccatctctactaaaaatagaaaaaaaaattagccaggtgtggtggtgctcgcctgtaatcccagctactcgggagactgaggcaggggaattgcttgaatcagggaggtagaggttgcagtgagctgagattgtgccactgcactgcactctagcctggtgacagagtaagaccccatatcaaaaaaaaaaaaaaaatggaaacggcaataagggagccagagtagaagcaagtagactaattaggcagcaacaatcctggcgaaaaatggtggtggctcagaccaaggtggtagcagtagtgatggtaaagagtggtcaaattttaaatattttgaaggtaaagcaagtaagatttcctgacagattgtatgtggagaaagaggactttaggacaatgccaaagcctgagcagctggaagaatgaagttgctttaactgagatggtaggtagaccagctttgggggaaatactaggagtacatttttaatatgttaattggagatgtctgtgatatgtccaggtttgagtagacagttggatacttccctggagatcagggaggaggtttggggaggagagttttcagcatacatctggtatctaaagccaacagacaggatgcgatcaccatagaaagattatagatagagaagctgcccctttgggccctctttaagaagtgaggacccccaactggctgctctgaaaagccatctttgcattgttcctggttcggtgtcctgctcaccacagccacctccgccatgcacttcctctgctgcctcagagtctggcagcttaatcgacatagtccccaaactctcactttcttcttaatcccttgcatcggatcaccgctgtgccccaccatgtcagaggcagttgtggacacaagctccgtgatcaccaccaaggacttcaaggagaagttgtggaggaggcagaaagtggaagagacgcccatgctaacgggaacgctaatgaggaaaatggggagcaggaggctgacaacgaggtagatgaagaagaggaacagggtggggagaaagaggagaaggaagaggaaggtgatggtgaagaaaagaacggagatgaaaacgaagcagctgaggcggtatggacaaatgggcagctgatgatgatgaagatgacgatgttgataccaagcagcagaaggccagtgaggatgattagacagcaaaaaaagaaaagttaaactttaaattaaggccaccgtgacctattcaccctccacttcccatctcagaatctaaacatggtcgccctcgagaggcctgcttgccctccacagacagtgccactgcagatgacaggcactcaccaccacccaacccaaaccagagaatttgcaacagaggaggaaaaaagaaccaaaacttccaaggtcttgctcttttaaaagtactttaaaaaggaagtttgtttgtattttttatttacattttatatttttgtacatattgttagggtcattttttttttctttgagacggagtctagctctgtcgccaggctcaagtgcagtggtgcgatcttggctcaccgcaagctccacctcctgggttcaagtgattctcctgcctcagcctcctgagtagctgggattacaggcgcccgccaccacacccagctaatttttgtatttttagcagagacaggctttcaccaggttggccaggatggtttctatctcctgaccttgtgatccacctacctcggcctcccaaagtgctcgaattacaggcgtgagccaccggcgcccagccaggttcagtcatttttaatgatctcagatgaccaagccagcctttggagggttctctgtcttacttctgactttacttgtggtgtgatcatattcattataatctcaaaggaggaaaaaaaaaaaaaaaaaaaccttgtttaaaaaaaaaaaaaaagcctgggcgcggtggctcgcgcctgtaatcccagcactttgggaggccgaggtgggtggatcacgaggtcagaagatcgagaccatcctggctaacatggtgaaaccccctgtctactaaaaatacaaaaaattagccaggcgtggtggcgggagcctgtagtcccagctacttgggaggctgaggcaggagaatggcgtgaacccgggaggcagagcttgcagtgagccaagattgtgccactgcactccagcctgggcaacagagcgagactacatctcaaaaacaacaacaacaacaaaaagtctcgttctgagcattccagtagcttctttagtgtatgtagttagttgtaccataagtagttggtttgtgtgagatggttaaaaaggccaaagataaaatgtttcatttatttgccttttttgtctatgaaatggctgcttatttatttaggcctatttgatgtatgtgtgaaacaatattgtgcaacaataaacccaaattttattttgctgagttgttctaacagcaacaaaaagaagttaaggaagagaagaagaccagcaaatgcaaccacagagtgactagtgaagtagatgaaaactgaggccgggtgtggtggctcacacctgtaatcccagcactttgggaggccgagtcgggtggatcacctgaggtcaggagttcaagaccaacatggtgaaaccccatctctacaaaaaatacaaaattagccaggcgaggtggctcatgcctgtaatcccagctacttgggaggctgaggcaggacaatcacttgaatctgggaggtggaggttgcagtaagccgagatcatgccattgcactccagcctgggcaacaaagcgaaactccatctcaaaaaaaaaaaaaaagaaaagaaaactgaaaagtaaggtgacctcaaaggccactgaagaaagtgtttccaggaggaaggaatggtttacttggtcaaatgctgctgatcaaggagcaaagaggtctgagaagttaccattggatttatctgcgttaggccattggtgatcttaatgagcagttttggtgcagcggtgtttggaagcctggatgcagtgggtcttgtagactgagaagctaggaacacagcaagaataagctactcttttaaatcctgctttaatgggaatagaaatagagcaagagctggagagtgaagtggatcaaaagagttgatcttttgcagatgggagaacaaatagcattagaatgattcagtagagagaaaatattattatgtcagagaaagtggggagaactgttgaagtgatgtcattgaatgggcggcgggggcgttgagatttggttgacaagttagccttggataggaacatggacagttaatccattgtaacatgatttgatagatgtgattacagaggaggcataaggacatggatttgagtgctatcttgggctgggggttgggtaaagaaagatgacatgtctaatcttgaaaggcaagtgtttgtcaggtggacaaaaggctaaagtgcatttcatgtagaggaacaggcatgagcaaaggcagaaaggtattaaaccacctttcaggccaggcgtggtggctcacacctgtaatcccagcactttgggaggccaaggtaggcggatcacaaggtcaggagatcgagaccatcctggctaacacggtaaaaccccgtctctactaaaaatacaaaaaaaattagctgggcgtggtggcaggcgcctgtagtcccagctaatcaggaggctgaggcaggagaatggcgtgaacccaggaggcggagcttgcagtgagcccagatcatgccactgcactccagcctgggcgacagagcaagacactgtctcaaaaaaaataaataaataaataaaaataaaccacctttcaggacactacaagcagtgtggtgtggttggagtgctgggcatgtgcttgttggggggtgggggtgatgaggatgggctggtagacattacaacaaggtcaaggcaagggataggcagggtcttcctacagtatatttttccattaagaggcaacagagagcagtggaaggagcacagtttttttttgtttgtttgtttgtattttgagatggagtctcagtctgtcgcccaggctggagtgcagtggcacaatctcagctcactggaacctctgcctcctgagtccaagcaattctcttgcctcagcctcctgagtagctgggattagaggcgcccaccaccacacctggctaatttttgtgttgatgaggtttcaccatgttggccagacgtctcgaacttctgacctcaagtgatccgcccacctcggtctcccaaagtgctacgattacagccgtgagccaccatacccggtcctggagcacagtattcgatatgaaacacattacccagttaacatgtaaggccagagcagtatagagtgtaaataataattcacatttcatgggctctatgtggtatctatatgcatcatctcagtggattcttgcacatctttttgaggtaggtactattattaaacctattttgggtttatacaaattaatgacttaaccaaattcacacagccagtaaatagtagagtccacatttgaacccatagccatttgcacccagtgaactttttttttttttttctttttgaggcaaggtcttgctctgttgcctaggctggagtgcagtggcacgatcacggctcactgcagtctctacctcctaggctcaagagatcttccctaccagcctggccaacatggcgaaaccccatctctattaaaaatacaaaaataagccgggcgtggtggcatgtgcctgtaatcccagctactcaggaggctgagacaggagaagagcttgaacctgggaggtggaagttgcagggagccgagatgacaccattgcactccagcatgggcaacagagtgagattccatgttaaaaaaaaaaaaaggccggacgcattggctcgcgcctgtaaccccagcactttggaaggccaaggcgggcggatcacgaggtcaagagatcaagaccatcctggccaacatggtgaaaccctgtctctactgaaaatacaaaaattagctgggcatggtggcgcatgcctgtagtcccagctgctccggaggctgaggcaggagaatcgcttgaactcaggaggtggaggttgcagtgagctgagatcttgccactgaagtccagcctggcaacagagcgagactccatctcaaaaaagatcttcccacctcaacctcccaagtagttgggactacaggcgcccaccactatggctggctgattttttgtatttttagtagagacggggtttcaccgtgttagccagggtggtctcgatctcctgacctcgtgatcggcccgcctcggcctcccaaagtgctgggattacaggcttgagccactgggcccggcccacgcctggctaatttttaaaaatatttttgtagagatgaggtcttgctatattgcccaggctggtcttgaactcctgggctcaagctatccacatgagccaccatgcccagcccccattaaacttttttttttgagatggagtctcactctgtcacccaggctgaagtacagtggtgcaatctcagctcactacagcctctccctcctggggtcaatggattctcctgcctcagcctcctgagtagctaggattacaggcgcacgtcaccacacccagctaatttttgtatttttagtagagacagggtctcgaactcctgacctcaagtgatccacccgccttggcctcccaaattgttgggattacaggcgtgatccaccacgcctggcccccgagttttttttttttttttgagacggagtctctctctgtcgcccaggctggagtgcagtgttgccatctcggctcactgcaagctctcctcttgagtaaactcttaatggctacactattttcctggctaaaacactgcagctggaatcagaagtctgaaagttgaggcccagccctgccacttgtagctacttggcattggccaagcgaagccatgtctccaaggctgtatttcccccaaccttctttcaaatagtgacttccaggattgtgaaggccaaattaaatgtgaaaatataatgaagtaactctaaaattaatagttactagttatcaaagtagcatcctggcctccagcatgtcttcccctgactttccccaccccttggaaccctgctgaattttttatttatttatttatcctttgagacggagtctcattctcttgcccaggctggagtgcagtggcacgatctcggctcactgcaacctccgcctcctgggttcaagcgactctcctgcctcagcctcccaagtagctaggattacaggtgcacactgccatgcctggctaattttttgtatttataatagacacagggtttcaccatcttggccagaccggtcttgaactcctgacctcaagtgatgcctgccacagcctcccaaagtgctgggattacaggtgtgagccactgaacctggactttagcacctttttatgtgcttattggccatttgtgtatcttctttagagaaaagtttatacaagtcctttgtctgttcttaaattgtgttcttttttgttctgagagtttttcatatattctagatagaacgcacttatcagatgtatgacttgcaaacattttctcccattctgtagattgtcttttcactttctttctttttttttttttttgagacggagtcttgctccatcgcccaggctggagtgcagtggcacgatctcagctcactgcaagctctgcctcccgggttcacgccattctgctgcctcagcctcccgagtagctgggactacaggcgcccgccaccacgtccggctaatttttttgtatttttagtagagatggggtttcaccatgttagccaggatggtctcgatctcctgacctcatgatccgcccgcctcggcctcccaaagtgctgggattacaggcgtgagccaccgcacctgacctttactgtaccttttctgtgttgaggtatgtttagatacatcagctgaaccattatgttagaattgcctacagctggctgagcatggtggctcacgtctataatcccaggacttttggaggctgaggcagaaggatcacatgagccctggagtttgagactggcctgggcatcatagtgagacccccatctctacaaaaagttaaaaaaaaattagtagccagatgtggtggcatgcacctgtggtcctagctacttgggaggctgaggtgggaggatcatttaagcccaggttgatgctgcagtgagctgtgatggcaccactgcactccagcctaggcaacagagcgagactctgcctctcaaaaaaaaaaaaaaaattgcctacagcattcagtacagtaacatgctgtacaggtttgtagcctaggagcaataggctgtatgatatagtctgggtgtgttgtaggctatagtgtctaggtttgtgtaagtacactctgtgatgttcacacaatgaaatcacccaatgacgtatttctcagaatgtatccccatcgttaagtgatgcatgattgtattttgtttgtttcatcttccaggtgaacaactttgtgatctttgaaggcttctttgcccatcaacatcgtaagtttttgcattttgttggtcacgtagtcggggtgagggaaaggaaagagctggactcttggtcctgccggcccctcactgaggggccccgccgcttccttcctcacagggccccctgctccctctctgagggcaactcgacactctcgtgctgctgcagtcgatcccacgcccgctggtaaagcctgtattgaaggggtggaactgtagtgcagtgatggctacttactctagatgccacggggtacagtgccatctgtgggcaattttggaaaattctaaagcaacccaagtctccagcagtcatgactgtttgcctttgccctcatgggagctcagtgcattttatatttggcaagacttttaactaagcaagctcattgggagcctgtttgacagctgatatcaatggaccctcttgccagttcaggtccgtcaacataggccagagtcaggctcctttgtaaaccccaggcttctgttagccagtgagggacaggctggtgcaaacagcccttccatttgcagtcacagaatagtgacacaaatggcccaaaatttaaatgttacttttagaagataacactcagagtttataacatttccaaccagataatgaaattgatatggagaaaccaaacctcagaggcactaaaatgctgtccagattccccatcccatatacacacacacacacacacacacacacacacacaaacacacttactgacagtctgagccccactccttcctcttcctcaccacctccaccttaccaacttctgacagctgtacagtgcttgcttgcacagaagagcccccttcctgagctggctctgtggccaggaaaggatgtaaccaccatccaaacagcagtctgtaaccagctatgagcatcacagtgtcaggcactgagaggcacctcaactcgctttggtttccaaggcttctcccatttagcttgttcagaaccacaggctgtgagagggactgagggccaacaaggatggtgaggtctcaggcctgcaggggagggtgctgtggataaagcttaagtgaatttgctgagaagtctttcatttgccacacatacatgatggagaatctcttgagagggaaagccgggagcaagtagagaagtgaggagggggaggctgaactttggacattacatcagcctcctgcttactctgatagctccctttcagatgcccatatttattttctttttttttttttaacctaataaaacttcagtctcttcccattttcgtataggaaggagagattgtgccctccttccaaacctcccctgacctctccagagcaattcctgattaaccaagggctttgtccatctcatccagaggaacccagggtcctcgttggcccggctgggaccattccactgccccagaataccagggggccgtgacagcacccactgacagtaagagctcactccccttggctgcccttctcctgcatctcccaggcccccagagtctccccttcgatctttctccctagctctgtgtttggcctactccttctggctttcctcaacagtgttccacattcccctcaaattcccttttggtgtgctggcattgccatggtgctgctcctgcaagttctcaggaggaactgtggtgtcagggagcagaggtttggggttggggtatagtggctgggaggaggggtgcaaagtatgtctcctaacgcttaccctgcctatgtcccctccactgccagctccagcaaggaagctgccacccaagagagcagagggagacatcaagccatactcctctagtgaccgagaatgtaagaggggcaagggtggggtgtctgggcctggggtaccttaacacaagggaagagaatgctcaggggacccagggaaaggattcgttctctctaaagactcagatttcttgggctgggcatggtggctcatgcctgtaatcccagcactttgagaggctaaggcaggcagatcgcctgagtccaggggttcaagaccagcctggccaacatggtgaaaccccgtctctactaaaaatacaaaaattagctgggcacggtggcacgtgcctgtaatcccagctacttgggaggctgaggcaggagaatggcttgaacccaggaggcggaagttgcagtgagccaagatcgtgccactgcactccagcttgggtgacagagtgagactccgtctcaaaaaagaaaaaaaaaaaaaagaaagactcagatttctctttttttctaccaaaacctttgctgtcatgactctcttccgtttttcttctttttctgtcttgctcttcattctccctgtccccagttctgaaggtagctgtggagcctccttggcccctaaacagggcccctcgccgcgccacacctccagcccacccacccccccgctccagcagcctgggaaactcaccagaacgaggtcccctccgcccctttgtgccagagcaggagctgctgcgttccttgcgcctctgccccccacaccctaccgcccgccttctgttggctgctgaccctgggggcagcccagctcaacgtcgtcgcaccaggtaataggagttgaagggctaaggagcctcacagctataaaagaggatgttagaaatggcaaagggcaatttgaatccatcagagagatggatcaataagatgggtggcttggggggggtcctgaaacctttcaagaaaaatatttgtgcaagtgatctgggaaaaaaatgcagtgaaggagcagaataggaccttatatggagcctagggaccctggctttaatgtgagagttatgtggaatggtaggaagaacaccgagatccatcaagttgggggaacagagccttctaagattgggaaaatcttcgcttaatacttgctggggaaggggcagtgtctgacagagagtgggaagccactggcttgtgtgccaagagtccatcgcagcaggcagggagtgggcatttcctttatttctctccctttctcttcacctctgacttctctgtttttctctcccccgccccccgccatttcccatctcccttcctcccatccataacatccttccacagctcccttccccgctctgaggagagtcgatactaacagctaccctctccctgccctgggagacctggggtgggcagggaacccctccctgagaacctcagacccactcttccattgcatcctgtaggacccagtggaacctgacagagcccataggattccctcttctactttcttagacagcagggatgtcagggtctcaaactgcctaacactttgtagcttttcttaacacaaaagcaccccttctctcctaacttgggctctgaatactttcccaacaggaagtctgatctgttgccagacttcttagttagatggctcatacatttatctagagaagcacactcttgcttgctgtcaaactttagaacaccatggaaggtctaagggcatcctgtgccagggaaactttttaaggaattttatctatgggataaaccccatattccctctagtgtctactggtggctctaatactgctttgtgctgcctgccacacttgccctttgagcctgcgaatggccgctagtgagcaagctctgcttcagagcagtctagttaggtagaacagggacttaccagcttcccaaagggatctactcaccattgccaaactcttcatttccacattttgtgtaggtgtcagggaaccccaaactggtgttgctttggggtctctaaaggagattggctgacaccaccatttcccccagatccagattctctgagggaggttgtttcttgagagtagatccagagtgtcaaggatctgttagatcctggaatcccttcttgcatccatccctccctggtagctaggtcccgatatactcctgtcttgtgagattgtcgagatgagatgggggaccactcttcctctgtccttcctctctcctttcctccatagcaaggacgaccttccctgctccatgcccagagtatagctagatcccttcccctccctaccctctgaatgtgtgctagatcaggtgccccactgtgtttcctgaaatccttgggagccggatctccccatctcccctactcactcttcccttttcttctctcagtgttgtctgaataaagtgtgaaatcttttgtgttttctaaattgacattttcaatgaaaaaaagaatcacaaaaaaaaaagttgtcagcctcatttgtgcgtcatcccttattttcctaggatctcaggacctctgtccctctcatttctcacttctgagatctgcacatcttttacccaggagcctcagagctcctgagtctggtgtctgcctatccccatcttcactgttagtcctcctgcagattctgtgtctcctttcatgtaggtgctggatccctgtgtgtgggcttccgtatctactccctcattccctccaggaacctccagctctccccagtgacttctaccctttactctgggcgtgcctttgccaagatgtcaaagcttaccaacatctctggatccactaattacctcctgcctcctgtattcgtcttcccactctgattacctgacgtctgctccactaaaccgctggatctctctcaagacaaacccttacctccattgagagtgcaacacagtctgtcaccctatttacagaggcccccttccttttcctcctaaattcaaaattcagccttgtcacttcctatttccctctggtctaaggaatctttttttttttttttgagatggagtcttgctctgtcgccaggctggagtgcagtggcacaatctcagctcactgcaacctccgcctcctgggttcaagcgattctcctgccttagcctcccaagtagctgggattacagaagtgcaccaccgtgcccagctagtttgtgtatttttagtagagacggggtttcaccatgttggccaggttggtctcgatctcctgatcacgtgatctgcccgtcttggcctcccaaagtgctgggattacaagcctgagccaccgcgcccagcctggtctaaggaatcttatagttaaggtaaccctgttttccaaaccaaacaccagagtacccgatccaacacatttttgaccacatgtgagtctgttcttctgacatgatttggatcacacctagccatagatttaacacattacctcaactagaaagaatagagcaataaatcagaagcactccagaaaatcttgggtataaaatgaacttcccccgcccttttctggggcacagctttgattaaaacctgttaggaatgataattacccccttctctttgttcctgtgctattccttttactcctctcctctgattcctccatacccacccatctttcatccagtagcctcctccccatcatctcccatttcttctacagggggactcccccaggtctggtagcccaaagctgctgctacagccgccatgggggggtgaattcctcatcccccaatacaggtaagtattcactcctccctaccctcaaatcaagtaggccacattcactgtctactcctgccttcccattcacatgcctgatatttccacaggcaaccaagactccaagcagggagaacaggaaacaaagaataggtgaggtctaaacccctcccctaacagcctcccaccaccatctgactcccttcctaacatcattctcagtcacttcctactcttaaatcttatcgtatgaactggacaccagctcctcccacaattccttctaccttacatcctgcaagcccctttcccccacaggttcaactctggtacttccctttggaatacggattctctgagaggttttaaatttggacatagcactaatggttccagcttcatacccatcatgtgtcctacattaaaacctggcccgagaccttgaagagtctgtaatcttaatttcctctttagtattcctataacccactctccatctccccacctaccaggtctgccagtgaggagcaggccttgtcacaggatgggtctggggagaagcccatgcacacagctcctccacaggccccggccccgccagcccagtcctggacagtgggtggggacatactcaacgccaggttcattcgaaacctgcaggaacgtcgcagcaccaggccttggtgaccgcagccccgtcaaacatcttcaaagtattatttctccctcactacaggaaagagccaaagcccaaccctcataatagatggatacattcattcattcattcattcagcaggcttatcagattcaagtcatttgtatcttttaaccagaccaataaaagtatttatttttatcacaagagctgttgaaaaatttgactcattatttcagccgcctcacccctcactgtcgttgcacccattcagccttcagccctgtttttgctcagctttttgctcaaaggcctcagctgtgaatacagcgcttgggggggcaggggaggctgtaacttgcgcaagcgcactcaggcagtctccgagcccgcgggcgcaggcgcgcttacagccgacagagcgcttcagccgcttccctcgagcctgcagtgcgcaagcgcgggacat

SEQ ID NO: 2681 - DNA, 103 bp, Homo sapiens
tggccagagccactttgggaagagcagtctatacttaccctttgtttttttgtgacggaattttgccctgtcactcaggctggagtgcagtggcatgatctcg

SEQ ID NO: 2682 - DNA, 313 bp, Homo sapiens
taaggacacagaggagcagttccagagttggtaaatacatcagctggggcattgctaaaccatcagtttccttcacaactttccactaagccatgtgtcagctttgccttataggctggctccttttttatcagtgggaaaaattttcccaaaagcttctggagacttctcttgtcacatgctccttcttaaaccggtcgtgagcaagggagaaaataaggttactgtggttggctgagactagtccagattactcctgggtcaaggccaggcatgctagctcacacctataatcccaacactttgagaggct

SEQ ID NO: 2683 - DNA, 313 bp, Homo sapiens; identical to SEQ ID NO: 2682

SEQ ID NO: 2684 - DNA, 123 bp, Homo sapiens
aggctgaggcaggagaattgcttgaacctgggaggcggaggttgcagtgagccaaggtcgtgccattgcactccagcctgggcgacaagagtgaaactccatctcaaaaaaaaaaaaaaaaaa

SEQ ID NO: 2685 - DNA, 193 bp, Homo sapiens
gggcacggtggctcacgcctgtaatcccagcactttgggaggccaaggcgggcggatcacaaggtcaggagatcgagaccatcctggctaacacggtgaaaccctgtctctactaaaaatacaaaaaattagctgggcatggtggtgggcacctatagttgcagctactctggaggctgaggcaggagaatgg

SEQ ID NO: 2686 - DNA, 104 bp, Homo sapiens
gcttgaacctgggaggcggaggttgcagtgagccaaggtcgtgccattgcactccagcctgggcgacaagagtgaaactccatctcaaaaaaaaaaaaaaaaaa

SEQ ID NO: 2687 - DNA, 347 bp, Homo sapiens
gggattacaggcgtgagccactgcacccagcctaaatctggtattcttaagagccgaaaagattatgcatcttgaataggcaagcagtttaataaatatttcatgtcagaagcaagttgtaatattatgaggacaatttctagatattcctaagtaaggaagtttcagctctgctgtaatatttttaaaaggtctcccccaacccccacatctttcccaccagttttttatagttcctttttaaagcagaattgagcctgtgggtgttttgttctagtcctagaattcactgcagaattgtataacatttggcaaaattctctgttccccaagcctgcaggcccatg

SEQ ID NO: 2688 - DNA, 131 bp, Homo sapiens
tttttttttttttttgagacggagtttcactcttgttgcctgggctggagtgcagtggcataatctcggctcactgcaacctccacctccccggttcaagcgattctcctgcctcaccctcccaagtagct

SEQ ID NO: 2689 - DNA, 937 bp, Homo sapiens
caaatagttgaaggacagagttcagaagtagcaatctgaaaacatattttagctctaaagttttaaaagaaaatgccaccttaaaaatgcttaccactaatggatttttaatcacaaaatgaagcaaatggttaaataatacacttcccaaaattatatcataaatacactaagtgtaatgtggactttttctccctgagtgtaagaaatgtaaaattacaaaatgtttaagcattaaagtgcaaatatcaatctttaggcaatgaaaaacagcgagacaaatgtataaattacatataaaggtcataactatttcagaatttgcagaataataaatgtagaaagttttaaaataataaatgagcaactcccacaaatggtacttaatttccacaaaactttttagtaaaagagtatacaatctttttaggagcacatttacctaaaaaaaattttttaatttttaaattttttttagaggaagtagaaatattaaatttcgcaagacaattttctagcatctactacttggtcattctaatatacacttttcaacaacagatttcaatacaaagatgatttgcaaattcatacatactttattcatcatctaccacatgatcaaagatgttttatgtgaacgttccctcctacttcataagctctctgccctcactccaaaaagaataaaatgcctcaaggtttattgaaggacatggttctgatgcctgacctaacaaggattggaatggctgggtggcaggcaagtggttttcaataatttattttccatgatagtataaaagaatatagaaagaaaagattaatccttttaattttgcagtaaaatttacattccctaagtgcaaaaagacctcatcctctgacacctttaaccacaaattactaaataaatttatttttgatggcaacaaaa

SEQ ID NO: 2690 - DNA, 4656 bp, Homo sapiens
gggcttttggcaggcagatcttactagtatttactaccaagctctactccagattaaccatcccagtccttctgtcagtctccgatgccatcatgcagcctggttaggagcaaaggaaaggggaaaaagaaaaacgactaattcatcttttcctgatcgtcaggaccctaaagaatggccgagccttgggggaacgagttggcgtccgcagctgccaggggggacctagagcaacttactagtttgttgcaaaataatgtaaacgtcaatgcacaaaatggatttggaaggactgcgctgcaggttggtattaagagaggtggggaaaacaagtcaataatgttgcctacgtgacccgggtttctagatttacagcttttaagctttcagggacataaaatttcactgtttttaaacctagttggttgccatattttatatctttaagtggatgcaacttctcaaaatgacgtactttgaacaaactcctcaaatccaataacatccttgatatcaagtggggtccagatttggtcttagtttttggaatgtttttgtgacggtggggattttaaagtagtcagtgtagggccgaggtttgtttgttttgttttgtttttaaagacagctctgtaaacacattattatgattattatttgaagtaaatacactgctattagtggttttacgtactttgcccccaataatagactttaacgttaattttcttgactactgatgagggtgtttttccttcaaatgcttcaagttttgacaaacgacctttcctcgtttggaatgggtggcctgggcaccgggacaggatgtacattttacagttaatgtaataccatccactcattcaggagtcgggaggtaataaaaagttgaattttctaatcaaagcacagcaacagtgtctttgtcttcacggtcatcccgtggtgggctctaattttcagtaattatatttacaggcatcaattcacacatgtaccagcttgccaagtattgtacctgataatttttttcctcttctgaatgttatcatgtaacttaggtgaaaggcttagaaacagaaaaatgacaaaatagtttaaaatagttgctttatcagagttctgatgatattcttatgagctattcttatttggaaatgcaacacttgaagctgtttttgaaaacccagtggggagagggtttttagagggctttgtttcggttacaagaattaaaaatttaagtgccaagagatatactattaacaaacaaagtccatacagtctgtacattttcagtcagaatacactggccttgcaaaaatttcagtattaaggaagtttatgcacagatactaaattatttatcttgttattgctgctacattaagtaatgattttttttcctttttctacctagtagttttgaacaggtttagtgatgatagcaaagtaacaaatttaatatattgaaaagtttccttttgaaaactcaaaagattatataaacttcacaaagaatgaactacttaacccatgttcatgataagattttacaggatttttgacgaacaggaagactgggaaattaataatattcttttaaaaagttttgacaaacatttttaatacaactttgcaatcttgtttatattaaacatacttatcaagatactaacacccacttattgtggcttagtccttgtacatataacgaaacacacacacagaaactggagtttcaaggcttattttcaatatgtataatcctgactctgaagttgtgtcataagtcaagaaataactttcttcaaaaccgtttccaatattgctattattttctgtgaaaaaaggtgaattttcttctacaattatgtttatttaactcaatttcaaaagccttttccaccttcctagtgtacatttttctatcaggttaatatcaaaggccttaatcgtatgtttgctttacgaagatccaaggtatctgtctcttatttttctcattccaggtccttaaatatgactaaatctttagagacagttgtggtcgtatcaatttttaataaccaaaaagtatgtttcattgaagttcttgaaatataaattatgtatcactgtttaccactgctccaaaggaagagctaaaaatcaacagttttatcaacaggggagcttaatatcttgtccatctatgtagtttgcatttacaaaatattactcattttaaatatattttgttatttaatgtgtgattagatttttttaaacaaacatttaaaaaagatagaacgactttgtattttccattagcatttaatttcataaacattgagtgtctattatacaagatatttattataaatttagattattatggatatacctagatataaataaaccagtgtaaattctgaaaatgtgtggcatgttaatgaaagtaatattttttcacaactaaattatatgtattttatatttgcatgctgttctacaagatactttataagagaccactgttagagtgaaatatattcaaacaatagtagataatctttgttatgtgaattatttgtatgttgatagcaagtgttaataccacattctgacttttaaaatgttggcagtttacaaatagctgttccttaaatgcttgataataactgaaaaaggaactaacacaggatcaccagttgattattaaatgagctcaaaccacaagacaaggctgtccgtgtcccaaaacacccattaaatatcttattttttcttcttttgctcatttgaaaatcaggaggcttgtcagaactttgagaaacagtatataatgtaatagggtgactatttcattattttcaagaacagttgtcctacaataatttcctactgtgatacaaggcatatcaggaacttagttttatataaattgatatcataagcaatttagaacactgtggcttatttaacaccttaataatcagtactgttttgtaacttaaaatgaaggattctaaacattgaatacacctagtagccaatattaaataacttgcaaataaaaaatatttttaagaaatgcttggaaatttggagctatatctatttggagggaacttgtaaaaattgatcatttaagaaaatatcaggcctggatttttaaaacatcatttttacactcactcatggagttggtttagagaaactcaacatccttatttgtttgcagtagctatttagaaaataaagtttaaccacatatgattttctagaattaataccacaggcacattttatgagcatgaacaatcaaacagaaggagactcttatttaaatcccaaattccatttctgttattttaataaattcgtgaaattacacaactcttcatggaacatagagaacagaattgttagcaaatgctatacatgttgcacaaattctatcttattgatcaatttatcctacttttgggcccatttaagacgttccatcatagaagctcaatttttagaagttgtcttctactttcacctactagcacttttctgcatttgaccccttcaagccccatcctatgggtcttccgcaagaactccatcaaaaataaatagttacataaatggaaggacaggcagatattttaaaatatctctgtagcatatgcacttgaaggattctaccatttctacttcttttccaggttatgaaacttggaaatcccgagattgccaggagactgctacttagaggtgctaatcccgatttgaaagaccgaactggtttcgctgtcattcatgatgcggccagagcaggtttcctggacactttacagactttgctggagtttcaagctgatgttaacatcgaggataatgaagggaacctgcccttgcacttggctgccaaagaaggccacctccgggtggtggagttcctggtgaagcacacggccagcaatgtggggcatcggaaccataagggggacaccgcctgtgatttggccaggctctatgggaggaatgaggttgttagcctgatgcaggcaaatggggctgggggagccacaaatcttcaataaacgtggggagggctcccccacgttgcctctactttatcaattaactgagtagctctcctgacttttaatgtcatttgttaaaatacagttctgtcatatgttaagcagctaaattttctgaaactgcataagtgaaaatcttacaacaggcttatgaatatatttaagcaacatctttttaacctgcaaaatctgttctaacatgtaattgcagataactttgactttcttctgaatattttatctttccttggcttttcccttgcttccccttttgccaatctcaacacccaagttgaagactttgtttttaaaatggtttgtcctgatgcttttgtctaattaaaacactttcaaaacaggacaacatttttctgtgattttccctcctttagaacccatacacaacttatcacttgctaaggagaactgtactaaaagttattgaatgtcttaagtctttacactagaaaaggtagaccaactggaaaactagacatactctcttgatgattcagttgttttcatcctttacccatgtcccgtccaccttggtgcctagtatttctgctttaaa

SEQ ID NO: 2691 - DNA, 1263 bp, Homo sapiens
agcaggccttcatcagctgctccttgctgggttccggagaaaatgctcccttcttggagacatcggtgacccacagaatgcacaggtatgctgcaggccacacacctggggacagagggtctaaggactgggcacatcatgctgcaaattctttcctccagggcccctctcagagctctcagtctggtcgtgctctgtagcctgtgcaggctcctctgcgatgagaaatacccagtgtccagtggatgaaatgctcagggtgaggcagtgccctggaccacatgaacagcaactcacacggcgtgtgtggagtagaacacacgggcggggccggctgcctggttctgagcctcacagtctgaccccccaaagctatggtggtttcccctggaccacacagctgaatgccctcagggcttgcaccacgcccccagtttctctcttctaagacccagactctgagctgggcatattctgagttcctcctccccacgataggtccacagctactcagctcagaagcaggaccacagagcaagggaaaccaggcccaaggtcccctctaagcaagcactgctcacctgcccacgggtctgacccagcattacacacagcatcaggcccttgtctcatatttgtacctgacttccactccattcattcaaaacatgttgtctgcacgtcctgggctctgcagtagggggtgacagttcactgaaggctccttggtccccaggaggcagggtcaactctgcctgggtctccagggctcagcctgaacttcagcctgaatctgccaccaccccgccctggacatgccaacaggtgagcaccccacttctgccccctccccgccaggtctctttgcagaggcccaggccccgttcagcttccccactggtccctggtgtccatctccatgcccagagctcctcattctcttcctgactctcgtttctctgcacggctctcttgtctcctacccacaccttcatagatgatgagtaagtgggtctttccttaggttcccgcaaacatggacttatcgcacatccacattgatgtcagaaaggtcacagctatatgctgaccataataatgatggggacgtggaccccggcacccagagtgggcaccgcaccatgctaaggagaagcaatgagcaagccagccctggatgtctcctggagtcgagagaggcttggggcccggctgttcaaagtgtggccccagaccagcaacatcagtgtcacctgggagctt

SEQ ID NO: 2692 - DNA, 1263 bp, Homo sapiens
agcaggccttcatcagctgctccttgctgggttccggagaaaatgctcccttcttggagacatcggtgacccacagaatgcacaggtatgctgcaggccacacacctggggacagagggtctaaggactgggcacatcatgctgcaaattctttcctccagggcccctctcagagctctcagtctggtcgtgctctgtagcctgtgcaggctcctctgcgatgagaaatacccagtgtccagtggatgaaatgctcagggtgaggcagtgccctggaccacatgaacagcaactcacacggcgtgtgtggagtagaacacacgggcggggccggctgcctggttctgagcctcacagtctgaccccccaaagctatggtggtttcccctggaccacacagctgaatgccctcagggcttgcaccacgcccccagtttctctcttctaagacccagactctgagctgggcatattctgagttcctcctccccacgataggtccacagctactcagctcagaagcaggaccacagagcaagggaaaccaggcccaaggtcccctctaagcaagcactgctcacctgcccacgggtctgacccagcattacacacagcatcaggcccttgtctcatatttgtacctgacttccactccattcattcaaaacatgttgtctgcacgtcctgggctctgcagtagggggtgacagttcactgaaggctccttggtccccaggaggcagggtcaactctgcctgggtctccagggctcagcctgaacttcagcctgaatctgccaccaccccgccctggacatgccaacaggtgagcaccctacttctgccccctccccgccaggtctctttgcagaggcccaggccccgttcagcttccccactggtccctggtgtccatctccatgcccagagctcctcattctcttcctgactctcgtttctctgcacggctctcttgtctcctacccacaccttcatagatgatgagtaagtgggtctttccttaggttcccgcaaacatggacttatcgcacatccacattgatgtcagaaaggtcacagctatatgctgaccataataatgatggggacgtggaccccggcacccagagtgggcaccgcaccatgctaaggagaagcaatgagcaagccagccctggatgtctcctggagtcgagagaggcttggggcccggctgttcaaagtgtggccccagaccagcaacatcagtgtcacctgggagctt

SEQ ID NO: 2693 - DNA, 285 bp, Homo sapiens
ccagaaatctgctttttaatccaagagcagcatctgaaaccagagtcaagactggagaaccaggggctgccttctcggtcagacagactcagaggaggccagtatccagatggtgtcgcctcatacactgcaaacctgaaaacaggccaccgtgcccacctgctccctggaggtcagccacatgcggagatccacccagcagataggtttttggattttgctgatcgatgggaaggatccatcgatgtggattccaagcctttcaataaaagcgactttgatgtt

SEQ ID NO: 2694 - DNA, 285 bp, Homo sapiens
ccagaaatctgctttttaatccaagagcagcatctgaaaccagagtcaagactggagaaccaggggctgccttctcggtcagacagactcggaggaggccagtatccagatggtgtcgcctcatacactgcaaacctgaaaacaggccaccgtgcccacctgctccctggaggtcagccacatgcggagatccacccagcagataggtttttggattttgctgatcgatgggaaggatccatcgatgtggattccaagcctttcaataaaagcgactttgatgtt

SEQ ID NO: 2695 - DNA, 17996 bp, Homo sapiens
ccattttccaggagcaggggatggcggagtcggtgcacacctggcaggaccatggctatttagcaacctacacaaacaagaacggcaggtgagcagtctccagtgctgttcttcatacctggtcacttatgagcagagagggtgacagagtggaggatgggggtggcatccggcatttttttttctcctttgacatcttttaggatgggaatggaacttggtgcttctcaaccgtagctgcacatcagaatctcctggtagcgttactgaccacaggttcttaagctctcatgtatatagagattgacaggaggccaaacatgtttcccagacaagttttttgttaagactgatgcccagagtgggcataagggaggcagcccaggaaaagttttgtggcttactcccccaagggcagctgcaggtgatgttttgaagggagtgacgtgaatagttcatgaggtagatgagtgtcattacaggtacgcacccagggagtggtgtgcagactcagtgaggcctcctgctaatgtatacaccctgaagtggctggtgagccccgctcttggcggggactttagcgtaatagtaagacgggcaggatcgctcactgggctcctgcaagcggtaggtcaactccctggagtaaaaagtttatggtagaactcagcctcttaagtccctggagtaagatttaccataggaagctgcttatcttagtgttttccaggtctctggtcagcagagatgatatcggaggggctggggtccagatggatgggttggttggggtgcccaccacctgtggggacccactagtttgcagcagaggcccgtagggggcatgccgaggccttctcgctgcaggatgctgagctgcagatgcccttgctcagctcgaagtagggtgggtgcaggctgaggttgcctgctctaggatggccagcagcagtgctgcagggccccaggggcagcccgaacagagcctcaagcagcgctttgccatcttcctggctcctagagcctggtatttctgtaagtaagtgtgttattacggttggggggagcccaggtcccttctctactctgtttctggagagctttcacgaaacactcgtgcatttcccccagaaattgaggtcacagggcctggacatctggatttctccaaagccccagtggttctatgtggccaggaccaagaacccctggtggcataagcagtttgaaaaggcaggcaatgatctcctgggcccctaccgtaagagttcttgaagcaataagtggatctgcggcagggcccagattccatttccaggaagctcccgggggatgctgatgctgctggacagctgaccacacttggagtagcactgttatgactgatgatcagctaccgcagaccatggtaaaatgcagaagaaaacctaaactaagaaatgactgataacaagaaaccagtgcgttgagctcttggtatttccttaaatcttggtttgtattatatctggactggcttagtatgtaaaactactaattaagattcttagtaatttgcactattaatttagaaatgtaatagggtgcagtatgtactgctcaggtgatgagtgcaccaaaatctcacgaatcagcactaaagaatttactcatgtaaccaaacaacacccgttccccaataacctatggaaataaaaattaaaataaataaaaatgtgaactccaggatggggtattttcgatggcttttattctgttacctcagtgggtacccagtactggaattccacgtggcttccttaatgtcccactttttctctctttgtttctctattaaaggaaaaagtacccacctccatgatattccagagacctagagatgagggaaacctgtactttttgagctcactgccccttccactattctctctataagtctccatggccaacccctgtggcattaattggtgttctctatcctgatacctctcaaagacatcctaaccccttcttccccaagcccaggcttgtatttctaactgtgtagcaaacctccctgtgtgtttagtcgatacctcaaatgtatctaagatgatgatttcttcctcatatgaacaccaccaccaaaccctcctctcccctgtgtccttttcttccctgctgtgacccagttgatggatggtctcttggaagcagaggctgtagctgtcctagagccctctggctcctgcaggattacactgagcccctccctgtacctgccgcctctcactgtttttactgtggtccatcttttggggactacagcaaattggaactcatcatccaccgcctccggtggcaggctcctcagccagcaccaggtgaaaagttgcacttcttatctcctaaaggcctttgctgctgggccctgcctacctctgtatgacagttattgaagtttctaccataggcaccaattccagttgtacaggagacttagaattcttcccagaaggggtttttgagtgacaagagctgttcggaaactgcttcgaaaagcaataaacaaaaacaaaaaccccaaatgaactgcttagggttttcgttgttgttgttgtttttgagaccgaatcttgctctgttgcccaggctggagtgcagtggcacaatcttggcttactgcaacctctgcctcccgggttcaaacagttctccacctcagccttccaagtggctggaattacaggcactcaccaccacatccagataattttgtgtttttaatagagacgtggtttcaccacgttgcccaggctggtctcgaactcctggctcaagccatccacctgcctcggcctcccaaagtgttgggattacaggcatgagccaccgcgcctggccagcttagtttttaagagttttctacctggtctccttcctctctcacttggtcaactggtacccaccccgaggtgcctgtcctgaaacctcacctctcctacccatgcatgggcttggggaaaggacctgagccaccttttattcaggttctctattccctgcccccggaccccaggcacactttcccccctctatttctggttttatccctagtagcaccttaatccttgacactgccttctagcattctctgtgttcatgctagaaccacccaagtggataaaggggaccttacttctctattgttccttccccctctcctctctgctgctggtgaaggagggaaaggaaagatgatcctctcattctggtgtagaagagtttgtggactctggggaagaacttgatttctgaggtcacttaagggctgaaggtgaaaaattaactagttttgttttattttaaattttttatagagacagggtctcactctgtcgcccaggctggagtgcagtggtgcgatcatggctcacttaggccttgacctcccgggcttaaggaatcctcctgcctcatcctcccaagtagctgggactacaggcgtgtgccaccatgcttagcttattatttttagtttttttttttttttttttaatccaagcacactgtctgtattctctgaacagaattgatcttctaatttagtatttttcaaacatttctttacctataatttgtagtaggaggtaatcataaccctggaaataacacatctgtgtaaatgcaaaacaaatacatgcataggccgggcatggtggctcacgcctgtagtctcaacactttgggaggccaaggcaggtggatcacctgaggtcaggagttcaagacccacctggccaacatggtgaaaccccgtctctactaaaaatacaaaattagccaggtgtggtgggacacgcctgtggtcccagctactcgggaggctgagacaggagaatcgcttgaacccaggaggtggaggctgcagtgagccgagatcatgtcactgcactccagcctgggcaagacagagtgcgactccatctcagaaaaaaaaaaaccaacatgcatataactaaaacagaagtttcatcaaatacatcttggtgcatgtgatacactcaaatatgtttatttcattaagaaaaagggctggtcagaaaattttgtgtaaaggttgctgtcacatttttaaaaatctttaaaaatgtaaaccattcttaacttagcttgcaggctttacaaaaacatactgtgggatggattaggtttgcaggcagttggcctggattttccagagtgcctactaaattaatttacctaccaccagcctgcagttaggaaaaaatggctctggtttgaactctgaatgttaatgagaaaaaccagtttacccttctccacactcccttcctcttaaggcagtagttactaaacctggcaaaattacctagagaacctttttaaaaaccagattcacagaactgctactgaatcactttctgggcccaagaaccagttttgaaaaccttaatatttggtaatgccctctaaaccttccacaaatgattggtagtttctccccgcaagacgcagccctagtaagaaagcaaaaagcttaactgtatacttttggggaaataaagagcagtggtcttttaattgggtgacatctctctctctctctcttttttttttaatgccccgatacaattcttaagcttaaaattatattttcctttgtagctttgccaatttgagaatttacccacatggattggtgttgctggaccttcagagttatgatggtgatgcgcaaggcaaagaagagatcgacagtgtcggtttttcactttcatttactcagtgtttaaggatcatagtatctgcttagcttagtgttaaaataatgttctcttcattgcttactttccagttaattttaaactttcctccctccacataagtgattttagaatagaagtagttgtttagttgtttttaggaacctgggtgtcagcgttcccttttaactgccttagtatgagtaatcttattttccactggagggaatagaaaacctttaaccaggattttatagctgcagtaccctttagccttcctcttccgtgttactttgttgctaacttacgctaaggttaggtcagcaacatgaagggatagttggtatgggagagtggaattgggccaggcgtctacaggctgctagagggtaggaggagggacaggtcaatcttgcacagctctgtcaacatggcctcagtcgttgggtctgtaatttagttcttccatgcagcttattctacaagcccattgatttttcttttaattgtagattttgaacaaagtagaggaaagaatgaaagaattgagtcaggacagtactgggcgggtgaaacggtaagtccactcttgaatgtccttttatatttaatcgattgaaacaatcatagttggctgggcgcggtagctcacacctgtaatcccagcaatttaggaggccgaggcaggcggatcacttgaagtcaggagtttgagaccagcctggccaatgtggcaaaacaccgtctctactaaaaatacaaaaattagctggacgtggtagtgcatgcctgtaattccagctacttgaaaggctgacgcatgcgaatggcctgaaccgaggaggcaggaagcagaggttgcagtgagctgagatcatcgcaccgctgcactcctgcctgggtgacacaatgagactgtctcaaaaaaaaaaaaaaaaaaaaaaaattcagaatggcagtgtggtccccagtagtgtctgcttaagatgtggaaaagatcaaactcagcacctccttctggcaacatggtgaactgaactactgggcccctcacaccaaaacaagacagtgtatgaacattcatgtgcatggatgcacacacacaaatgctaggtaaaatgaaactaaggcagaaaggggatatggaccaactccaaggagttggaactgcctaaagtggagacccaggtagagctgccacctcatcaaagggagctagaaaactcctgacttcagttcgagaccagcctgaccaacatgggtgaaaccccgtctctactaaaaatagaaaaagtagccaggcgtggtggtacgtgcttgtaatcccagcttctcaggaggctgaggcaggagaatagcttgaacccgggaagcggaggttgcagtgagctgagatcgcaccactgcgctccatcctgggcaacagagtgaaactcgcctcaaaacaaaacaaaacaaatacctgacttcaacctttccaggaaagagaaaaggtcactttttctccttcaggctctaggccccagagtgaagttaagcaattttaagagacttccgacagggtggggtgataagaaaatttgcctcaaggcgttcaaagaagaaaactttccaagatactaagaattgataggccaccaactttaagctgccataggcaggttattttcaagtgatcatgaggaaaatgaagctctccctatccagtgggatgggcactagccccacatggctatttaaagttaattaaaatacacaattcagttccttagtcacaatagctagtggttagtgtctgccatgtgggacagtacaactacggaacattttcatcatccaaatttctatcggacactgccgaagtgtttgccagtggtgtcagattttaaaagaatgcaattcggacatcgtgggaaggaactagtgtctggtacatcatgggaattaagaagtgctttggatacacagcatgcaaatgcaggacaatttactcttgccctgccttggtggatcctcatcaggccttaaggcatagaaggcctgtcccttgctcataaaattaacctcagttgcagagaccaacacagagggacttcctcattgctgagcaacggaaatacaggtttctccagttcatggcactttccagaagaaggaatccttattggcaagtgttaggatgtttaagtacttaattactcagcatgctaagtttgatcagcccacaagaaagctccagagcagatgtaagataactaggtaattgtttaaccttctgtagttaaagaggaaagcaggaaactgaaagtgaaaagaagacgccacagtatagaactatttttttgagatctgttagagcactcaggctcttttggagcacccaagctcagtttagggtccccagccatgtctcttacccttcaccttcctttaaaaacacatccacacccatatacccataccactttttggacatttcatcttttcctgttggcagggttttccttatctgcacccatttggaatgaacaggttccccactgtcagaaagggtcttaactttatgataatgaattggtccacatcaaaatgtggtctgatttttatcagttgcctctaggagtgagtaaacagcatacatttatgggcttcagcattcatgagaagtctggttcttttccttttttggtataggagttttctaagagtggagttaagctttagatcttcaaaataccttgcttatgcttgtcacagtttttattatcttttcatgaaataaggttgacgacagctagaaattgggtataccttgttgtaaaccctttgttactggcctcaaaaggacaaggattgctatccttttttttttttttttttttaaatctggagaataaagatcagaggttaaatgttagagattaaatcattaacaaataacccagtaacattatctgaaattattcccctttgataagttaagtctgaattttcgactaagaagctatgggatgtacttgaatttatttttgttttctactttcaagtgaaaaaacaagaaaacaaggtcacataaattaactttgattttaaaaggttcttgcaatttacacagtatacctaaggcctgggctataatctacctgaattggtgtagtccagtttcatttttcagcagtgaaggttgaaacgagtttggtagggtgctctacagtacctcctggtagcccgttatagggctaccagcgagatgccctttaatgctaggttgagcacttcatcagggtaatggcatttacatcctgttaagatccttctttctttgctagtctttaaaaaaaccatagagttacaatgtaggaaagagctcttcaccttagccaaggcactattgacacaattgagaacaggcactgtttagtttcagtgggtttgcctgtagtgcagtaattgccgataggtggctggctgtcaaggagagggtagtcttcctcccctggaagtgagtgactttgtcgttcatccaatgccatgggtggctcactctcacctcactccccaccatcagccaggggtggaagaggcttcctccaagtcctgttcgcctgctctctagcagttgtcctgattggtgcttcacattttacaatttacaagaaaaaccctctagaatgcctcacattctgaaagctgaatttgttcacatggaaggtgaagaagtggttaaatgaagagttgtcaggatgacatgaatttatgggagtttgccttttcaatctcggtgttctttatagatgttagtattccctcatagaaagccttgttaacttgtaacaggtttagactgtactcttggaagctggtgagcagggaagggaaagagactcataagagtacgtcaggccgcatatcccagcattttacatgtctacagctgtacatcatggcgttttaatgttgaacactactgtgtttgagaacacatgactcacgcagttgtgttatgtatgcagtgagctctcgttttctttgtgtttgggttagacttgccaagccccttttccaggtcttttttttcctgtcatttagtgtcctctgctggtaccttctagtacattcatcctgtgaaaaataccgggtatttacaaaagaatgaatgaaaaaatcatcattttgcagcctctgtagtagtaactggttcaggccagaatcttctgcatgctaaaaccactggtaaaggtttgttggggggtgaggacttctacctagtttcagagcaccaccccacagcctgcttagtaatttcagagggtgaaaaaggtacctttgcaaatggagagagcccatgaataccactttaaccaagtgatcacagacttagcatcaccaataataggacagatacacatcttgtgttcccgatgtgatgcctgtgtaatatatgtcaacctgattctaaccatgaagagtgagagattatcaggtaaacccacgagtcatttttcagcagaatagctggtctgtacttggagatatcagtgtcatgaaacataccagtaaaaaaaaaattatacgttacatgaggataaaaaagaaaaaaaaaacagggaaatgcagtgtatgagcctttattcaagagcagaacatctataaaggatataactggggacacttgaagatggactctgtactagataaccatatcatacccatgtgaactggtgtaaatgtggtaatgtccatgtagttatgtagatagtcttaagagacagatgctgctggagcatttgaaatatgaagtgtgcagtggccatcttctccttcagctttttgttagagaaaatctaaagcatgacaggattttttaaaaagtgaactgtgtacaatagttgtcaacatttggtggtggccgtgattatataaaactaaaagcccaagctttggattcgttttgtgcttgtcaaaagtcggcagtcatgtggctttcttttgcacactcttcatcctagctccacttgtaaggcagtgttctagtaaggtacatttctgtttttctctttttccagattaccacccatagtgcgaggaggagccatcgacagatactggcccaccgccgacgggcgcctggttgaatatgacatagatgaagtggtatatgacgaagattcaccttatcaaaatataaaaattctacactcgaagcagtttggaaatattctcatccttagtggggatgttagtaagtattccatccctgccccgatcacgtaacaaagtggtgatgtgttgaatgatggtgttttcctgacaattactactgtcgtggatttgtttgagtttgtttttgacactgctggtttttgagatgcacatttatgtcatattaacctgtggattgtctgggctttcacataaactttgtcttgacattgcttccttagtgatgagtatttggattgtatttcaaaagaaaatgcatttgcatatttaaaaaaaaaaacctttttgttacagaacaattcaaacctaagtagacaaactagtgtgatgaacccacatgtacttaccatcgagtgtgaacaattaccacctcctagccagtcttattttacctaaaccccagtccactttgtccctctcatattattttgaagcagctcacagacatcatattatttcatttgtaaagatgtaattgcttttagttattcggtatattgacacatttttaaggctggattttcttcccactgactaatgtccatttgtattaggtgtcagatgatcagggttgatgaaaaagtcctcaatggaaaaaaagcttgcaaattgttcacagttttaaaaaattgaaaatgaaaaatttacattttggtctagatcccagctcttcagtgtggtggggccaggtggtttgtgtgttaaggtagactcaccatttggatctgtttctcctccctagatttggcagagagtgatttggcatatacccgggccatcatgggcagtggcaaagaagattacactggcaaagatgtactcattctgggaggtggagacggaggcatattgtgtgaaatagtcaaactaaaaccaaagatggtcactatggtagagatatcctttgttgtataagagaacaagttcagtgggcttcttttgtttccttccttcagtgtctcacaactcaaattaatgttaccacagactagaggcaaatgtgttacctagactgccttgaacagacaatttagtaacagtacccttttatgtggccatcaacaaagaaataatcagctgggcacagtggctcatgcctgtaatcctagcactttgggaggccgaggcgggtggatcacctgaggtcaggagttcaagaccagcctgatcgacatggcgaaaccctacctctactaaaattacaaaaattagccaggcatggtggcgggcacctgtaatcccagctactcgggaggctgagacaggagaattgcttgaaccctaggtggcagaggttgcagtaagccaagattgcgcaacttcactccagcctgggtgacagtaagactctgtctcaaaaacaaacaaataatctacctagttgaggattaaagagcaaaggactttgatactgtgtctgctgcctagcagtttccaaaatggcttctctaaagccatctcatgaggagaaaagaagattaagttccttttgagtgtccttagtgtgaaaataaagtcactgcctcattcatcattttgttaaatttgtgatacccaagttagtattataaaacctttgtttgtcttaatcctttctttaaagtattactatttcagaattctttgatatacccaaattctccttaacctgttgcggacattgaccaaatggtgattgatgggtgtaagaaatacatgcgaaaaacgtgtggcgatgtcttagacaatcttaaaggagactgctatcaggtaattgttttctggataatgtagttttaagtgaactaataatataagttattgatcagaattgtgccttattaaaacagcttttagtatagttggttgagaagataaatacatcatctgtctcttcatatgagttatatgtatatttgtatttagggtgcacacgtaccaatgatgggaaagcaccaactccagattctctgaattaaataaaattaattctttttttttttattatactttcagttctacggtacatgtgcagaatgtacaggtttgttacataggtatacacgtgccatggtggtttgctgcacctatgaacccatcatctaggttttaagccctgcatgcgttaggtatttctcctaatgctatccttcccctagccccctacccccgatcggccccggtgtgtgatgttcccctccctgtgtccatgtgttctcattgttcagcttacacttaggagtgagaacatgcggtgtttggttttctgttcttgtgttagtttgctgagaatgatggtttccagcttcatccatgtccttgcagaggacatgaactcattcttttttatggctgcatagtattccatggcatatatgtgccacattttctttatccagcctatccttaatgggcatttgggttggttccaagtctttgctattgtgaatagtgccgcaataaatatacgtgtgcatgtgtctttatagtagaatgacttataatcctttgtatgtatacccagtaatgtgatcgctgggtcaaatggtatttctagtcctagatccttgaggaatcgctacgctgtcttctacaatggttgaactaatttacactcccaccaacagtataaaagtgttcctatttctcctcatcctctccagcatctgttgcttcctgactttttaatgatggccattctaactccagcttgggctgcagagcgagaatgtctcaaaaaaaaaaaaaaatcttaataaaaaaaaaaaccttaataataataataaaaaagaaaccttagtagtaaaaatcaagtagtacacaaagctaaagattgcttttacatatgtacaaaatttccaagtaaaataataagctaaatctggcaaattaagtctatattatgctcaagtaggatttagttagaagtgtaaagatttcaattttaagaaatctgtcaacttaattcgttaggtgaataatttaaaggaggaaaataacagatgacaaagaatttgagaatatttagcagtcattttaaataaaaactaatgcagtatagccatgtaaaattagccaggtgtggcggcgtgtgcctgtaattccagctacatggaaggctgaggcaggagaatcgcttgaacccggaaggtggaggttgcagtgagctgagattgcaccactgcactccagcctgggcaacagagggagactgtctccaaaaaaaaaaaaaaatatatatatatatatatatatatttccatctaacaaatctgtacatgtacttcctgaatctaaaataaaagttaaattataaattacttgaataaaataaaattgcaatagagatgaaactacctgaacgttaatagaaacttaggttgtggtaaatagaaaaatagaaaatataatagatagcaaaagccatttccactgaaaataggaagaagatgaggatgcctattatctttttcaacattattttttgaggtagctgagatagtaaagtagatgaaaacagtataaatctaattatttgtagatgatgtgaatactagaaaatccaggaaacttacgtaggaaattatttgaattaatgagaatttgataaagtgattggataaagccagcctagattttttctctatactaaatgctaactcatttaaataggatttccttcccacccatttcctttcaaagtaatcaagtgttaaattcctaggaatatatttaacaagaatggtattgtgagactggtatgaattatgttaagatgttattgaaagacatcaaagtctgaatatgtggagaggcatgctgtatttcttgtattgaaagaacaggccgggcttggtggctcacctgtaatcccagcactttgggaggccgaggtgggtggatcacttgaagtcaggagttggagaacagcctggtcaacatggtgaaatcctgtctctactaaaaatacaaaaattagcccgacgtggtggtgggtgcttataatccagctactctggaggctgaggcaggagaattgcttgaacccgggaggtggaggttgcagtgagccaagattgcaccactgcactccagcctgggtggcagagcaagactccgtctcaaaaaaaaaaaggaacaatgtctattcttcccaatttattatgagtaatcccaaggaggggggaggggtttaaaagtagaccaactgattttgaagttgatttgtaaaaataagtatctaagaatacccaagaaaacttgaaaaaagaatcatagtgtgaagcgaaatatgtcctatttgttgttaatgtactataaggcacgataatcaaataggaagtatgaaaggaatacacaaggacctaggaatgtcaaaggaacttgaacaggtctgagtatgtattcctacacactgctaatatggtctaagatacatttcagttgacttgggaaaagcgttagttgagttagtgtgtgatgccggtataagaagttatccatctgcatgagaaccaagttagctaacaatagaaataggaattttggtgacttaggctctaaatgtaaaaactaatacatttaagacaatttagagtacttaaccttggagttcagaaatctcttaaagataggacactcaaactgttaatggtattataatgttgtcattaccaagccaaaagtcagactagaagaaagactagtaacaagcatgacagggaattgatcccttgaataatgcagagtccctacaacttagaaatgaagttagctaaatttaaaaaggtatagaggatatttactggtacttctcagaataagtcaaataacctgtaaaaagtaccacaagacaggccgggcgcggtggctcacacctgtaatcccagcactttgggaggctgaggtgggcggatcacgaggtcaggagatcgagaccatcctggctaacatagtgaaaccccgtctccactaaaaaaatacaaaaaaaaattagctgggcgtggtggcgggcacctgtagtctcagctactcgggaggctgaggcaggagaatggcgtgaacccgggaggcagagcttgcagtgagcccagatcgcatcactgcactccagcctgggcgacagagcaagacttgtctcaaaaaaaaaaaaaaaaaaaagtaccacaagacggtcaaccctgttggtggcccaggaagttcttgtgaaaacattagcaacagacttcacaaaatttagtagaggggcaatatctcatgctggggaggttgtggggagacaggtgctcatatgcattgctggttggcgtgtgaattgctatcaaaaccggaacacacggcttctagccggtgtttgagcacacagcccacagttaaaaaggtgtcactacaaggttttattatagctgtgcttgtagtgaccaaggcttggcaatgacaacagaaagaatgtttttagtggaatggtgtattttttaaaatgtgtgttattacctggagagatgttgggtgaaatgttcaagttccaaatgatgtgtgggattcaaattttacaaaagagaacatacatttgtgtttgtgtgcaagtattcgtaagaatctgtgtgaacgtatggaaaaaatatgagcatatcaaacaggattaatacatggattgaaagcaacggtggtgttagtacctcctatatttttccatagttggacttgtatgatgcattgaggcaagttataaaacaataggacagaaaagtcccagtttcttaaaattataactgtgaggctataagaagaatgatgagaaataacatgggataggttatcttagggaattgtggtgaactttttttaattttttttgagtcaaggtcttgctctgtcactcaggctggagcacagtggtgcgcgatgatcatggctcactacagcctcaaactcccgggctcaagcgatcctcccacctcaacttcctgagtagccgggactacaggcagataccactaggcccagctgatttttcttttttttctagagacgggctttcaccatgtcgcccaggctgctctagtactcctgggctccattgttccgcccacctcaacttcccaaagtactgggattacaggtgttgggccactgaccccagcctggcaaactcttaaactcttggtttctgactattatatttaatttttcttttacttaatgtattttttttttgaattagaaaactaaaagatgacagtaactcctgtttagttcaggatgttgcttagatccagatgtgtccccagcatagagcctcagtacttcaaagatacagccaacctcaaacttcttttctgtgttaactatatatgatctgtatgggaattccagctggtctctttattgactctgatggtgggagctgttatatatagctttattagcagtagcccaagcgttagagaaaattgagaaataacatgttaatagtttgagtaaggtgcaaaagtgaatccataaacaatgaagtcattcagtgcttagtataaaagaaaaattaggctgggtacggtggctcatgcctctaatcccagcactatgagagtctgaggtgggcagattgcttgagcccaggagttcaagaccagcctgggcaacgtagtgagaccctgtctctagaaaaactttttaaaaatagtttattaattaaaaaaataaaaattaaaagaagatgatacagatagtgataggagaggcagtatagattagagatgaaagtatgaagttggctttcagatagtaataggtatacttcgtggatctatgggcaagctggataacacctcaagtttgtttctgcattggtaaaatgggatgataatagtgcctctaggattgttgttttattgaaatgagaaggcatataaagcatatatggtaagcacttaatttttgctgttaacagacatagatgaaagttttttggttcctgtagcagttgctgtggatagctgtggatataagcccatacttggcgcttttttcctccttcctttactattgttttttgtttaactacatccacatgttggctcactcatctattcctgttctttctggaaggttctaatagaagactgtatcccggtactgaagaggtacgccaaagaagggagagaatttgattatgtgattaatgatttgacagctgttccaatctccacgtctccagaagaaggtagatttttttaaccaagatatttatgatggaaatgtttctcttggcaccatgtgagggtgaaaggatcctagagattgtgtagttctctcacgtttttgaaaaagggagttaaattgaggtccatggtggaaagatgactggatttggcttcaattcctgttctgccactcaatgagtgaactaattcagtcatttgaaacaaaaatgaagtaaaatgactcattacattaatgagacagtaaatcatttgacaatttatttaaattatgtgattttcaacctgtattggtacaaactggtcacttatctaagcaacgacatagataattccctttctcaaaccagatgtttgttccaaatcacagctagttcgtgtttttttctataaactcaagttcctgctgagtttgcaggctctgaatttctctcaggattttgctgcttgcccccttatttaaagcagttttctttcacgtttcagccactgcctttgtgtcaaatctattggtattttgagagcgagcagtgctaggtggatgtgattttggcatccaaaatcaatttcattatcgttcatgaacaagctctttgaatagtgggtcttacactcgtggctctttttctttttcctcttttggtattgagtattcgaatattttacttcagatgttgtggatacatacaaacccatatttatgaaacttgttcttttaaacattcagattccacatgggagtttctcagactgattcttgacctctcaatgaaagtgttgaaacaggatgggaaatattttacacagg

SEQ ID NO: 2696 - DNA, 139 bp, Homo sapiens
gtgaaaccccgtctctactacaaatacaaaaaaaaaaaaaaaaagccgggcgtggtggcgggcgcctgtagtcctagctactcgggaggctgaggcaggagaatggtgtgaacctggaaggcggagcttgcagtgagcc

SEQ ID NO: 2697 - DNA, 1626 bp, Homo sapiens
gaatgaatgaagtactctagcagtgttctgattaacacagtggaaaaaaaagattgttagccatagtattactggcttcttattctatcaactgaaactgttaatcattttgagatttgaaataaagataatggctttatgctccgggtaacaagtaagacaaactaggtgaactttgtatggatgtggagaggtcgaaaaaatgtaatcggtttaatctggggaaactttttcgagaatgtggaaattctataccaaaagatcttttcttaaagcatagcttctcttactttttttcttaggataatattttctaagcatataattgcaaactgggtaaaatattttaataccacattctataagtaggggagaatgggccagggactaggaattacccatttttataaaatgaataaaatgagcatggtggtgtgcacctatagtcccagctactcgggaggctgaagtgggagaaccgcttgaatctgggaggtgggggctgcagtgagtcgagattgcaccactgcactccagcctaggtgacagagtgagaccctgtctcaaaaaaaaaaaaagacaaaacttaccatttcatccatttttttaagcatatagtatagtcgcattaagtgcatttacaatgttgggcaaccatcaccactatccagatctttcttgttatcccaagcagaaactctgtacctattaacggtaattccccatttctatcttcccacagccctcggtaacttctgttataatttggctctgaattatttattctaggtacctcatataatttgaatatgtatttgtcttttgtgtcttatttagtgtaatgttttcaagttcatccatgttgtatcttgtgtccaaattttattcctttttagggtgaatacttttccattgtatgtatataccgcattttgtatccattcatctggtgacagacgtttgggtcatcttcacctcctgacgtttgtgaataaagctgctatgattactggagtacaaatactcatttgagtttttgttttcagttctttgggatctatacctagaagtggaattgccacatcatatactaattctgtgtttaaactttgagaaaccaccaaattgttttccaccgcagctacactattttacattcttaccagcagtccactgagtttccaatatcttgtagcccacacttaccttctggcctttatattttggtttttgtttgtttgtttgctttttatttttgaacagttgctctttcttatatctcatttggggttgggaaaatgaattaattgatctcaacaaaccttttaagtatcaggaccaggcacggtggcatatgcgtgtaattgtagcactttgggaggccagggcaggaggatcacttaagcccaggaatttgagatcagcctgggcaacacaaggagaccctatctctacaaaaagtttaaaaattagctgagtgtggtggtgcgtgcctgtagtcccagctactcaggaggctgagataagaggattgcttgagcccagtctgaggttgcagtgagctatgattgtgccactgcaatccagcctgagtgacagagcgagaccttgtctcttaaaaaaaaa

SEQ ID NO: 2698 - DNA, 10838 bp, Homo sapiens
atgttcctcatatccacgtgtggtgggaaatagttggaccgacacttaaagccacatttaccacattattacagaatattccttcatttgctccagttttactacttgcaacttctgacaaaccccattccgctttgccagaagaggtaatttatgtggggcggtatcattatactttcaaaaagagttgtttctaccacaataatcataacttattgaaaaaattcaaatgctgtagaagtgaataaaaggataagttttcttatcaaatataccattggtaactatttggtatatgtgctcattgggcaagatggtatatgtatatgtgtatgtatatattaaggatacataaattttttctcttgaaaaatggtattatatgccgggtgcagtggctcacgcctgtaatcccagcactttgggaggccgaggtgggtggatcatgaggtcaggagattgagaccatcctggctaacagggtgaaaccctgtccctactaaaaatacaaaaaaaattagctggacgtggtggctggcgcctgcagtcccagctactcgggagactgaagcaggagaatggcatgaaccctggaggcagagcttgcagtgagccgagtgagccactgcactccagcctgggcgacagagcgagattttgtttcaaaaaaaaaaaaaaaaaaaaagtatttaaacaatgggagtatatgatacatactattctgcaatttgctttattcatttatcaataaatgtattcatgtatttgttagtgctaaagtctctttaagagctgcatggtttttcccactgttgatgtactataatttatttatccaaagccctattgataggttttttggttgttttccagatttttttctactggactcttacagtgagcatccttgtattttagttagtatgagcactggtatgtggatttttctagttttgattcctagaagtggaatagctgtagctgaatcaaagagtattttacatttacaagttttaacaatattaaattactcattcaagtttgtgccaatttagacaactgccaatagtgaacaaaaggccatactgcttctgcctggaatactcttctcttacatacttgcctgtcatcattttttatttttctcaaatctctgctcagatatcacctcagggaggccttctttgatcagagtttctcaataatagcaatagctctttcacccatcacactcttttcccttttcctgctttatttgtattgcctcctgccattaaatattaatttgcttgactctgtttccccatcagaatgtaaagtacatgaaattagggactattttttgtcacctttgtgtccatagagcacataacaagcatattgtaggcttctgtgtattttaatgaatgagtttaatggttttttttcacacttttgacaattggtttacactttttagaacactagtaggaagataagctcaaatacttactaaagaaatatttattgagtgcttattttctcccaggtgtggttctaggcactggagatataacagtgaataagatacacaaaaacgtgtatccttacacatgtagggctaacattttagttgagtgggggagagaagttttaaaaattttgtaatactaactattattgtggagaaagatttagctaaggggtaccaaaagagtatgggtaggttacagtgttaaataggctaggtaaggcctcagtaagaagatgatatttggccggatgcggtggttcacgcctgtaattctagcactttgggaggccggggtgggcgaatcacctgagatcaggagttcaagaccagcctggccaacatggtgaaaccttgtctctacaaaaattagccggacatggtgatgtgtgcccgtaatcccagttactcgggaggctgaggtgggagaatcgcttgaacccggaaggtggggtttgtagtgagccaagatcccaccattgcactccagctggggcgacaaagcaaaactccatctcaaaaaaaaaaaaaatgatgatgatgatgatatttgaggaaagacgtggaaaacgtaaggtagtgaaccattggaatagctgagggacaaaaggtcctagcagaggaagaagcaaatgcagaggctctgaggcagatctgtgtctggcaggttggaaaaatagcaagaaggccaggatgatagagcagagtaagtgagggataatggaggaaaggaggccaaggttatcaagggaccagattatgtccccagtgactctgtataataattgattacagaacctccaagttaaataagctaggaaatgaatattaagtatatattagaaactctttgagtgggggaggtccttaaaggtttccagtttagttaattatctagtttcataccctacactgtcgcctttatgtggatatctcatatgttgaaacagtttctacacagttctttttgttacctttgactcctaaaaatccaacttattgaaggaggctttcatttctctttctttttttttttaacttacaaaggggtcatgctaatcttctgtattgttccaattttagtatatgtgctgctgaagtgagcacaaatcttccacttcttaatctccattcatttcccagattgcatatagaacttgactaatacatcttcatcatgacaagtctttgtatatttgaatactcttttatgtcttgctgatccaggccttttcacattaaacaggatatggtatattcattagggctattaataaagtagaagtttatttcttactcactttaacaatactaggcaggttgattacattggcaagtttgtcttctgctatgcagtcattcaaacactcaggctgaaagatactttattttactttattttattttatttacttgtttatttatttatttttggagacggagtcgcactgtgttgcctaggctagcagcgtaggggtgcgatcttggctcactgcagcctcagcctcctgggtttaagcaattatcctgcctcagcctcccgagtagctgggattacaggcatccgccaccatgcccagctaattttgtatttgtagtagagatggggtttcaccatgttggccaggctggtcttgaactcctgacctcaggtgagccactgtgctcggcctgttttcttattttcatcatgtagccttccaggtcgctttcagtacagtcaactgaaaggacaggctcttgcttgtgcctgacttggaagtggtgtaaatcatttcctctcaaattccactggctaaagctcagtcacatagcctacttcattgcaagaaaggctaggaaatctgacctagctgtgtgcccaaagaacaagaatacagattgtggtaatagtagactttgttacacagcacaccaggttgtagtttcttcaaaattcttgtcactctcctgaatgtctttcttttttctagttcttttggaaggccagagccagaatgaatgaagtactctagcagtgttctgattaacacagtggaaaaaaaagattgttagccatagtattactggcttcttattctatcaactgaaactgttaatcattttgagatttgaaataaagataatggctttatgctccgggtaacaagtaagacaaactaggtgaactttgtatggatgtggagaggtcgaaaaaatgtaatcggtttaatctggggaaactttttcgagaatgtggaaattctataccaaaagatcttttcttaaagcatagcttctcttactttttttcttaggataatattttctaagcatataattgcaaactgggtaaaatattttaataccacattctataagtaggggagaatgggccagggactaggaattacccatttttataaaatgaataaaatgagcatggtggtgtgcacctatagtcccagctactcgggaggctgaagtgggagaaccgcttgaatctgggaggtgggggctgcagtgagtcgagattgcaccactgcactccagcctaggtgacagagtgagaccctgtctcaaaaaaaaaaaaagacaaaacttaccatttcatccatttttttaagcatatagtatagtcgcattaagtgcatttacaatgttgggcaaccatcaccactatccagatctttcttgttatcccaagcagaaactctgtacctattaacggtaattccccatttctatcttcccacagccctcggtaacttctgttataatttggctctgaattatttattctaggtacctcatataatttgaatatgtatttgtcttttgtgtcttatttagtgtaatgttttcaagttcatccatgttgtatcttgtgtccaaattttattcctttttagggtgaatacttttccattgtatgtatataccgcattttgtatccattcatctggtgacagacgtttgggtcatcttcacctcctgacgtttgtgaataaagctgctatgattactggagtacaaatactcatttgagtttttgttttcagttctttgggatctatacctagaagtggaattgccacatcatatactaattctgtgtttaaactttgagaaaccaccaaattgttttccaccgcagctacactattttacattcttaccagcagtccactgagtttccaatatcttgtagcccacacttaccttctggcctttatattttggtttttgtttgtttgtttgctttttatttttgaacagttgctctttcttatatctcatttggggttgggaaaatgaattaattgatctcaacaaaccttttaagtatcaggaccaggcacggtggcatatgcgtgtaattgtagcactttgggaggccagggcaggaggatcacttaagcccaggaatttgagatcagcctgggcaacacaaggagaccctatctctacaaaaagtttaaaaattagctgagtgtggtggtgcgtgcctgtagtcccagctactcaggaggctgagataagaggattgcttgagcccagtctgaggttgcagtgagctatgattgtgccactgcaatccagcctgagtgacagagcgagaccttgtctcttaaaaaaaaaaagaaaacaaaaaaagtaaaatatcatcaagtcagttcctttattaattgtagtttgggttcttgagttctcatgatttttagttccttaatctcttgtaaacatggtttatacataaatctaacattctttaaagacttgtttaaaaaatatacaatttagcttgtcattaaaaatatgtgtataataacctgctattgtcttgaatgactgacacatgcatttcatatgcatgtgtgtatatatactgcatacatatgtttatatactgtatagatgctccttgacatatgatgggtttatttggacataacccgattgttaagtggagggacatactgaatacatgtcactttcatgctgctgtaaagtctaaaaattgtaaattgaaccattgtaagttggggatcatctgtatatatgatatatattgcatttattttcttttttaaggtgcaagaattgtttatccgtgattatggagagatttttaatgtccagttaccggataaagaagaacggacaaaattttttgaagatttaattctaaaacaagctgctaagcctcctatatcaaaaaagaaagcaggttagtttctatatcaaagttaatatttaataattttgagaaagtaggaatgaaatagttaatggcattgacatgtatctgataacacaagctcaaaacctaagtcatgaggttgatgcatctgctgcttaaaaatctctatgcttcccattaaaacagactaaagttcttaaggtacacaaagtctttcatagtatagccccaatctatctttctaagctcattttgggcacttgtgttctgcctcagccctccacccccacattttttttctcataaaacactatctttaaaccatatgtaacataattttaccttttcactattttagtaatgcttgctctctcatcagtaaagcttctatctctatcccccatctctgtctaaagaactacttattcttttatttttattttttgagacagggtctgtgtcatccactggagtgaagtggcatgatcgaggctcaactgcagcctcaacctcctgggctcaagcatcctcccacctcatcctccgaagtagctaggacaagaggctcatgccaaaatgcccggctaaatacttgtccttttagtatacctcatttattctttattatgaagcctttcctaacttatatgggcaaaatgaattgcttctgcctttatgacccatcatacttttaaaatactactaatatggcatcacaatgatataattatgcctcttactcccttagtagtttgtcagctcattgtggcaggactctaataatcctttttttcatcctgagtactcattggatatctatttaaacaaaataacctgttggtatatttgaaacatattacacattttcattagttcaaaactagtaaagaaggcttttttatagttagaatatttttgtcctggaaataatgcaatttcaaagtttaatagcctcttaaattgtcttttttttttttttccttgagacggagtctctctctgtcacccaggctggagtgcagtggcacgatcttggctcactgcaagctctgcctcccagattcacgccattctcctgcctcagcctcctgagtaggtaggactacaggcgcacgccaccacgccagctaattttttgtatttttagtagagaccgggtttcactgtattagccagggtggtctcgatctcctgacctggtgatccacccacctcggcctcccaaagtgctgggattacaggtgtgagccaccacacccggctgcctcttaaattatcttaaaggaacagaggtaatgacttgtaggaattagcattccaaattacaagttactaatgatttctggaggggacgtagggttagagattatggtaatacttttgtatttcaaatctttggattccttgcatatatgaggaagataatccctcaaatcctgactctgttttcattaaatcatttgtcaacctcaatgttatggaggagcagtaactaaattcttccattcatgtgaagttttgcaggctttggaggtactcccagtagcaccaccacctgagccaagatcactgacagcagaagaagtgaaacgactagaagaacaagaagaagatacatttagagaactgaggattttcttaagaaatgttacacataggcttgctattgacaagcgattccgagtgtttactaagcctgttgaccctgatgaggtattagtttaatctttggatcaagtgtattctaggccataatgcttcacaatcaaaggatatttgaagagtttatgtggttctgcctacactcttaactagttttatctatttggaaacatgtaccgggttagtgtcctaagcacatgtagactttaagagcagggtaacgcattttcctttcctgcagacaattaactttgtctccccaacctaaacattccagaagtaattgagaatgtcttattattttttttttttgaaacggagttttgctcctgttgcccgggctggaatgcaatggcgcgatctcggctcattgcaacctccacctcccaggttcaagtgattctcctgcctcagcctcccaagtagctgggactacaggcgtgtgccaccacgtccagctaatttttgtatttttagtagagacagggtttctccatgttggccaggctggtctcaaactcctgacctcaggtaatccacccacctcagcctcccaaagtgctgggattacaggcatgagccaccatgctcggcccccccttttttttttttttttttttttgtagtaagggttgaggcctcactctgttgcccaggctggagtgcagtgacacaaattatctttcactgcaaccttgtggagatagggtcttgctgtgttgcccagcctagtctcaaactcttggcctcaagcaatcttcctgtctcagcctcccaaagtgctggggattacaggcatgatattattatgacctacacaattggaagagacctggagagccacgtcttaagttgctctgaaggatgggtggcaattggatgaggaaagaatataggctgttactggagaatacagctgcccaagaataagaaacaattactggaggatacagctgcccaaggaatagaaacaaatacaaaacaaaaacagccttaaatcaagtgaaaggttttatgttaaatatattatcataatctcttacgtatttattctctatctcctatattgcctggcatcgaaacttgactcacatgttatgtttagagttaattttgtgatttgatcatttgcttgaattttaggttcctgattatgtcactgtaataaagcaaccaatggacctttcatctgtaatcagtaaaattgatctacacaagtatctgactgtgaaagactatttgagagatattgatctaatctgtagtaatgccttagaatacaatccagatagagatcctggaggtgagcattagtgaattttttttcagggggttgagttggggggcagctaacacttagggttgatttttgtgtcaggtgctatattataaacataatcaaaatactatttaatcctcacaacaaccattttacaaatggtaaaaatgaagtttagaaaggttaaaaacattgctgaaggtcacacttccaggaagggacagagtgagaatttgaatgcaggtttctttcattcccaaatccctgtttattaacaattacatgatagatcctctaatgagacacaaaatggcttgtatactttgtatatcagtgctcttcctcaaagtggaaaagtaggcactctgtaatgaaatagtttttaaaatattctattagttaagaccattataatttttattacaaaagcaatataatatagggcttactagtagtaatatttttaaaaatctagtcccccatttcctttctccaaaggcagacactgttaagtttgaggatatcttttcagacctttttctgtgcatataccccttctgctttcacctatcgcatctattaatataaaatttagtgggtacaatgtatgttatttgggtggtggatacccccaaagccctgacttcatgtgcagtctgtgcctgtaacaaaaattacacttgcaccccatacatttttacaaatttttaaaaataaaatgtataaaggatttttaatgatatgtttgttctgcagcttgtccatttccaagaaatgttctttcttgggtgcttatttaattttttgatggcttcctgttattacagatgcagagttctttaactcttaccagtggataaaaagatacattttaaaaatagttgttttctgtattcatttctcctccagtacattggctttctgtttttaaattggtggtgcttgttagttagattgattagtataggaaactactaaaatttttttcaacaattgaaaagcttactattctttccctcccagtcctctagctcaccttccctaggcatttccctgtagttcagagttctggagtcaagcagtaggaaacagactaacaagatgagaacagtccattgtacataggaagaagaaacgaggtaccctggaggcagagggctttctctgttgcattgcaatcatgctgttgctgctgctccctttctgtctattgtggcaatctaaaattacttcaggctagtggtgtcaaatgttagtggacatcagaatctcctaaaggacttcataaaatatggatcactggaccccatctctagggtttctgattctgtaggtgtggcccctgagaatttgcatttctaatgagtttcccggtgacacaggctgctgagttctggaaccactacttcgaccttgccctgactttcttcaggcccaaatgccatgttagaaagcccacttcagcattctgcgtgtaatgtactgtataacctgggagtgaattttgcaatctcttgtcctttgaggagtattgatgtggctcaagcaatcctgcattcacttattccgtcttctgcctcaaatcatattccagtttgtagtattcatactctgagcttaggattttcccagtgtttcctgtggagggttgctttttcattgtctttgtctattttctttgtcaatgcaataacaacctctataaatctcttgcaaaattctttcacattctttgttcactaatgacactgatagccttctcttttatttttcgttatcatgtttaatctcttgctattgattgattccttttttttttctgatatttcaaagggatctgaacaggacagagcagtaaaattgtttgggtttagtttgccatattgaatcagatgtccagaacattagattagctccagaaacagaataggacaattccagtaactttgactattcttggtaaaagtcaaaaggaattgtaagagctactatcttagcctaatatgctgagtttatttttggtatattattaaaagggggaaattaaaaattacattttttactcacttcatagatcgtcttattaggcatagagcctgtgctttaagagatactgcctatgccataattaaagaagaacttgatgaagactttgagcagctctgtgaagaaattcaggaatctagaaagaaaagaggtaggaa

SEQ ID NO: 2699 - DNA, 1626 bp, Homo sapiens
gaatgaatgaagtactctagcagtgttctgattaacacagtggaaaaaaaagattgttagccatagtattactggcttcttattctatcaactgaaactgttaatcattttgagatttgaaataaagataatggctttatgctccgggtaacaagtaagacaaactaggtgaactttgtatggatgtggagaggtcgaaaaaatgtaatcggtttaatctggggaaactttttcgagaatgtggaaattctataccaaaagatcttttcttaaagcatagcttctcttactttttttcttaggataatattttctaagcatataattgcaaactgggtaaaatattttaataccacattctataagtaggggagaatgggccagggactaggaattacccatttttataaaatgaataaaatgagcatggtggtgtgcacctatagtcccagctactcgggaggctgaagtgggagaaccgcttgaatctgggaggtgggggctgcagtgagtcgagattgcaccactgcactccagcctaggtgacagagtgagaccctgtctcaaaaaaaaaaaaagacaaaacttaccatttcatccatttttttaagcatatagtatagtcgcattaagtgcatttacaatgttgggcaaccatcaccactatccagatctttcttgttatcccaagcagaaactctgtacctattaacggtaattccccatttctatcttcccacagccctcggtaacttctgttataatttggctctgaattatttattctaggtacctcatataatttgaatatgtatttgtcttttgtgtcttatttagtgtaatgtttacaagttcatccatgttgtatcttgtgtccaaattttattcctttttagggtgaatacttttccattgtatgtatataccgcattttgtatccattcatctggtgacagacgtttgggtcatcttcacctcctgacgtttgtgaataaagctgctatgattactggagtacaaatactcatttgagtttttgttttcagttctttgggatctatacctagaagtggaattgccacatcatatactaattctgtgtttaaactttgagaaaccaccaaattgttttccaccgcagctacactattttacattcttaccagcagtccactgagtttccaatatcttgtagcccacacttaccttctggcctttatattttggtttttgtttgtttgtttgctttttatttttgaacagttgctctttcttatatctcatttggggttgggaaaatgaattaattgatctcaacaaaccttttaagtatcaggaccaggcacggtggcatatgcgtgtaattgtagcactttgggaggccagggcaggaggatcacttaagcccaggaatttgagatcagcctgggcaacacaaggagaccctatctctacaaaaagtttaaaaattagctgagtgtggtggtgcgtgcctgtagtcccagctactcaggaggctgagataagaggattgcttgagcccagtctgaggttgcagtgagctatgattgtgccactgcaatccagcctgagtgacagagcgagaccttgtctcttaaaaaaaaa

SEQ ID NO: 2700 - DNA, 499 bp, Homo sapiens
ggcactgcacatataccagtgaataagatacacaaaaacgtgtatccttacacatgtagggctaacattttagttgagtgggggagagaagttttaaaaattttgtaatactaactattattgtggagaaagatttagctaaggggtaccaaaagagtatgggtaggttacagtgttaaataggctaggtaaggcctcagtaagaagatgatatttggccggatgcggtggttcacgcctgtaattctagcactttgggaggccggggtgggcgaatcacctgagatcaggagttcaagaccagcctggccaacatggtgaaaccttgtctctacaaaaattagccggacatggtgatgtgtgcccgtaatcccagttactcgggaggctgaggtgggagaatcgcttgaacccggaaggtggggtttgtagtgagccaagatcccaccattgcactccagctggggcgacaaagcaaaactccatctcaaaaaaaaaa

SEQ ID NO: 2701 - DNA, 427 bp, Homo sapiens
aaagctaaagacaccgagtactcctgtggcttgcagcactcctggtaagtactcaagtagttttcatttatgaaattataactttattcttttctaatgccattaactttctcccttattttcctttatttgtgttaatgcagtgaattacattgattttgttactattaagacaactttgcattcttgaaataaatccaagtttataatgtaccacttgcaacccagaagtcaccatctaattgtggactgtcttgatttgaaactgatgtctgtaaattctggtctatttcttactcccccttattcttagaaggtaactccacgttacctattcaaagcctgtagggttttctaaggcctgccttccttggcagacttctaattccaatttttgttctttaagcccctttgtcagactgcttag

SEQ ID NO: 2702 - DNA, 168 bp, Homo sapiens
ctacaaaaataagccggacatggtgatgagagcccgtaaacccagatactcgggaggctgaggtgggagaatcgcttgaacccggaaggtggggtttgtagtgagccaagatcccaccaatgcactccagctggggcgacaaagcaaaactccatctcaaaaaaaaaa

SEQ ID NO: 2703 - DNA, 190 bp, Homo sapiens
tcacgccattctcctgcctcagcctcctgagtaggtaggactacaggcgcacgccaccacgccagctaattttttgtatttttagtagagaccgggtttcactgtattagccagggtggtctcgatctcctgacctggtgatccacccacctcggcctcccaaagtgctgggattacaggtgtgagccac

SEQ ID NO: 2704 - DNA, 574 bp, Homo sapiens
acaccattaagtaggcacagggtacggctcttttgtttgcttaatccccaacagtagagccttataagtcctaggtattctttcctatggggaacagtccccaggatactttctgctgcattcagatgagagctaatagctaatctttaaaaccattaagctgcacttagctgagccttcacttacagattctgggagaccctttgctattacacagtggaatcaaactttgtgaggtcatgagtgtagtcaaataagccttttctgtgagaaatcagtgagacatacatttcctcaatctcagtgctcaggtggagtatatgctttgctgccttttgtttaaaacagaaatttttagaaggtttttaatcctaacatccctctgaatttttaatagagttacttatttaaattgaattgtattaaaatttcagtgttttcatcttcaagacagcaggagacctggagtagggtaggcaagtaaggcacttaactcagacacaaaatttaaaggaagttcagcaatcaatataaataatattttaaggcaatatttttaaaaacaaaaattaac

SEQ ID NO: 2705 - DNA, 574 bp, Homo sapiens; identical to SEQ ID NO: 2704

SEQ ID NO: 2706 - DNA, 574 bp, Homo sapiens; identical to SEQ ID NO: 2704

SEQ ID NO: 2707 - DNA, 459 bp, Homo sapiens
cacaggcttgagatgatactccaagcttctgcagataccacaagctcttttggaattcactgggtcactagcactgatgcctaggcccaatagagccttttcttgccttaagacctactgaaatctcaaatctcacagctttttttaaaaagcacatgtcaaatgaaggctaagtagaaaaagtatgtgcttagtagaagaaagacagaacaatagtgattaatttatctttatgaatgtatctagatttttgaaatctagaaaaaaattgtttaattttaacaaacacatatattgtgccttttcataagttaaaattttattttggatcacatagtagggtagaaaatcatttcggtacttaaacgtcagcaaaaggtcttaatcagatatttagtgaataggccaaagcagccacccattgaaaactgtattacctccagaaacgaaacaagtcca

SEQ ID NO: 2708 - DNA, 459 bp, Homo sapiens
cacaggcttgagatgatactccaagcttctgcagataccacaagctcttttggaattcactgggtcactagcactgatgcctaggcccaatagagccttttcttgccttaagacctactgaaatctcaaatctcacagctttttttaaaaagcacatgtcaaatgaaggctaagtagaaaaagtatgtgcttagtagaagaaagacagagcaatagtgattaatttatctttatgaatgtatctagatttttgaaatctagaaaaaaattgtttaattttaacaaacacatatattgtgccttttcataagttaaaattttattttggatcacatagtagggtagaaaatcatttcggtacttaaacgtcagcaaaaggtcttaatcagatatttagtgaataggccaaagcagccacccattgaaaactgtattacctccagaaacgaaacaagtcca

SEQ ID NO: 2709 - DNA, 459 bp, Homo sapiens; identical to SEQ ID NO: 2708

SEQ ID NO: 2710 - DNA, 445 bp, Homo sapiens
caaacgtgaactgacaatgaaagatcaccaaactcataagggaacaatctactatgaatgagagtcagcagaaacaacaaacagatttagtctatgaaaaacatcagggattggcatcattagagaaacaatataaaataaccactgatggaatgcttaaagatatgaaagaagaaatcagccaagcacagtggctcacacctgtaattttagcactttagaaaggccaggcaagaggctctcttgaggccaggagtttgagaccagccagggcaacatagagagactctatttatttaaaacaaaaaaaaattagctgggtgtagtggcccacacctgtagtcctagctccttgggaggctgaggcggaaggattgcttgagccctggagtttcagaccagcctgaacaacaaagtgagaccctgtctcaaaaaatatatattt

SEQ ID NO: 2711 - DNA, 1335 bp, Homo sapiens
cactttcataactaggcatcaattctggccataatggcttattttaaactaatttgcctgtcaaaaaaatctgtaaaaactgaataaaatactatatacattgtttgaaggcattgagaacaatcagcacaggcaggatctaagagactacaatcattcaaagaagagaaacacgtaaagtgagtaccacattcatcctggccttttcctttatgacattttccaaactggaatgcaaaagaatacaaccctaacaggaagcagcagccttaccaggctgaagaaactgaggcagagtttggagataatagtggctggaacttgaaagtcaaaatcctggagaggagggaattgcagagaaagaatgcaagaatctggatacaaattcctcacaagtttttaacagattcctaaactgtgcttgtatagggtggtgctctaagaaacctagtattaaacaacagctgggagactagacagctgagtagagattattttaaattatcctatattttcttttatgtttaaatctcttaatatataacacattgatttttgtatggggatccattctcattttaaagcatatggataactaattttcccaacacaacctagttcattaatttttggccatttagtatctgctctctgtcagttccaggcttttgtactacgaactccctatgcatttctgtttttttaaatgagggatcctgaatactagggagcctttgggaaatttgaaaataaaagttacatgatcagtgtattttagggggactaatatggcaactaaagctactttggaagagaaagagtggagatacatagattgctattatagttcaggccaatagagaggaattgggtttaagagatacattatggaggcagaagtgttcattcaacaagcgtttgttaaatatctactatgtaatcatgattatacaactagagagaatatgaaaaaaatgaattacgtatgttagcttatagatggatgctctcagtacccatccctattaatcgtcatttccctttgtttagtgaaccttctgatatattggatatcaaatatcctttccaagtattgtctgtcccacttaattctggtatccatgaatgcagaagtgtgctatttatgtaatcatgaacactcatgtatatgtgtataccttcattcattcaacatgtgttaaaactattatgtaacaggcatcatgttaggccttggaacacaaaggtgaacaacatgattcctgctcttaagttgcttacaaagatcatggatgaagatattaaatgataattaaagctgattgatctaccttg

SEQ ID NO: 2712 - DNA, 675 bp, Homo sapiens
ggagctctttaaatagtgaaagccgggtttttcatttttgccccaaaggtaataaaattgtgtgccctttaaaaaggaccccttctcatagtgactaagtgtcatacttagtcaaagcctttgataatgactttcttacaaataaactatagctttatattttctcaatagaaacttctgtaagtataacctacatggaaataaagaattttgcataaaaataaggaatttcaaatccacttcacaaattgtaggggtacttgaaataaaatattctacagtagagattttcttctgggagccagtaactgatttcttttttctgtagctgccttgattgatttgatattgttactgaaaaatgacattgtgtattttactggaaactgatacccaacagaaaaatacacagtgccatggccagatgcagtggctcatgcctgtaatcctagcacttttgaggggccgaggagggtagatcacttgaggtcaggagttcaagaccagcctgaccaacatggtgaaaccccatctgtactaaaaatacaaaattaggctaggcgcggtggctcacacctgtaatcccagcacttgggaggctgagatgggcagatcacaaggtcaggagatcaaaaccatcctagctaacatggtgaaacccctctctactgaaaa

SEQ ID NO: 2713 - DNA, 19820 bp, Homo sapiens
  SITE (13245): n equals a,t,g, or c
  SITE (13259): n equals a,t,g, or c
cacgctcccgagctagggaacaagccccatccgagcgcgtgggcgtcgtaggggagaggaggggcggggccgctccgctgcaacagcaaagtttgaggcgaagcctagcgactcgcagcgccggtcccgcagtttcacctcttttttttttaactccgccaaaggaccccgacccacaggtcccggttgctccgctggtcaaagtgcgtgcggagtagttggcaaagttgagagcggagacgtctctgggaacagctgtttgcgttccgggcggaggcggcgcgctgagctccttggccttgagccagcgagcctagaaggaggatggaggttttgggccccaggggaggacacagagacggcgggatggcgcagggacttgaggcttgagatcccgtccttcagctcaggtcccgtcgcgcttttaccccttcccggtgacctcaacccctttataccgaccccacctctttggagccgggagtaccgcccctgtagggggaggggagaggaggcgatttcgaacgcggattggatcgtctgggcacccgtagttgggaacagcggaacgctggtcccggggactgagtaaggtgtctggatcggagggaggttcgggtgggcatcgggcggctggaagagctcgactcgtcccgctgggaaagcgcgagtctgagtggaaccctggacgacttgcagagcggctggcgcagtcatgtgagttgggtctcaggccctgaacaacgaggtgttgtttctctgggccgccctttctcgcccgggtcttcccctcctctcctcccgcccttcggccgggggcgtgacagacgcgttcttaactcgctcgggaccggccccagacctgcagggccggttctcagggcggggtagaaatgttaccccgctgaacgccctggggtatggggcacgggctctagggggaggccggcggccggttcagggggctggttggacggccgcgggtgaagcgacgcagtgctctctctacgacgctgtcgggggtcgcatgcaccccttgggtttccgaagcccctgaaccctagggtattgtgaaactagggctgggctgcggcctcccccgcccactggaagcggccagccctggatagcgtaatggttttttttttttttttttttttttttttgtcggccgtctacgaagtcccatggcttttccagttctctcttgccttgaggctcaagaacagtttgttttaactgagagtctgggaggaactacagttttccccagagtagtcttgtacgttgttctcttggtgggaataacttgatttaaggcaaactttatgagtttcttcaggtttccattacagcaacctcccccaaagccagaaaggataaatgttcttctaagatgttccttagtttttcataacgatgacgataacaagtgaggaatttttgaaagccattttattgaagggagttttgtaatgaatcagatacagactttttctactccgctggcaacagaatttcaattgactgtgctccaaccagataaataataaaacgactatacataacaagacaagattcagtagcaggggcatatatttcaaactttaaaaactgtaaagcatgcagaatttaaccttttttaagttttacatgagcttagccttgttgtctctctttttcagggcggactactggaagtcacagccaaagaaattctgtgattactgcaagtgctggatagcagacaataggcctgtatgataattccgctgttagagattctaataataattgtgttgaatgaagtgctcctttttgatgtaaactcagtttacaaagcacttttatgtacattgctcttgcattttcaaaacatcagaagatttctgtcttctcagtcccctatgaaagctgtgagccttcttccttttcatcaacctgactttgattatatattaaattatttctctgtggccttttgggaaatgggcaatgagttggtcatatcattcatgttatgaagcacctatattataatggtggtgttcataatactgtcatacccaaagaattgtggaaagcccttaaaaaataaaagcaacatgtttagtttttcttgtatattttgtggtctagaaataatcaagtgtatttaatgcagagctgtgtatctttagatgcttaaatttgaaagaacaccattatttcctttctcatgaaacaaagtaacaactctgttaggtatgttgttagtctgtctcatagttgagatccagttttgaagatgtaaagcaaaaagcacaccgctgatttttctcccctcttgcatgtcaaaatactatgtacataccacataaacactagggtatctgttaaatatattttatgttgataccgtttttacttggcaaagttggatgcacaaagaatagtagtctcatattttaacaatgctgtggatttcttctgtagacatttatttcctgttacctgcaaggtgtttaggatttggatttttttttgatgttttggtctttttggatagttgctaaagttcttcactattttacctaggctatccttataaataaataccatgaatttttaaaaccacacaggtcacttaaagtctctctttcttggaggtacctaggctgtaaaatgaattttgtgagttatctagagtaagtaatcccttccagtgtagtctgtctttatcttcttgagttggtaatacacattgatttaacctttaattagaaacaaaattaatttaattttgaatggtcctttaatattgtattctttgtgtagtgtaatcaactttaggaaacgcaatgtatgaaaaacaggaggattatctgctttacaaagtcacactttaaagatgaattcatggtagtattttaaaatagctcagttaatgcatcatgtaagatttgattgacagaacttattttgcagagcttgtgaggaatttcttactgcatttaactagaaacttgtaatttagggagcatttctgattgtttaaatagataattgcgctcactcaccagcccctgtccccagtcatctagtggccatcactccccataggttatcatttttttttttcattttcttgcctatccttccattgtttctacatgcatgtagacacaagttcttattccagcatacataaaaggtaatgtactgtatatattattctgcactagttttaaaaaatttaacagtatgtaactggagctccctttgtatccatacataaagagcttctttctctctgttacagtagactatgagaatgtaccatagtttaaccagtcagtcccttagagatggataccgtattgttattgcaaacagtgctgcagtcagtaagcttgtgtatatcatgattttgtacatgtgcaggtatatctatagaataaattaccagaaatgaaattgctgtgtcaaagggtaaatgtatttgtagtcttgatagatattgccaaattatcctccatagaagttgtacattttgaaccattaccacattgtataaaagtgtttgcttataatttacgaggaatcttaaaatacatacttttctcctaaatttaaggaataaagcaataaaatcattgttctctatgtccctccttgtgacaaatagagcaataaaattctaaaggcttttgatgttgaaagttgtttaagatttttttccccagtcttttggcttcatgtcacgtttgagtcctcattacaatcatagtcactagattagtcatcaagggtaccttgtatttttctccattaataaggtcatcatggtttattttaagaaccaaaggaaacctagtcagaggacataataataaacaatgtagttccctagcatcatttgattaaaagggccaatttgcattaaattaatgttttcatcttttctgccattcattttaattttaattttctcatgtttatgagaaaattatgtttactatgaattttatgatgtttatgtagttttcttttgttattttctcttttcattttcaagagtgttgaatttcatgaaagaggaaagaatcataaggaaaatgtggcaaaaaggatcagtgaggtaatttagattgtttatttgctaatttttctatgcaaatgtcagtcctttatctcactttcactgttatgtatgtcttacatagattaaacagaaaagcctggataaggcaaaggaagaagaaaaggcatcaaaggagtttgctgcaatggaggcagctgccctgaaagcataccaagaggatttgaaaagacttggcttagagtcaggtaaaaaaaaaaaaaaaaaaaaagcagccagcatgttttaaaagtaacatcagaggtcaagctaagtaagctttgattgcttccataaagaggttataaactcagtgtactctcagtgcttttattatgcatcatagccctgtttagactatggaagtttgcttatgcccttttgttgtacttttaatgttttatcttttaacaccttcattcatagcagccatactacttttgtggtcacctaatcctagttctatcctaggtaaatggttcatttcagagacactttgagttttttaggtattctagttatttggctaagagacactattcatttaaaaataggccttgcattataattgcaattcactgtgtccatatggtgaaaattatgagtcttgtatatttatatgggtgaatatgtagtgaattagccttttgtggacaattagcagattttactagtagaaggcagatatttactactagaaggaagttccagatgaaagaccttatttaactagactgcatctatcttgtcattgaatttaggctttaaactgggaaggttttgtgaataattcttccatatcaaatccgttttccttaaaccaggcatatagcagatctcagttgttgatcttacctagtggttgcagtcatcaacatgtgatggtattcctctaataaaaacagctttcaattaaggttttaagcagagtaccagttaagttaattggcattgtgttcattaaataagaacagttgtagccagactttgttatcctggacattggtaattaaaaggtgggaaagttgtttggttccttgaggataaagccatatgttcatcttgaaaggaaaaaggatttaggcattcctggagaattaggaatagatgagagtccaactattatcaattatatgcattgagacattccattatgctgccctttgagcaaataaattttaccattttatatttaaatggatttttcctattaaatattaccatagccttgtttttccaaataggatacatattcaaacatacaacaatgcagtacaaagaaaagagtttttaaaaactcactaactgttaagattttttgcagacctcttctttagatctttttttaaattacatattttgtgctgcggtctatttgccggttgttttattttttccctcagtgatatatcaaatgtatcttttcttttaattagggagatgtatcatttttatatggtaggagcagactttggagtcaagcagaatttcctcttgctagttatgacttttgatttttattaaaactaagtaacattatggtataaattgcttattacgtgaccacacataacaaatggtgaataaatggtagccactgttattttgtctctgtactataatttatttaatcttttcctggttaacatttaggttgcttagcatttttcactgtcgtaaagagtgcggcattaagcatctttatgcatgtatctttttacacttatttttctctgtaggttcagtttctggaagttacagtataaaagtgtgaatatattttatattgatagctaataccacattgtctccagaaatggactgatgtacattttcattagaacaaaaataagtttattaacccgttttaggagtaactagccaatcctttggaaagtaaagccataaaaactatttttctctttttttgaagacaggtctcgctctgtcacctggttggagtgcagtggcaaaatcatggctcactgtagcctcgacctcccgggctccagtgatcctcccacctcagctcgtcaccagtcccagcgattttttggtagagacggggtcttgccatgttgcccaggctgatctggaactcctggcctcaagcaatccacctgcctgggcttcccaaagtgctgggattacaagcgtgagccactgtcccccaccaaaactacccattttttcaaagcaatgtaaatacctgatctatcaaactaatactggatttggtcattcttttcactacttattgatcttctgcaaaacaacaacaaaacatttctttgaatattagcaaaagtaaatgttaattggccaggtgccgtggctcatgcctgtaatcccagcagtttaggaggccggagtgggaggattgtttgagcccaggagttcaagaccaacctagcaagatggtgagaccccacctctactacaatataaaaataaaaaattaactgggcttggtggtgcgcacctgtagtcccagctacttgggatgctaaagtgggaggattgcttgagctgagaagttcaaggctactaatgtgggctatgattgcaccactgcactccagcctggacaacataagagaaaaaaaagtaaatgttaattatctgaattgtctttgtaattgttgtccatttttctattagaatgtttgatttgtaaaggatctttgttaggaatattaaccctttgccatatttattgtaaatattttttcatttgtcttatatatgttttttctttttatttttgtcatacagaatatcttaatttttatgtagtcaaatttaacattattttactttgtgttctttttgtaactatctttgacctagtatttaataaaaaggggggaagggagcaggtagtggggaacagctttacttttttcccaaataattaatcagttaatctaaaaactttctttttaagcatgctttctttatttcctttttttaatatatatatagatgtagggggtacaagtgcagatttctcatatgcatatattgcatagtgatggaatctggacttttagtatacccattgcccaaatagtgaacgttgtacccagtaggtaatttgaaaacctctttttttaatgatctgtcttttatcctctgatatgaaataccagccaacctgaagttggctctgtatctggactattttgtttcaattatatgcttgcctatttctatgtcagttccacactgctggctgtttttttaacccatagttttagaataagttttaacacctggtagaactaaattctcctttttctttttattacagttttccttcccttacatgtttatttttccgaatgaactttataataatgtgttaagttctcaaaagaaccttatcaggtttttgattggaataacattaatgttttatgccagcaaccataaaaaatagtagttactatagctgctttacccttctctcatctctttagaaattttggagccaagcataacaccagtaaccagcactatcccacctacctcgacatcaaatcaacagaaagaaaagaaagaaaagaagaaaagaaaaaaagatccttcaaagggcagatgggtagaaggcataacctctgagggttaccattactattatgatcttatctcaggaggtaagtcatttaggcataaaactggtaaagaacagtgtcactagtagaatagaacaatttattttatgttaggatttttatctaatgttggagcactttaaatagtgaaagaccggtttttcatttttgccccaaaggtaagaaaactgtgtgccctttaaaaaggtacccttctcatagtgactaagtgtcatacttagtcaaagcctttgataatgactttcttacaaataaactatagctttatattttctcaatagaaacttctgtaagtataaactacatggaaataaagaattttgcatagaaataaggaatttcaaatccacttcacaaattgtaggggtacttgaaataaaatattctacagtagagattttcttctgggagccagtaactgatttcttttttctgtagctgccttgattgatttgatattgttactgaaaaatgacattgtgtattttactggaaactgatacccaacagaaaaatacacagtgccatggccagatgcagtggctcatgcctgtaatcctagcacttttgaggggccgaggagggtagatcacttgaggtcaggagttcaagaccagcctgaccaacatggtgaaaccccatctgtactaaaaatacaaaattaggctaggcgcggtggctcacacctgtaatcccagcactttgggaggctgagatgggcagatcacaaggtcaggagatcaaaaccatcctagctaacatggtgaaaccccgtctctactgaaaaaacaaaaaattagccaggcatgatggtgggcacctgtagtcccagctacttgggaggctgaggcaggagaatggcgtgaacccaggaggcggagcttgcagtgagccgagattgggccactgaacccaggaagcggagcttgcggtgagcgtagattgggccactgtactccagcctgggcgacagagcgagactctgcctcaaaaaaaaaaaaaaaaaaaaaaagtagccaagcgaggtggctcatgcctgtaatcccagctacctgggaggctgaggcaggagaatcaattgaacccaggagatggagtttgcagtgagcccagatcgcgccatttcactcctgcctgggcaacaagagcgaaagtccatctcaaaaaaaaaaaaaagaaaaaaaaaatacacagtgtcgttttacagtaacaatatcaaaaacatctttttttgtttttcctaaaaactaaatgtatttggggtttttactccgtatacattttggaataaattaatacatttattctacatttatgtagcatcttactctccagagtcataaaatttagcgacaaataaataagcttgataaaaggaggaattttaaagtgctataatagaagtgtaattaagattatatgggaactcataataatgttgaattcattgtgattatgtagctttgagagattaccataggaattacttttgagctgatctctaaattaagatagggacatcaggaatgatgccttactcaccattgtattcctggcgcctaacatagtgcctagcacagtgtagacactctgtgttttgattaaagaagacttcagtagataattaagaggtacagaatccacacagaacaatatgaaccccaaaaaaggtttgaaagtattgggaaatagtggtcgaggtaaaacatgcagttctttgaagacgtcttagtagagttagactggaaggtagattggagccatcttatggagggctgagagaatgatggtgccatttacttagatacgagataaggaactgaaaataagtttaatggggacaataatgaattagatacgttgaatatgaggtacctacagaatattcatatgacagcttttggtagctaattgatggttacagtgtggagctgagcaaaattgagtctggggatgtagataatatgttagcctttaggagtatatgagaatcgcagcagagagaatagagcaagaagtaaagaaggtgagtgttacatatattaaaggaatggatagaagaaaagccagcaaaagaaggttaagaatgctaggaaggtaggaaataagatcagagagttaatcatgaagaaatccttgggctaacaatcttactgtaatgactattatcattaggatcataattacctttggactatgtagaaatattaatccgttagagtttgcactgagctttaagtgacatgcatattgtagtttagcaatgaagatatcataaatgattatgtactagcaattagaagtctttctcaaatttacttataaactgttatttcatttctcccttccaatgcttattgcttgcctctctttttcagcatcctactttatatactcttcctctccatgatacatgtttttaatttctgcatactagttgttcctcttctgagttcttattcagtttatctctcactctcccttgccccaagatatcaaaaggcctttgaaacttatcagacctgaattctgtgaaacctttatgagaagccctgcctggctctaaaattcctgtggaagttccagtaacttctaatccctcgttctgtcctttcttcttggttacgtagcattcacatatattgtctgcacagtactgggatgtatgttctgttttatttttcaaatatgttttaaattgtagacctgtagtgttttgtacataatgactgtaaattttgtccaaattttttggaaagtatttttttaaagcaaaaagattttataaatgcaatatattttgctttaagcatctcagtgggagaaacctgaaggatttcaaggagacttaaaaaaggtaattgaagcatattaatagtgtttttgttttattctttacagtgattcgtttcttaggtttttgtagagttttgctaagcaactttatttacaaatactccactccctccacccccaaactgtgtccttttttttcccataatgcttttgttagaaggctggatggagatgaaatagtgatatctggctgggtgcagtggctcatgcctgtaatcccagcactttgggaggctgaggcatgtggatcacaaggtcaggagttaaagaccagcctggccaagatggtgaaaccctatctctcctaaaaactacaaaaaaattagccaggcgcagtcgcagttgcctgtaatcccagctactcaggaggctgagtcaggggaatcactgggacctggggcggcagaggttaacagtgagccgagattgcaccaccgcactccagcctggataacaaagtaagactccgtctcaaaaaaaaaaaaaaaaaaaaaagtactgatatctatccaaaaactgcattcagggcaaatattagttggtttgccgtcagttgccattcacatgttcctgtccatttggaaggaattgttcctggctttcaaaggtgagacatccactgcttgaaagttggttctttattagcaaaaaccaagcttcctggccatgattagtactaccacccctaatacccaggtgtattagtcagttcttgcattgctataaagaaatacttctgaaactaggtaatttatcaagaaaagaggtttaattgactcacagttatgcaggctgtacaggaagcatggtggcatgagcttctggagaggcttcaggaaacttacaatcatagcagaaggccaagggaaaacagtcacatcttacatggccagaccaggagcaaagggaggtgccacacacttttcaatgaccagatctcagggtagcttgctcactatttcaacaacagcaccaaaggtggatggtgttgaaaccatgagaaaccacccctgtgatgcagtcacctcccacaaggccccatctccaacttggaggattacaagtctacatgagatttgggtggggatgcagatcgagatgatatcaccaggtgtcaggaggagaggcaagggtggctgactgtctgagttattcaatagaaaatcatggttatccttagtttatgctgggtttttttcctcctattagacagcagtgaagaccgtttgggtagaaggtttaagtgaagatggttttacctattactataatacagaaacaggaggtaagtattacctttgattatcttaactgtttaaaattgtacctggaactgcttattggcctgctgattaatcatctgaacttggaaattttagtatacaataaacatatttgtgtagtaaacatgaattattttttgtaatttaaaaacaatacagtggaaaagcaaaaagatttatattcgtattatgttgtgctgttcaccaatgttattctcagttgatattgcattcacaaacttaaaaatagaatcattttagctttctctgacattactatttttataattattttagaaatatagtcattaccttggaaggtagcttagagatcatctggctcaacttgccttttcctttttaaaaataaaactgtggccgggcacagtggcacatgcctgtaatcccagcagtttgggaggccaagacaggtggatcacctgaggtcaggagttaagcgaccaacctgaccaacatggtgaaaccctgtctctgttaaatacaaacaaattagccgggtgtggtggcacatgcctgtaatccaagctacttgggaggctgagacaggagaatcttgtacctgggaggcggaggttgcagtgacccgagatcgtgccattgcactccagcctgggcaacaagagcaaaactctgtctcaaaaaaaaaaaaaaaagtagctaggcgcggtggctcacgcctgtaatctcagcagtttggaaggccaaggcgggcagatcatctgaggtcaggagttcgagaccagcctgaccaacatggtgaaaccccttctctactaaaaaattacccgggcgtggtggtgggcacctgtagtcccagctactcaggaggctgaggcagagaatcacttgaacccaggaggtagaggttgcagtgagccaagatcgcaccactgcactccagtctgggcgacagagcaagactgtctcaaaataaaataaaaaataaaactgaagctatttagtagtgtctaacaaattagtaaaagtgaaaatttaacaatgtttcagttgcataaatacttacgaagcatgcataaatactaattgttatctaaaactttttttttttttttgagacggagtcttgctatcgtccaggctggagtgcagtggcacaatctcggctcactgcaggctctgccccctggggttcatgccattctcctgcctcagcctcccaagtagctgggactacaggcaccagccacttcgccaggctaattttttgtatttttagtagagacggggtttcaccatgttagtcaggatggtctcgatctcctgacctcgtgatccgcccgcctcggcctcccaaagtgctgggaanacaggcgtgagccnccgcggccccggggctaaaactttcaaattaatgtttcatctaatttaacatcataaacagttgaatttatcagaacagctataacattaatgtaactttaggagaggcttgtttttgtttttttaattcctgttatcattagctcattgcatagcattaaatcttttaggaagaaaaggcccttttaacctccaagtagatatttagcctgcccagttatagcaatgtttatattccagtacaattgaaggttgggatttttatacatataaaatagtatagtgatataatatagctttagagttagacagatctgagttcaatgcacagcttctttccttaccagcaatgtgactgtgggtgttactgagcctatagtcactcttcagtgaaatagaataaacatgcatgctctgtaaggtcatgaatgtcatatgtcataaagttccaataacagtgcttggcacatagtaggtgctaaataaattactccctgaactggcgtggtggttcacacctgtagtcctagaactttgggaagttgaggcaggcggatcacttgaggtcaggagctcgtgaccagcctgggcaacgtggtgaaatcctgtctctactaaaaatacaaaacctagctgggcgtggtggcgcttgcctgtggtcccagttactcgggaggctgaagcaggagaatcgcttgaaccggggaggtggaggttacagtgagctgagatcacgccaaataaataaataaaaataaaataaataaattcttgaaagttctattgttaacttgtgtgaaatgtggattaggaaaagtaatgttttttcattaatcctgccaagaactctgtattaattaaggtgctgtatatattggtttgccttgaatgattttggtttattcctggaccagaataattactaacggcagcccctttcactcttaaaactctcccagttgaaagtagggaattaattacaaggtaattagaaatattattgttttactaaaagcccaatgaaccactggatggcagtagagttcagtcaattgagattcccattgctgcccccccacccaccaaaccaccataataaaaatgagaatttaatattcacttagtgcttcacaatgtaatttcactccatgaaaatcttaggaattttttctttttttaaattgagacaaggtcttgctctgtcccccagactggagtgcagtggcacaatcatgattcactgcagcctctatttcctgggctcaagcagtcttcccgcctcagcctcctgagtagtgggtactgcaggaatatggcatgatgcctgctaactttttaattgtttgtagagacaggttctcgctatgttgcccgggctggtctcacactcctgagttcaagcaatcctcctacctcgccttttcaaagtgttggaattacaagcataagccagcacactggggccaggaaaggaaatctctgtgataagcaagtttcaggaaatctcttgtttgctcattatcaatacgtttcctgaaattggtgtcagataaattgtgaaccgttagaaatatcacccagttcttaggtctctcattccattggagttatagtttacacatctagtaaatccgggctgtttgaaatcaatttctgaaagatacaagagcaagaggtttgagaactctgttatcttcttgatcaagagatagtatgaaatacatacagtattgtcatttaataattgtaagtgataaatgttatgttgaaattacatctgaatagaattaataactaaataacatgactttaaaatgtgttgagcagaatccagatgggagaaacctgatgatttcattccacacactagtgatctgccttctagtaaggtcaatgaaaattcacttggcaccctagatgaatccaaatcatcagattcgcatagtgattctgatggggaacaggaagcagaagaaggaggggtctctacagagacagaaaagccaaaaataaagtttaaggtaggtttttaaattttactcttcacatcaaattttttttttttttttttttttttttttgagatggagtcttgttctgtccccaggctggagtacagtggcactgtcttggctcactgtaacctccaccttccgggttcaagcaattctcctgcctcagcctcccgagtagctgggactacaggtgtgtgccaccaaacccggctaattttttttattgttagtagagacagggttttaccatgttaataaccaggatggtcttgatctcctgacctcgtgatctacttgcctcggcgtcccaaagtgctgggattacaggcgtgcgtcaccacgcccagctgacatcaatttttgaaaagctctacagaccttaagtcttctgatagaacatagaaattaagacatattttggcaactggataaataaaaccgggaacactcaggagcccatgagtcaaagcagaggagacacattattagcattgagcaatggttgcgattgttggcctgagaaatgtaggaaaatcagagttcctaaatacctagttacacctaggatcttgtcattgcctgcagtttctctaccaacttcacaaatcttgatggaacttagagtaagggttatgtgcagtttacagaggagcagcagcaaagccttcgttgtaattgccatctcacaatgattatagccagccagatttaggtaatccagtatccaacttaggatagaaatgattaatttattttcgtcaaaatgaatgtgttccaacaacaacaacaaaaaaatacaggccaataaccctgctgaacatagatgcaaaaaccttcaacaaaatactggcaaactgaatccagcagtacatcagaaagattaatacaccatgataaagggatgctttattccagggatgaaaggatggttcaaagtatgcaaatcaataaatgtgattcaccacataaacaattaaaaacaaccatataatcagctcaatagataaaaagcatttgttaaaattcagcatcctttcatgataaaaaccttcagcaaactaggcacagaagaaacatacctcataataataaaataataaaagccatatatgaggccgagtgcggtgcctcatgcctgtaatctcagcactttgggaggctgaggcaggagaatcgattgaacctgggaggcagagtttgcagtgagctgagatagtgccactgcactccatgctggatgacagaccaagactctgtctcaaaaaaaaaagaagagccatgtatgagaaacacacagccaacgttatactgaatggggaagcactgaaagtattctccctaagaaagcaaggatgctcacttcaaccactccttttcaacataatattggaagtgctagcctgagcagtcaggcaagagaaagaagtaaaaggcatccaaattgaaaaagaggaagtcaaactatctctgtttgctgattaaatgatcttactacctagaaaaccctaaagacccctccaaaacacacgtggatttgataagtgacttcagtcatgtttcaggatacaaaatcactgtacaaaaatcagtagcatttctgtatacctatatctatataataatggtaaaaccgagaaccaaataaaaaactcaatcccatttgtggtaactacaaaaaaaaaatctcggaatacatttaaccaaggaagtgaaagatccctacaaaatgaactacaaaacactgattaaagaaatcatagatgatacacacaaatgaaaaaacatctcatgcttctggattggaagaatcaatatcactaaaatgacatactggccacaccaatctacagattcaacacaatccctatcaaattaccaacttcattttttacagaattagaaaagccaattctgaaatttatgtgaaaccaaaaaagagcctcaataaccatagcagtcctaagcaaaaagaacaaaggtggaggcatcccattacttggcctcagactatattccaaggctgtcataaccaaaacagcacagtactggcataaagataggcacatagattgatggaacagaatagagaacccagaaataaagccacatacctacaaccaactgatcttcaacaaaatcaacaaaaatatacactggggaagggataccccattcaataaatgatcctgggaaaactggctagctgtatgcagaagaatgaaactggacccctacctctaaccatgtacaaaagttaagatggattaaagacttaaatgtttaaagatctgaaactataaaaaccctagaaggaggccaggcatggtggctcacacctgtaatccctgcactttgggaggccgaggtgggcggatcacctgaggtcgagagttaaagaccagcctgaccaacatagagaaaccccatctctactaaaaatagaaaattagctgggtgtcctggcgcatgcctgtaatcccagctacttgggaggctgaggcaggagaatcgcttgaacctgggaggcggaggttgcagtgagctaagatcgtgccgttgcattccagcctgggcgacaagagtgaaactctgtctcaaaaaaagaaaaaggaaaagaaaaaaaaaatcctagaaggaaatctaggaaaaactcatctggtcattgacgtaagcaaagaatttacgacaaagtcttcaaaagtaaacacaaaaataaaaatagacaaatgggagggacttaattaaaaagcttatgcacagcaaaagaaacaattaacagggtaaataaacagcccacatattgggaaaaactgtttgcaaactatgcatccaacacaggactaatatccagaatccgcaagggactcaacaagaaaaaaacaactccattgaaaagggggaaaaggacatgaacaggcatttttcaaaagacacacaggtggccaaaacacatgaataatgctcaacatcactgatcatcagagaaatgcaaatgaaaatcacaaggagataccatcttacaccagtcagaaggctgtaattaaaaagtcagaaaatggctggatgcagtggctcacacctgtaatcccaacactttgggaggctgaggctggcagatacttgaggtcaggagttcaagaccagcctaaccaacatggtgaaaccccatctctactaaaaatgcaaaagaaattagccgagcatggtggcgcatgcaggagaattgcttgaacctgggaggcagaggttgcagtaagccaagatcatgccactgccctccagcctgggtgacagagcaagactccgtctcaaaaaaaaaaaaaaaaaaaaatcagaaaacaacagatactggcaaggatgcagagaaagggaaacacttatacacttactgagaatgtatgttggtataacctttatagaaaacatttctcagagaactaaaagcagaactgttattcaatccagcagtcccacttctgagtatctacccaaaggaaaagaaatcattaaacagaaaagatacttgcactcatatatttgtagcagcattgttcacaatagcaaaaagtaaatcaacctaagtgtccgtcaacggaggattggataaaaaaaatgcggtatatatacacacgcacacacaccatggaatactactcagccataaaaaatgaaatgatagcttttgcagctatgtgaatggaactggaggccattaacctaagtgaaataactcaaagtcaaatactacatgttctcacttataagtgggagctaaacagtgggcacacatggacatacagaatggactaatagacagtggagaccataaaaggtgggagggtgggagggaggtgagttgaacatgtgtctattgggtttgttcactgttcaggttataggtacactaaaagcccgtacttcaccatgacataatatatacatgtaagaaatacgcatttgtgccccctaagttattttttaaaagataaattataggaaaaggaaaaaaattacaaaatacaggtaaacaaggacaaactccctataatcttgccgcctcccagaagaattcaacagagccacaattataaagggagtcactgttgggtatgcaagtaaagcaagaaagcagaagagagaagttaagagagccctgtttatatgtccttaattgtagaacttaagacattaaggtggtgatttagggagcctttgtcatggtatatcaacatttcagacatggaaaacctaatcaagcagtaaagttctatgtatatttattgtgttatgtgcagatttgagttagtgaattattgtttataaatctataacaatacctttaaaagccttaaattttatttttgtcttggtagttttgcttgaactgtattatttcttggcttttacatttcaggaaaaaaataaaaatagtgatggaggaagtgacccagaaacacagaaagaaaaaagtttcagaaacagaattcattaggttcaaatgaagaaaaatcgaaaactcttaagaaatcaaacccatatggagaat

SEQ ID NO: 2714 - DNA, 103 bp, Homo sapiens
atcccagcactttgggaggctgaggtgggcggatcacgaggtcaagagatgagaccatcctggccaacatggtgaaaccctgtctctactaaaaatacaaaaa

SEQ ID NO: 2715 - DNA, 330 bp, Homo sapiens
gtcatcattaccgtcactcctgattcccattctcctcagggcttaggtctttggaagctcctgggctgggattgggttgggattggaggctgtgggtttggaggcatcttcgagggcactgcccgtctctgcccgagtgatgctctgaccacagatgaattcatcgttcactgtaaaaatcaaatacgtggcccttgcgtgtttttttttcctcttttgacaagacaattgatgtgccatctccagcgtatctgcttgggtcggaagacttgctttagcctcctctagaacaaccagcgtgtctttgggtttattgcagtctacaggatc

SEQ ID NO: 2716 - DNA, 497 bp, Homo sapiens
gagaaggggacaaataataaacttttttaaataacatggtattttaagacaaagaattattttgtgaaatcttgcatttcttgtcaggaaaggggaaaattacataattagagtcggcaagaaaaaaaatgtattcagtataataattagtgttaaaggacattagtgaccagtataaatcttccggccaatattatatagtttgcacaaaatcatagcatcacaattctgtataagcagtgtgtttatgcattcttttaacaactttattgatatataattgacatacaggaaaccacatatttatttttatttatttgtttttttgagacagaatcttgctttgttgcccaggctgaggtgcagtggtgcaatcttggctcactgcagtctctgtctccagggttcaagcgactctcctgcctcagcctcccgagtggatggactacagacacgcaccaccatccctggctaatttttgtatttttagcagatat

SEQ ID NO: 2717 - DNA, 318 bp, Homo sapiens
tgttaagcccacagcagtctttaatctggggttattcttattaccaccattgaatccaactattgatgccattgtttattgccactttccaggactctattcaatggccatatgttaagaggtgtttcactctagctgatggggacatgaactcttcctggcctggtgtgagctctgagaataactgttccctgtttgtttctgatggtttttccccagccacatttgttttcttatagagatgggctgatcagtattcagccacaggtttgaggagaactctctgaagatatctggagttctctctctctctgtctc

SEQ ID NO: 2718 - DNA, 9968 bp, Homo sapiens
gctcgagacgcgcctcaactcggcgctgctggcggcggcgggcccgggcgcaggcgcgggcggcttcgcggcgggcggtcaggggggcgcggcgcccgtgtaccccgtgctgtgcccgtccgcgctggcggccgacgcgccctgcctgggccacatcgacttccaggagctgcgcatgatgctgctaagcgaggcgggcgcggcggagaagacgtcgggcggcggggacggagcgagggcccgggccgacggcgccgccaaggagggcgcgggcgcggctgcggctgcggctggacccgacggcgcgcccgaggcccgggccaagccggccgtgcgcgtccgcctggaggaccgcttcaacagcatccccgccgagccgccgcccgcgccgcgcggccccgagccccccgagccgggcggggcgctcaacaagtgcgtgcccggcggccgggggctggcggggcccgggtggaggccgaggccggggccggggccggggcggaggcaaagggggccctcgctgtgcacgcccccagcctgccctcccggcggcacagggcgcggacctcaccgggtctggggccgccccgaaaggctgtgtgcgctgtgcgggccccggggagcaggtacttccagaaactaaacaccccctccctcagtggccccgcctggagtggggccgagcgcgcagaattcctgggaaccatgtgctccgggtggcactcttggatgtcagggaagcctaggaaggcccgacgggggtttgcaggctttgagctctaaaatgaggctccagcctgcagccgcccccttggcgaccctcagggatggctgtggaaggggctgcgtccgcagttttctgctcatcccagcctgtagttgcccatcgtggtcacactggaggatggcaaaagtgagattggtgtcaggatgtgatgagagcagggaggtggcgcagttttgcttttcctccataggaagaggaggacttccacagcagcgatagttgctaattgttgtgtagagatttccaggatgagagttgggttgctgtctggaaaaactagccagagccatgggagtgggatggtggatgcttgtctgccacgtattgctgacacttctgggctttcttttgtcttggcagtttggtaactctcattcgacatccatctgaactaatgaatgttcctcttcagcaacaaaacaaatgtacagcattagtgaaaaataaaactgcggctacaactactgctttgcaatttacatacccactgtttactacaaatgcttgctctactagtggaaattctaatctttcacagacacaggtagggaacatgatttgtgaagctttgctcttttgtattaaatgggtaaattttaacttattttggttaggtcccaagtacttttttttcccttcagtgagcttaataaccttttaagccgggcgccaaggccgacacctgtaatcccagcactttgggaggccgaggtgggtgggtcatttgagttcaggagttcaagactagcctggccaacatggtgaaaccccgtacgaaaattaaccaggtggtagtggcggacacctgtaatcccagctgctcaggaggctgaggcgggagaatcgcttgagcctgggaggtggaggttgtggtgggctgacatcgcgaccctgcactccagtctgggcgacagagtgagagcctgtctcaaaaaaaaaaacaaaaaaacaaaaacaaaaaaatacctgtgaaagttgagtgtttatgtggtatgcgaatatttttaaatcttcagtgcaactaaagttcttcaaattacgtgttagtagttttgatgtttgttaagtgcatttcatttgtgcagtaaagaggagagtaagccacatattgataaaattcctgttgcttcatttttttccagagttctagtaactcatgttctgtacttgaagctgccaagcaccaggatattggattgcctagagcattttctttctgttatcagcaagaaattgaatccactaaacagacgttaggtagtagaaacaaagttttgcctgagcaagtttggattaaagtgggaggtaagcgatgaagcagcaggtagtgggagctttcttctgactgagccctgtggctgatggcattttggccttggggggcaggggagacagatggtttgtacacatgtgaaacagtcttggaggtgtctgtgtatctcaggggtctgtccacccgcttccctgtcttttcgctttaaacattattctgattctcaaacataattaatcttggtgtgagaacgttgcgtttgagggctttttcttaacagtaaagtgatagacttacataaattttcagttattttcaagttactgaaagtactttatagttttttattttccttatgttatactcgatgagtgaggcagtcatctaacatctgccgaaagcctttggataggtggctgctaataggaggaccctattagggctgccagggagaggctgtaaggtgattcggaaagtttggaaataaagtcactgctgaaggcactgctgcgctaacctgcatagtcccttcctccctgggaaacacctgcgtagccccttcctccctgggaaacacctgcgtagccccttcctccctgggaaacacctgcgtagccccttcctccctgggaaacacctgcgtagccccttcctccctgggaaacacctgcgtagccccttcctccctgggaaacacctgcgtagccccttcctccctgggaaacacctgcatagccccttcctccctgggaaacacctgcgtagccccttcctccctgggaaactgatttgtgaagtgacccgaaaaaagaacactccttacacttagctttccaagagttggtgaagacaagatggggaggaagagctaccgccttctcccatgtcagtccttccttttcctccctataaaattttatgccaaagtatatgttcacatttgtaagatacaaagatgagtattaaagcagcctctgtgccgactactcaggttaaggaataaaatatcaccaaaacgaccgaattcctctctctcctgctgaaagcttcatcatccttctgaaatgggtgctttgtgtggcatacgcgtgcacatgagcacgcctgccagtcacgtgcctgtggtcctttgatggatacagttccactgacgcacacgtggcatagcctgtcacgcagcagaaaagctcggacgctacttcttcctgctttggggaggagagccacttctgcggcgagggcacacacacacgctgctgcagttttgttctgagcattgcagtaaaaatactgtcatattagaataattgtttttttttcttgttcttagaataattgtatataaagaaaatatttttgggaggaaatatgtccaggtggtttgttgttgttgtttttttttttccattctgacctttagaaaaagtaaacaacttcttgttttctgtattcatagataacacctgttaattaaaaagaggggctttggatgaggtcatattggttgcatagcacttggaaaacgtatttagtgtgatgattgattcttgttcagtttcgttgtataaaataggcttgggcttcatggtccctgctgatgctgaaaaactgcattagtacatctctttgtgtttcggttctctgtgctgcttacccaataatgtttatatcttggattgaaaaggccaaaactgtattcagcattaattgagataagaatacaaaattaaaaaccacttttttcttctttcgcaaagaagcagcgctatgcaaacaagcactgaagaggaatcggagtagaatgcgtcagttggacacaaatgtagagcgaagagcccttggagagattcagaatgtgggcgaaggtgccaccgccacacaaggcgcttggcagtcctcggagtcctcacaggcaaacctgggggagcaggcccagagtgggccccagggaggaaggtctcaacgtagggagaggcataaccgaatggaaagagatagaaggtaatacgtgtgactgcttgtcaggctgactcatatatgattaccttagtcatacatggttatcacagatgagtgatccttagccgtttctgcgttcagagggaataaagcaggtaggagcatcgttagctttcccagatggatcaaggatcccccagactatgcccaggctcgctggctcactaggaggactcccgggactccgcatgcagtcactctcaggctgtgacttactatggagaaaggatgccaggtgcgatcagcaaaggcgcgtggggagaaggcaggagctgaggtgcaagcttctaagagcgcgccctgtggagtcaggcaggttgcccctcatgcccccagccatgtggtctgaaaacgtgggtgaggtgttgccaaccaggaaagctcgctagagaccaggggcgtgtcacgtaggcactgcccccatgcatgcaaccacagtccagtctcccagaaggaaagcagttgttcagtgtcagccatatcgtttgcacagtgtaggttctgggggcactcttaactccctgaatctaggtttgcagactccactaagggccagccctgactgcaggcctttctgaggagagtggtcaggctgttttggtaactgctgcttaccagccagcttgagttcagcaagttttgcctggttctttttttttttttttttttttgagacggagtcttgctctgtcgcccaggctggagtgcagtggcgcgatctctgctcactggaagctccgcctcccgggttcatgccgttctcctgcctcagcctcctgagtagctgggactacaggcgcctgccaccacacctggctaatttttttgtattttttagtagagacggggtttcagcatgttagccaggatggtcttgatctcctgacctcgtgatctgcccgcctcggcctcccaaagtgctgggattacaggtgtgagccaccgctcctggctattgcctggttcttttaagattgctgggaaggaagaggttaaaattgttatttaagtggttttgtctgtagattttatttgtggtatccttctttgtagaattaagagtggttaatttttttctattataattgggttttcttttctttttcttttttttttttttttttgagacggagtcttgctttgtcacccaggctggaatagtgcagtggcatgatctcggctcactgcaacctccgcctcccaggttcaagcgagtcttctgcctcagcctccccagtagctgggattacaggtacccgccactacgcccagctaattcttgtaccttttagtagagatgaggtttcaccatattggccaggttggtctcgaactcctgaccttgtgatccgcctgcctcggcctcctaaagtgctgggattacaggcatgagccaccacacccggcctataattgggttttcatagaatatttccctaatctataattaattaactacataatgtatcgagtactggtactgtgtaccagtttctgctttaagttcaggaaataaataacagtgagtgagacaaatactcaggtttgaagctccaaggttgaatgttgagctaaggcaatttatttatttatttatttttttatttggtgagatggagatttactcttgttgcccaggctggagtgcaatggcacgatctcggttcaacgcaaccttcgcctcccaggttcaagcgattctcctgcctcagcctcctgagtagctgggattacaggcatgcgtcaccacgcccagctaattttgtatttttagtacaggaggggtttctccatgttggtcaggctggtctcgaactcctcacctcaggtgatccacgtgcctcggcctcccaaagtactgggattacaggcttgagccactgcgcctggcatggcaatttcttttaaagggatctattcaaacttgctggggcagggtgcagtggctcatgactgtgggccgaggtgggaggattgcttgagcccaggagtttgaaaccagcctgggcaacatagcaagtccccgtctctaaagaaaaaccaacaatactagtagtggtggtgttgcacacctgtcgccccagctacttgggaggctgaggtgtgggaggatcacttgagcctgggaggtcagcgctgtagtcagctgtgatcatgccactgcactccagcctgggccacaaagtgagacccatcccccaaagaaagaaaattaaaaagctagctaatatctttttatgatacttttatacacatggactaactgagggccttcctcaccctactgtgaattatgaagggcattttgctccgacatttatttaatagacatttattgagtacctgctatgtggaaagccttacaccgtacgttgacagtttgaaagttggacttctagctctactgcgtagacttgtggttagagttcagtgagctgatgtgtaaagagtgtttcgctcaatgtctagaagtccaaaagcacctagtaaatgccagctgctgttttactggcaaagtctctaattaaagttctaaatagacgggtgtgaaggtgagtaacaagggccatattgaataagttgctcagtatctgcttgtttaggactttgcatgttactgaatgtaatatgtaaaagtttaaaaaatagtctaataacaagactccaattgtttatctctacaaagaccaagtttcagaatattaacagagtgttgggccgtgatcctttctgaatcagggccccttggagaaagctgtgcacgagttcctggtagggtatttagcccgtgaagggcaagtaatatcagtcttgaatgacagagttatctgcccaatttggacccctcagtggtccaaatggaagaaggtgtcagacacaaaatgttgcttccagtttcaggggctttggagccatccctaatctagagacttgaacctggcccgtgagaagtaaagagggaaagctccagggagcttgtgggtcatggggccgccaagggcacccgaggatgctctggcctctggaaggcagtggctgcctctgtagacaaggccgtggcaaagccgtggggcttcctgtggtgacaggcgcttccgtggcactcagtggccaggatgcacgagctctggttccctcaagtactacaggagacgcttccttttacatgtttgttttgctccggtctctctcggtgatgactttgggttttgactataggcgcagaatccgcatttgctgtgatgagttgaatctcttagtgccgttctgcaatgccgagactgacaaggccacaactctgcagtggaccacagcattcctgaaatacatccaggaaagacatggagattctcttaaaaaggttagtggtaggccaggtagattttcagaattttacaaattttacttaacaatgtccctcctttttcctaaggataactcaaactatcctttgtttcctggaatctaacatcaaatactaagtccagtatgagcaaagctctgctctttaatgatataacttgtcatttattaaagtaatagtcacagcctacatgtgttacactcagtgtgtaaataactgtgaagaggcaattgtcagatagcaaattgggcacctgctgtgtacggtatattgcactggggctgacgggtgtgtaggacatgatatttgccctcagaaaaacttgtgaaagggataaaagcaagaatagaaaaacaaaaaccggccagccacagtggttcacgtctgtaatcccagcactttgggaggctgaagtgggaggatctcttgagcccaggagtttgagaccagcctgggcaacatggcaagaccccatctctactaaaaaatacaaaaattaacctggtgtggtggcgtatgcctgtagtcccagctgctcggggcgggggctgggagggaggatcaattgagccagggaggtcgaggctgcagtgagctgagatcataccactgcactccagcctgggcaacagggcaagaccctgccccacccccacccaccccaaaaaagaaagagaaacaaaaatgcagataagtgtcaaatagtctgatctggacttcaaatatgcccagcaggttaataagaaatatacttctgtggactgggtgcatatacttctgtggactgggtgcatatacttctgtggactgggtgactatacttctgtggactgggtgactatacttttgtggactgggtgactatactgtggaccgggtgactgtacttctgtggaccgggtgactatgcttctgtggaccggtgactgtgcttctgcggaccgggtgactgtacttctgtggaccgggtgactatgcttctgtggaccgggtgactatacttctgcggactgggtgaatgtacttcagccgaccgggtgaccatgcttctgcggactaggtgactatacttctgcggactgggtgaatatacttctgctgactgggtgaatgtacttctgcagactgggtgactatacttccatggactgggtgaacatacttttgtggactggttgactatacctttgtggactcggtgaatatacttctgcggaccgggtgaccgtgcttctgtggaatgggtgaatatacttctgcggaccaggtgactatgcttctgtcaaccaggtgaatatacttctgtggaccgggtgactgtacttctgtggaccgggtgaatatacttctgtggaccgggtgaatatacttctgtggactgggtgactagggaggagccggcgtgttagcgccagcatatgcagtccctcaggacagccagcctgccgtgatcctgtctgtgtggtcgtggcagtggcctgcagcaagccatcgtggttggctggaactagacgtgtgatttgaatgcaggagttcagtcagcccctcagtggcctaaaaggaagaaggtgtcagtcacagggctggttctgggccctgccttggggggaccccagttccagggttctgggccctgccttcaggggacccgagttccagggtcctgggccctgcctttgggggacccgagttccaggtcccggcctcagcgttgcagtggccagggtcagtggctctttggccctctaggagtgagcagaccttagtgaaatagatccacagggtcctgactttgtacctggtccaagctgttggggaattgctgctgttgacccaggcaggagtctgactagagaacaaactaaggttgctgcaacaaacaaggacctcttccaagaagggctcccaggcctggcgcagtgactcatgcctgtgatcccagcacttgggaggccgaggcgggtggatcatttgaggccaggagttcgagaccagcttggccaacatgatgagacccccgtctctattaaaaatacaaaaattagccaggcgtggtggcgcctgtagtcccagctactcaggaggttgaagcaggagaattgttgaacccgggaggcggaggttgcaatgagccaagatagcaccactgcactgcagcctgggtgacagagcgagactccatctcaaaagaagggctcctgtgtctacgtcatggtggggctagagagaggtccccgcagctgggctgtgttgagtgagggctcgtctcttcagcgccaggcaatagtttgtcttgtctctgtcccttttctgtgtccacatgacatttacatcttgcgagttgcataatttaagttgtttatttacattatacatttaattgcattctatagcgatgctatgttgaatgtattctgatcggatcgtttatggttatttacaatgcagttactcttgaagattattgttagaggtagactgttgatttgttttgataaaataaagcttttgtgttttaaaaaatg

SEQ ID NO: 2719 - DNA, 157 bp, Homo sapiens
ccctcccccaacggcgcgccggctgtggccggcgcagagtagtgctcgggccgggggtcgcctcccgcctcccgcctcccgcctcccgccgcccgccgcccgcgtcgccctcgccgccgttgggccgcgccgcgccgccatgtcgggccccggaccg

SEQ ID NO: 2720 - DNA, 117 bp, Homo sapiens
ttctaaaacccaagaggaacaatttcaaacctactgagcttttcagtgatcattgtaatattggggagaaggttctaggaagacccataaactgagagaatcctcacatgatcctgc

SEQ ID NO: 2721 - DNA, 117 bp, Homo sapiens; identical to SEQ ID NO: 2720

SEQ ID NO: 2722 - DNA, 986 bp, Homo sapiens
gaaaaactataagaacctggtatcactgggatatccacatctctaagccaggatagtgcacagattaagattcaaggtcacttggaaagaccaatgctttattgtgaactagaagatggactgtacacagttggtccctacatctttgcaaagatactacaggagctcctataggagcattgcacttatattagcacctgcagattactccccttttagctggacaacctgaggatgagactggagtacacctgctggtgttggttggaggtgttctattgcaggaccatggcatagcctatatcaatatgtagaatatttccatcacctcagaaagtatccatatgaccctttgcagtcaagtaccttctcctgacccctatcctatgccctggcaaccaccaatctcttttctgaccttatagttttgccttttccagaaggtcatataaatggaatcatatagtttaaaaaaatatgatgcaatgaaacttataaattaaccaataaaagtgggaatgaatttagagagcatgaaaagataaaaggaataaagataaaataaataagataaaactctagaaccaaaataggaatgaagaaatttaaagaagaaacttataataatgttaacatcaaatatataaaacctaagataaaattttttaagagtagtcaaagaagataaaaattttcaaactctgctgctgggcacagtggctcaagcctgcagtcccagcactttgggaggcagaggtgggcggatcacctgaggtcgggagttcaagaccagcctgatcaacatggagaaaccctctctctactaaaaataaaaaattagctggggtgatggagcatgcctgtaatcccagctactcaggaggctgaggcaggagaatcacttgaacccaggaggcggaggttgcggtgacccaagatcacgccattgcactccagcctgggcaacaagagtgaaactccgtctc

SEQ ID NO: 2723 - DNA, 322 bp, Homo sapiens
tggaagggtaggctacatcagcggatctcactccactcgttaaaacttcatctcttcgtttgtttactgtgagactgactggggtgttttggtatttggagggttggttgtgaggatatgaggaattctatttgtttgctttaacttgttcctaaggagttaaaactaagttttagttcatttaaaatacaaaaacagtcaaagctaatctgtgctgataggggttgttccccatgggaagtttgggggaggggtcgtgcctacactagggggtgctgttcgtgttctgtttcttcttttttttttttttgagatggagcct

SEQ ID NO: 2724 - DNA, 193 bp, Homo sapiens
taatggagacagagacttgctctatctcccaggctgattgcagtggcccaatcttggctcactgcaacctccacctcccaggttcaagcagttctactacctcagcctgccaagtagctggttctacaggcgcacaccaccatgcctggctaattttttgtatttttagtagagacagggtttcaccatgttg

SEQ ID NO: 2725 - DNA, 20467 bp, Homo sapiens
tgtgagaattaaacagatggggaaaaatgccagtggacaaacacactacctctcattatctggattcgaactttatggcactgtaaatggagtatgtgaagatcagctaggtaaagagatgatacgaggcttttctaacttactaaaacaattacttttgtaaaaagtgatttggtttttatttctccaatttctacctgacagggaaagcagctaaagaagcagaagctaatcttagacggcagagacgtctagtacgttcccaggttctgaaatacatggttccaggagctcgtgttatcagaggcctggattggaaatggcgagatcaggatggcagcccacagggagaaggcactgtcacaggagaactacacaatggtgagtaggtgctcagcacttttgtgtagaaaatgggtagttaaattttttcttttaagataatttataaattgcataaatgtatgagcactgtttagaagaactgttgataccacattacaaatggaaaaaaggtaaagaaaataagggaaaattttaagttcttgggttttgactagaaacttactggtagtattttggaagtgatcaagcctagtgtaagttgagtatcttcaagacacacttccggttttttcccctagtttattttcaagcttactgtgagttttattttaatttcttatgtttttctttatcttgttagtctcacaccataatttttatggtatcataaatcatatagaagaaaaaggattaacatttttactgttttttaataatgcatggaacaagaaacattgtctctttatctgttagtagattattattatttcaaagtgtttcttagcctacctgctttttggggaggagtttatcatgttttctaaatattgctatgtgaatcaagtttctttgatgctgcacagtttagcaaagtcatccacttaataaattgctattaactttaaagcaattatagtggctaattattttcttcaaactataaggctgacttattagcagataatttgcctaaatggcagtgggtttgttttcatcaattttgtatcagtttttggcattaaaaaaagtaaaaatgtttatattctcaacttacaccacatatatatatccacatatatgtgtgtgtatatatatgtatttttttttttttttttgagacagagtctcgctcttgttgcccaggctggagtgcaatggcgcaatatcagctcactgcaacctctgcttcccaggttcaagcgattctactgtctcagcctcctgactagctaggattataggcatgggccaccatgcctggctaattttgtatttttagtagagacggggtttctccatgttggtcaggctggtcttgaactcccgacctcaggtgatccacccacctcggcctcccaaagagctgggattacaggcgtgagccaccgcacgcggcaacttacaccacatatttaaagagctagaataaatgtgacggtacttacgagaatgactgacatttaatttcatgttttatgtggtaaagacatttatttattcaaataaaccctttgactatattgcttttaagattctattccttgaattattttactgccaaatgtatttatgtagtatcatgccctaattgcaaatcattgtaatcaaaacaggtttacagcgacctaaaattcataaataccagtaatagttgagatatcaactattattgttatactgagttgaatagtagtgccattcaactcagaaaatttcaagttttctttttaggcatcttgatgatacttattaaaaagttgttattctatttcctgtaattgttttggccttgatgtatgtgacttgataagaagaggctagttagagatgtgtgaatgcagttcttttttctcaggatggagtcaactgaagcaattgcatagggaaattagaatctttttttttttcccaagatacaatggcacaacagttttaatacaaccaccagtcttcaaaaaataattttaatactttgtgcctgtactagcagcatcttgcactgtgacattcctatacatacataagcattttattgaagtacaaatgttaaaagcagagtaacttaagcaattgcctatacaaaggtaaatagacactgtgggttatttttcttctcgattcatttttgctgcatagtaagttgcaattacatgtcagtataataatgttactgatctataaaatatatttgaaccgtgaggtatggcacctccctatgagagagtgctaacatgtacatctgaatattttgagtgttttttgtttgtttgttcgttttagctgccacagatgggaaaaaaaaaaatcacctagcctagaaatctcagagtttagcgttcaagaaaggcctatttttgctaatctgacaaatgtagaaatttagttttgcctaatcaacatggccattcccatcaagttatgcctttgagtctctatgtcagagagggttcttagctttcaaatacttaaaccaaccatttctaatgatggatagtcattactgactctatttttttttttttttggtttatcttttgggtgtagaaggagttgagagagtatgttttttgggccaattaatataatacaaaagttacttttatttgagattgggctatgtttttgaaacttttccttttctcacacatttctgtgtagcagaagagatagttaaatgttggttcttcagagattatttcagcatacagaaaaaaatagaggcaattgaaaaatctcatctaagctacttatgtagatttggggcagtcacttttcctttcaaagaacacatatgcagataatccccacaggtaattcaatattatttccctctgagtgctatcataaacatatgaacttggtgtaagtgtgggtgagcatctgggtgtgtggatgggtgtgtatgtgatcttgggccccttttatgtatgggtaagaactttataaaggcttgttatacttctaaaaaaatgttttttatgtcttatgtttttccctgaaatagttagcttataacactaaaataagattgtaaaatttctattaatttgcttttaatagacaattttttttttgcttttggaagttaattacctttttaaaaaaagaatatcatttttctactacaagtaaatatatagattgaatatcattatgctcgttaattctgtacatgttattagctttagcagatagttctaataaaagagttcagtatgctctttaaatttttttttagaattttctgtgtttattcaaatttattgaacttaattatttaatataagagaaccaaggaaccactgaactttgagaacacaaccgaaatgctaactttagtgttttatttgaactagtgactaaaatttctatggcaatatatgaatattttgagaggttagcccaaattgtaagaaattaatggtaagctggcatgtttttgtagaaaaaaaatttgactacacataattatatttagcagttttaaaacttttacctagattctgtttacttgctgaagtggcagtattttaccatgtatatcaatcttttaaaatttcttaaacagttcttccatttaagaagtaaccaagccaggtgcagtggctcacatctataatcccagctactccagaggctgaggtgggaggatcgtttaagcccaggagttcaagattagcatgggcaacgcaagacctcatctctaaaaatcaaataattttaaaaatgaaatataacccagtagatttaaacatgacccttacattgcttttaaatgtcatagactgaatagttcagaaataagggaaataaaaggaagaattttaaacatttcctggaaaccttgtatagagtacatatttcttgtccttaaaatatttgtatcatgagagttaaataatatagactttcagatagctagtcatatcgtcaaataattgagtccaaaaatttacatatattttagtgggcagaccttgattgactatagaaattcagaaaaggacagcactgatgaaaagctgatcccatattgtggagctactgtctgacacgctcctatctgctttctgctgggtctcacaaactcctgtccctttccaggctggattgatgtcacctgggatgctggtggctcaaactcttaccgtatgggcgcagaaggaaaatttgacctcaagcttgcaccagggtacgaccctgatacagtggcatcacccaaacctgtttcatccactgtttcaggcacaacgcaatcatggagcagcttggtgaaaaacaactgtccagacaagacatctgctgctgcaggctcctcaagtagaaaaggaagcagcagttctgtgtgtagcgtggccagtagcagcgacatcagcttgggttcgaccaaaacggaacggagatcagaaattgtaatggaacacagtatagtttcaggagctgatgtccatgaaccaattgttgttctttcatctgctgaaaacgtccctcaaacagaagtagggtcatcttccagtgcaagcaccagcaccttaacagcggaaacgggaagtgaaaatgctgaaaggaagttaggccctgatagttctgttcgtactcctggggagtctagtgcaatatccatgggaattgtcagtgttagttctcctgatgttagttcagtatctgaattaactaataaagaagcagcttcacaacgacctcttagctcttcagcaagtaacagactgtcagtgagttctttgttggctgctggggcccctatgagctctagtgcaagtgtacctaacctgtcctcaagagaaacatctagcttggagagttttgtaaggagagtggcaaacatagcacggactaatgccacgaacaacatgaatctaagccgaagcagcagtgataacaacactaatactttggggaggaatgtgatgagcacagcaagtaagtgagcttttccttctggaatccgatgctttttccacttggagggatgcaaaatagggtctcttgttctggctgcagtttttaactagatcattaaccatgttagataaagctacatcaaatttagcagttcaggaatatgaagttctctagaatcataatatttgcagaattcagactaggtgtgataaagaacctcttattttagaagcataaaacagtacttctgattttcactcctttatgatacatcattaagcaaagttgcatgaggaaatagatgactattaaatattatcatagtgcagtgaaaccaaagcatcatataagtatagcttttgtttagactctacattgatcttagcttctgaaagttaaattccaatttaagctgctaacaggtcaaagtaattatataatagtgctataaaaagaatttttagttggatttcagttgggttcccaaagttgttgcttttcaggaaccattttattattagtgtgttttatgacctcactctttaaaaaataaaaaacttggtttttctgaggtttctacaatctcacctatttgtactgatttgcttcatttttgtctttagcttctcctcttatgggtgctcagagtttccctaatttgaccacacctggtactacatcaacagtgactatgtcaacatccagtgttactagcagcagcaatgtagctacagcaacaacagttttatcagttggtcaatctttaagtaacactttaaccaccagcctcacatcaacttccagtgagagtgacacaggtcaggaagcagaatattccttatatggtaagttgtaatttaaaatgaaagtatttagatactttcataatgatgcttttattatgttttctcctgatattttaaacttttgtttaaagagaattattctctcttcttataaatatgaaatcttcgggccaggcacagtagctcacacctgtaatcccagcactttgggaggccgaggcaggtggatcagttgaggtcaggagttcgagaccagcctgaccaacatggtaaaaccccatttctactaaaaatacaaaagaaaattatccgggagtggtggcacacgcctgtaatcccagctactcaggaggctgaggcagaagaattgcttgagcccaggaggcggaggttacagtgagcagagatcgcgccattgcactccagcctgggcaacaagagcgaaactccttctcaaaaaaaaaacagaaaacaacaaacaaatacagaatctttatatataatatgaaaaaactcagtaatacgagagactattaaaaaattatctggggccaggtgcggtggttcacacctataatcctagcactttgggaggccaaggcgggcggaccacttgaggtcaggagttcgaaaccagcctggccaacatggtgaaaccctgtccctactaaaaatataaaaaaaattagctgggcgtggtggcggttgcctgtaatcccagctactgggaaggctgaggcaggagaatcgcttgaacccgggaggtgggggttgcagtgagctgaggtcgcaccactgcacttcagcctgggcgacaaagcaagactccgtctcaaaaaaaaaaaaaaaatctggtcagaagtggtggcttgcgcctataatcccagcactttgggacgccaaggtgggaggatcacctgaggctcaggaactcaagaccagtctgggcaacatagacccccatctttaccacccctacatccccaaaattagccaggtgtgatgtcatgctactgagaaggctgaggtgagagggttacttgagccctgaagttcaaggccccagtgagctgtgatcatgccactgcactccaacctcagtgacagggctagaccctatctctgaaaaaatatttttttttaaattgcaattatctgattatacatgaagtagatctaggaactttatatgtcatttttttttgtattttgtcacaaaagaagttttaatggaagaaccataaagctatttgacactcttatcactaagagaagaagtgtaatagattcataagctttgtaaaatgatattccttgtatgctgttatcacagtcttttggaagtaattccttagttaggtaatgcatgattcttgcaaattaaattttatttggaaagttcagtaacagccttatggcttccatgctataatcaaagggatgtatttgattcagttaagatagaatctgtgtttctatttcttttatttcatcttattagaaaagtaatgctctgtatagaaactagaagaaaattaaaatcatctagtccccacctaccagacaaccagctttgatgtacatcatttgatgtatgtttttgtttttttaacataaaaggattatatccttttccgccagctgttttcactcaatacattgtgaaaatattttcacatatgttgcatgggtttctataacatttgaaatgactgccaaatatttcactgtatgatcatcatttaatattattatcaattttgtatatttaagttagaacttttccattaccataaacatcattatgaatgagctttcttgaactgtattttaatatacttccttaggataaatgcttaaagtaataattattgaattgctttccaaaaacattgcactccatcccaattgttttggaataccctttaccatatatccttgatcatactgcctgtttttctttaaaaaaaaaaaattgggagtaattttaaagacaaagtttatgtgaagatacatttttaaggtgctattttgtgtatagcccattttcatgttttcttcctttttgtgagaatatagcctctcctaattcatagcaagaatttgatatgatgttccatagttttaagagagtcattatatttctgtttctgcttattaaacgtgtgtgtagcaaaatgatgatgattacaccaaagtgttataaattcattgcataaggtgttttctgatttattatttctcatggtggccctgtgcccctctctactgatttgttattatgttaacttcaagcattagttcttggtcatgggaagttgaagatgattgtgggtaggaaagagtgaactggccgggcgctgtggctcacgcctgtaatcctagctctttgagaggctgaagcgggcagattgcctgaggtcaggagtgtgagaccagcctgggcaacatggtaaaaccctctttactaaagtacaaaaaattagccaggtgtggtggcccactcctgcagtcctaactgcataggaggctaaggcaccagaatcttttgaacctgggaggcggaggttgcattgagccacgattgtgccatttgcattctagcctgggcaacagggcaagactctgtctcaaaaaaaaaaaaaaaaaagttagaactactgattgacttttaaattttgttgttaggtttgactagccttaaaaaaatttattgttggccgggcacagtggctcacgcctataatcccagcattttgggaggccaaggtgggcagatcacaaggtcaggagttcgagactagcctggccaatatggcgaaacctgtctctactaaaaaatacaaaaactaaccgggtgtggtggcggatccctgtagtcccagcttctcaggaggctgaggcaggagaatctctttaacccgggaggtgtaggttacagtgagccaagattgtgccattgcactccagcctgggtgacagagcgagactccatctcaaaaaaaaaaaaaaaatttattgttagatgatgaaaaaaattaatataatttttattttagattcaggggatatatgtgcaggtttgtcacaggggtatattgtgtgatgctgagatttggacttctattgatcttatcactcaaatggtgaacatagtacccaataggaagttttcagcccttgcccactcttgcactccttttggagtcgctagtgtctactgttcccatcttgatgtccatgtgtacccaaggtttagctcctacttataagtgagaacatatgatagaagattttcttttttatattcttaaagctggtagatactttaagactgctggggtgaaggatcagagtaacatcagtttataccatttgtgtatgctgtgcaagcttttactgtgttttgtggtttttctcttaccgcaggcacgaatactataccatgttgtgttttgaagagacattttattctatgatgtggtcaaatctgtgaaatacagagctttttaatgctggtaaaaaagggaagatgagaaaaaaaaagggacatcagtcagttgtaacataccggagatagaatttcaatatatgaagttagattatgttctttaaaagacaaatcaaagtggaactggtttattttgtgtaccaccacatcatgttaatcacaaccagttcctaaattgcaggtggctccttacaagtgttaaagggtaacatattttatcaaatttaagatgctgttgagtgttaagacacaccattttttttctgttactaaggttaaaaatgttgcaatttaattctgacttgccattgtttgtaagatacattccgatttcaaagcattacaatgttttaaaaatgtagacctttcaacctgagaaagttgataacagcaaaaaaatgtggacccttagaaactaatgaaatataatggcaggcctcttctactggccatccagtaaaaggcactgaatatttagtcctgtgtaattattggactaaaaaccatttggttcagtggtctgcaggtgtaagtttctgagcaattataaattgtcttctggatgttcttcaggaatataaagtattttgttttctatcctttgtgcaattctgatattatattttactattttttccagatccagtaaaaacttctgttataatccctttagtcctctttttttcagtttttatgaagaacagtttgtcagcatcttcatttatgcaggacaatgtaatttgacccagtctccatcgaaggcaagagattataagaaggaaggagataaaaatgatgcaagttgttttgaacttccttatgtgctagataatatggataacatgaaagatgccacatacattattccgtagtaaataggcattatcttaagtagtcattgtttttaagtaacctaccaggtcacatatctaagccccgtttttcactgattgacttaattctgtttttcctcgtaagatcttttacatgttgtaaaggtttgtttttttggttattgttttttaaatagccccacatggttatccatttatattatgattttgtaattcaggtttagtttatggttgtcctttatcacttgtttttgtcatgcttgtgtctgtgctcatcttgtatgtggtggcagaacgcaacagttgtcccttttgaattttacttttgttttgtaaaaacctaaaatgcaaagttcctttgttatgctttcttaattgtgttgacataaggttgtgggttttgttttcaagatttccttgatagctgccgtgccagtactctattggctgagctcgatgatgatgaggacttacctgagccagatgaagaagatgatgagaatgaagatgacaatcaggaggaccaagaatacgaggaggttatggtagagagagtaccccattctctttacaaagataggatgttaataattgaaatgaagaaaggaaaagctaagtcataatcaaactttgaagcaaggaaatgtggcaccagtataaaaaatgtagttaattaagaaaagcagttttaatctgagcatttatgattctccacttaaagaaaataagttgcttatatttgaaaaattttagaatgtcacatgatgttttaacaggcttaaaagggtgtgaaattaggctgggtatagggctcatgcctgtagtcccacactttgacatttgtagtcctggctacttgggaggctgaggtaaaaaatcacttgggtccaggagttgcaggctgcagtgagctataattgcgtcactgcactccagcctgagccacagaatgacacaaacacacacacacgtacacacgtgtatgaacttagtgcagtggctcgtgctgccatgagctataattgcatcactgcactccaacctgagccacagaatgacacacacacacacacacacatgcgcgcacacacacgaacttagccagtgcagtggctcatgctgcagtgagctataattgtgtcactgcactccagcctgagccacagaatctcacacacacacacacacacacacgtgtgtgtgtatgaacttagccagtgcagtggctcgtgctgcagttagctataattgcatcactgctttccagcctgagccacagaatgagaccctgacacacacacacccaagcacacacacagtgtatgaacttacccagtgcagtggcttgtgcttgtaatcccagctactcaagaggctgaagtggccctggagtttgttttttagtacctatggttttgcaagcagggtccatctgttttttcattagttgtcacatgaaggaatgaagtagaggcataaaaaaaaaaaatttgcccttatcatcagagttaagtggaagagtgaggacccaagcataggcaatgtgatccagaactctcaatatttaaccactaggattgtcttctaactgaaaattgtgcctaaaaaataccctttattgtaactaactgtaaatttaaaatttctctttataaaatgttactagatttcaaaaaaattgataagttgagttttaatggagtaaagaaatttaaaaaatgcttttagtatatggttgctaagaaaacacaatacttcttatgaaggaggttagtataaaatgcatgatgaatttaaaacattgaactcataacttttctgaagttggctaatgaaaaagttttcagtgacacttttgttaataggggttaatatattcaggtcatggctgaaagggggcatatatgggtcaaataattagacatgtatctcttgggattgttttattttagattctgagacgcccatccctgcaacgtcgagctggctcccgctctgatgtaacgcatcatgctgttacctcgcagctaccacaggtacctgctggagcagggagccgacctattggggagcaggtaatatcttcatgtttatcttccctaccatatgtatatttttcccttttatagtaaagcaccaacctaaatgcctacaaaaatgtgcagtgtggaaggggtgagaggagggagctaccaaacagttacacaaagaaacttcccctactggttgggtttcatattctatatagaatccatgattgctgtgacataatgcatgcaggagtttaatgcttgaaacccctttacgttgctttgggtaatagtaaacatacattaaaatggttaatatatggtatctaagatttgtagttttagtagtagtagaagtggtagtagatgcagcagtagtagtttattaatagctaacgcttaatgatcactaactaagtgctagagttgtttttgtttttgagacaggatttcgcttcattgcccaggctgttcttgaactcttgggctcaagcaatctgcctgccttggcatgagccactgtgccttgccagcatagttcttaatactttatgtatattaactaattctttccaacaaaacaacctttttagggttattgttagccctaattttcagatgaagtaattgctaaaagtcatacatgtaatagtagttttggttccaggatgcaaacccaaacattctgaaaccagagctgtcaaatgtcagtttgtttcagttaagtgtttaaaccaaactgtggatgtgcacgtgtgtacttacatgctgtctgcctcatagtaatttaaagcaactccccagcattttatttggtatataagtaattcagtacaaaatgtaatttacgttttaaaaaccaacttattttaaaataattataggttcataggaggttgcgaaaatactccagagaggtcttatgtgccctttacctaatttttgccattggctagtttcatattacctaattttagtatagtaacaaagccaggaaattgaggatgtttgtgaatggttatctttttattttttttgagacagagcctcactctgtctcccggggtggagtacagagtgtagtggcacgatctcggctcactgcaacctccgcctcccaggttcaagcgattctcctgcctcagcctcccgagtagctgggattacaggcgcctgccactatgcccagctaattttttgtatttttagtagagatggggtttcaccatgttggccaggctggtctcgaactcctgaccttgtgattcgcctgcctcagcctcccaaagtgctgggattacaggcttcagccaccatgtctggccatgaatggttatcatttggtgaaatgtgtagatttgtataaccatcactgatgcaacttactttgggtaaactgaaatgatgaagaaatgtatgtatctatacatgtttaggttagctcattttgggtttaagaaatatggctaaggaaatgcagtagttctaaataacacattgcttttgcaacaatgaaattttgcatcttattatgtttgtgtgtgaaattttattttgataggaagaagaagagtacgaaactaaaggaggacgccggagaacatgggatgatgattatgtgctaaagagacagttttctgcattggttcctgcttttgatcctagacctggtcgtactaatgtccagcagacaactgatctagaaataccacccccaggtacagaatgttttggttttgtgatttaattttaatacatactaaatcagatatgaaaagtagggtgttgcttttgtatgcacgttattaaaaatttttttttagttttgtgtatgcaggttataaaaaatttttttagtcagccacaaattctttaaaaagtaaaggtttttttaaaggagcaaattacaaattatttcaaattttaaaaaccaacatgtgttttgtatttgtgcaatttttaaggcaaagtcccatttaaaggtgggaaatttttactgtattttctactggatcaaaatttctaaggatttattcctctcagttttgaaaggctatccagtggttacagtcatgccctctagagtcagttggcctgggtgacaaccttatcccttacaaaactctattttagattgtggtaggcatactaatttctccccaaaatcaggttctaacctctggaacttatgatatattatcaaagcagaccaaagagactttggagatgtaattagggatcttgagaaggggagataatcctggatcatccaagtggacacagtgtaatcacaagaggcaggagacagagaagaacatgtgactaaggaaacaggagtcagagtgacgacgagcagtgagccaaggaatgtgggcagctcctagatgctagaaaaggcaaggaaacagattcttctctagagcctctagaaagaatgaagccctgcaaatccattttaggcattcgacctctagaactatgagataataaatttgtggtagtttttttttttttttttttttttcccttgagatggagtcttgttttgtcacccaggctggagtgcagtggcacagcctcggctcactgcaccctccgcctcccaggttcaaacaattctcctgcctccgcctcctgagtagctgagattacaggcatgcaccaccatgcccagctcatttttgtatttttagtagagacggggtttcaccacattggccaggctggtctcgaactcctgacctcaagtgatctacccaccttggcctcccaaagtgctgggattacaggcgtgagccaccgtgcctggcaagtttgtgttattttaaaccacccaatttgtggtaatattttatagcagcagtaggaaactgatatattgggcaagtcaccaaaactatccaagcttgaatttcttcatctcttacatgagagaataaaggtccctgtttgacaaggtagttaaaaagcttaaatgaagtaaggtatgtgaagtgcttagcatgctgcctgatgtgtgtctcaataaatgtcagctattataatcagtaaattatccttaacaaagatttaaattgttgattaagtgaggagtgtattttttagcctgatagtattaggctgggcacggtggctcacgcctgtaatcccagcactttgggaggctgaggcgagtggatcacaaggtcaggagttcaagaccagcctgaccgacatggtgaaatcccgtctctacttaaaaatacaaaaattagccaggcttggtggtgcgcgcctgtaatcccagctactcaggaggctgaggcaggagaaattgcttgaacccgggaggcagaggttgcagtgagccaagatcacaccactgcactccagcctaggtgacagagtgagactctgtctcgaacaaaaaaagacacctgtattaaatatgaaagtaagtatactcggttgtataaatgttctttggggaggatagatagactgaatcaaggtgttctaaggtcccttcaaaaaggaaaatcttgtttctttggatctcagagaaaaaaaatgaattataaaaaaggaaaacacattctagagagtataaataggcacaaactttttgtagagctctctgccagtatattttgtatcttctgacaaagtgttgttgccattggtaattttaaatattagctctgtaccccgttttgtacacataggtgactgtagaagtatttatattttcaaaaaattggaaatgaccttaattatgtccagtaactgggatatgcctctgtttaggtacagtgggatattgtgcagtgaaagaaataatattttagaagacgatcatgataatgaagaaaacattcatgagctaataaaaaatgagagcattctccaaatacattatgaaactaattatatgtgtgtgtgtatatgtgtttacctcatgatgcagttattcagtgtgataaaaggttgacacgtcattggcccagaatatgtggttttctctgagtatggatacttttagttttctcatttataaaaaaaattgttttttgagatggagtctcgttctgtcacccaggctggagtgcagtggtgtgatctcggctcactgcaacctccactcccaggttcaagtgattctcctgcctcaacctcctgagtagctgggactacaggcgggcatcatcatgtccagctaatttttgcatttttggtagagacggggttcactgtgttacccaggctggtctcaactcctgacctcaagtgatctacccgcctcggcctcccaaagtgttgggattacagacatgagccactgctcctggcctcatttataaaattaaaatgtttccgaagtattcatacagttagtattattttcatgtaaaaatgagagagctctctatcatacacatgtattctgttctagcactctttcagtaacgtaggtgtaattatttccattacaaaagaaacagaaaacaggctgggtgcagtggctcatgcctgtagtaatcccagcacttcaggagtctgagacgggcagatcacttgagatcaggagtttgagaccagcctagccaacatggtgaaacctgccgtctctactaaaaatacaaaaattatccagatgtggtgttgggcacctataatcccagctactcgggaggctgacgaaggagaattgcttgaacctgggaggcggaggttgcagtgagctgagatcacgccactgcactccagcctgggcaacagagcaagactccatctcaaaaaaagaaaaaaaaagaaacagaaagcaaaaatgtcgacgcctagagagtcttaagtagctgacatcctttagctaatatatggcagagaggtttggatttcatgtagccttgtttcctagtgtagtggcctttcttggactgcttgttttagtataattgtttttcacccatcttccaaatttttagggacccctcattcagagctcttggaagaagtcgaatgtactccgtcacctcgattagctctcactttgaaagtaacaggtcttggaacgactcgtgaagttgaattaccactcaccaatttcagatcaaccatcttttactatgtacaaaaattgcttcaattgtcctgtaatggcaatgtgaaatcagataaacttaggcgtatttgggagcccacatacacgtaagaaattttaacttaatgttttggtagataatgtcctagtgtagagccaagaagcattgcatttattttggattataggaacagaaaagattttgtttttattctgttggcttacaggaacagataatagtgtttgggactcttggtgtagaatgattaagttttagaagtagaaggacatttacagtctatactagcttcttacgtaattgttgaaaagagcgtcatttgaattctttgtctaagatcgtgtatgagtactaactatcttctttctgttcttgattttgggggtgtgtgggttaacacctgcctttctttgtacaaataatcatcaatgacttagggtaaatttatttaacatttttgtgcctcacattcctaatctataaaatgagagtggttttaaggaattaatgaattaacatgtataaagtgttttctttacttttctttttttctgagacaaggtctctctctgttgcccaggatggagtgcagtggagtgcagtggtgcgatcatggctcactgcagcctcaaactccacaggctcaggtgattttcccacctcagtcccctgagtagctgggactacaggtgtgcaccacgaggcctagctaatttttgtattttttgtagggatggggtttttaccatgttgcccatgctggtgtcgaacttctgagctcaagtgatccgtccacctcagcctcccaaagtgctgggattacaggtgttgagcctctgtgcttggcctgcaaagtgttttcaataccccctaggatatattaagtgctcagtaaatgttatctataaagtaattgttatttaataataataaattatatcatcattcttactgtaacttcacttctattagtatgttttctgatgttctcttaacatcactgataatcttatgtaatggccaataaaagtaatgtaggtccttttgaaatagaacagaaaatcataacggtattctcccgcccttcagttttttttccccaagttcccaagagctaggaaaacctcccttcaatttttattacagtttaaaaattgatctcaactgccttatttgaacataagcactcctgatcattgttatttctatccttctttccatctagacacagagaacctgtttcttatcccattgtatttttacaacagttacagccatgtgctacgtaacaacttttcagtcagtgatggaccatgtatgacaggggtcccataagattataaaaccacatttttactgtaccttttttatgtttagatacacaaataccattgtgttacagttgcctattcagtacagtgatatgctgttaaggttcgtggcctaggaaaaataggctataacacatagcctacgtagatagtaggctataccattttgttttgtgtaatgtactcagtgatgtttcacaaccaccagatcacctaatgctgcataacacttgatacagtcatatctttaaaagttctagatttgatacatgctttctttgtaataatgataaatttataaatcataattcaggaatatggtttctgctactttgccttatgtttaacaaattaacattttttcttaaaaatactccttgaggctgggtgtcgtgacacaccttaatcccagcactttgggaggccaaggcaggagcatcgcttgaaaccaggagtttgaaactagcctggacaacatagcaaaaccttatctctacaaaaaatatagaaaaaaagaatcctccttgagttcagtgttcagtgcaggcatatgtctagtgaatgacattcacttttttttttaaagaattgaagccttattggaaataatcacaaattatatatgaattaacttgaatatcttcatgtttagaatcatgtacagagaaatgaaggattctgataaagaaaaggaaaatggaaaaatggtaagttattttagaacattggtttactcttggctatttagttaaaagaagaaagatagtaaaactaacacagtattgcagttgaacgttgaagggaataatgactaacatggaattctttagattagaccaagtgcatgatcttaaagctacctcatgtaatgcatgtgaaatatcatagactttataattgggaaaggccaacatttggtttttcctgttgtagggttgctggtctatagagcatgtggagcagtaccttggcactgatgaattaccaaagaatgacttgataacctacctgcagaagaatgcagacgctgctttcctgcgccactggaaattaactggcactaataaaagtattaggaaaaacagaaattgttctcagctcatagctgcatataaggtatatattggcatcaaaacactattttgattgcaaatggcttcgtgctttgttttgcagctttggaagcttcttaaggaacagcagttcattgagacataattttaaaaatgaggttgaattaacactgttaatgcacaaattctaaaatttcaaatatggctggtagcattggatctgaatgcagactttgaccatggcttagagtggttatattttatttgggaattttaatggtttagaatgccttgatttatgtcttgtgttatgtttttatttaaaaagaaggcactttaaaaaattccaaccctttcatagtggtattgatacaatgatacactgtttttcttgaaaatgtgattaatggccagtttttctaattgtttctataggatttttgtgagcatggaacaaagtctgggttaaaccagggggccatttctactcttcaaagtagtgatattcttaatttaacaaaagaacaacctcaggccaaagcaggcaatggacagaactcttgtggagtagaagatgtccttcagcttctgcgtattctatatatagttgcaagtgacccttattcaagaatatcccaggaaggtctgtaagaagccttgtttcatttctatagcagttttaaagcaagtcagtttatatttttattaattttattaattaattttatagatggtgatgaacagcctcagtttacttttccaccagatgaattc

SEQ ID NO: 2726 - DNA, 20467 bp, Homo sapiens; identical to SEQ ID NO: 2725

SEQ ID NO: 2727 - DNA, 1974 bp, Homo sapiens
attttgaccgatcttcatttgtttttgttcgaaaattaagagaaggacaaaattttatatttcggcaccagcatgattttgatgaaaatggaatcatttactggattggaacaaatgcaaagtaagtcagtcattttactttaagctggagtgaccatattcacttggtaaaagaattctaggaagtagaataaaattgttagcactctgaatattctgtggtttaaggaattttgacttgtaggtagaagttaagattatccaaattactttttatgaggaaaaaatgtctaaattgctaattctagaattgtacttaatataattctgtatttaaaaccttgtgcaaatgcaattatcttaacgttgttatttgctaatttttctttatttttgtatagaactgcttatgaatgggtaaatccagctgcctatggacttgtagtagtaacgtcatcagaaggaagaaatctaccttatggccgcttagaagacatactaagtcgtgataattcagctttaaattgtcatagcaatgatgataagaatgcctggtttgccatagatctgggtctctgggtgataccatcagcatatacacttcgtcatgctcgtggttatggaaggtctgcactgagaaattgggttttccaggtatccaaagatggacagaactggacttctttgtatacccatgttgatgactgcagtctcaatgaaccagggttagttgaggagtctttgcaaattggaaaactcactaaagagctttgtttatttttataattttatactctagagctctcttccttgtgaaatattgaagcaaaattttctttctaaaaacaaatcacttgatactttaggcattaaaactttgaaacactgactttactaaaactttgtcaaaaggtttagtttaaataatagaaagccgagctattttacactgtatcttagccaaaaggctgagatgctgtgaatatttattttaaaaattggtatatagctgtatatacatacgcgcgcacacacacacacacacacacacacacacacacacacacacacacacacatttatgcatacacacacagcccactaatggaaacaagtgaaataaactttccataaactctccatataatcacataatacttaggaatgtacaacatattagcagtggctattgctcgttatagaattaaggctgacttaaaatgtttttatttttatccttaaattttatgtattgaataagtttttaaaagacaagtcagtcacttctaaaaaattagttctactaaattttatttatgcattttggcacatatcagggggtagattatgtacccaaattgcttttggcatttgatatggtatgagaggagcttcttaacattaggattaataggtgatgttttcacccctttcatgctttaaagacaaaatattaatacgttatttaaaagtttgcaaaaatgtttttaagtccgtttttccatcataagagaatttctcctactctttgtaaaccatcctttttttttttttaaggagaatggggtcttgttatgttggctgctttctaacttctgggctcaagtgattcccctcacctcagccacccaaacaccactgcacccagcattttgtcttttatctttgaattatattaatcataaatcattaatgttatgagtcaaatcaatagcgtacatttaaatgtttcgtttttaacttgttctcttgactactttttttcctttgatttcttgattcttgtaatgaactgttgagttaatatgaaagttagtttattttttctacaggtctctgttatataaaaaatctttcccatcttgaatttctttttcatcttttaaaatattacataattttttctctaacatattaacaggtcaactgcaacttggcctcttgatccaccaaaggatgagaaacaagggtgga

SEQ ID NO: 2728 - DNA, 1974 bp, Homo sapiens; identical to SEQ ID NO: 2727

SEQ ID NO: 2729 - DNA, 483 bp, Homo sapiens
gagtaattgagtctggaattcagaagactggcctgggatagagatacacatttggggggagttggcatgtagagagatttaaagcaataggaatgagtgagagagggagagagaagaaagagggcctagcactgtgatttcatttttctattgactctgttttttgaatttaattttagacattagaatagataaggttagctttccaaaatcagtctcatttgtattcggcattcagataaactcatatatttgcatatattattgttattattttttgatacagggtctcgctgtgttacccagactgcagtgcagttgcaccatcacagcttactgcagcctcaacttcctgggctcaagtgatcctttggcctcagcctccaagtagctgggactacaggcatgcgccaccatacctggctaatttttaaatttttgtagagacaaggtctcactatgttgcccaggctgatctcaaac

SEQ ID NO: 2730 - DNA, 1060 bp, Homo sapiens
gaaaccccagacacatctgaacatctgaaggaacaaactccggacacactatctttttttttttttttttttttgaaatggagtctcgctctgtcacccaggctggagtgcggtggcgcgatctaggctcacggcaagctccgcctcccgggttcacaccattctcctgcttcagccttcccagtagctgggactacaggcgcccgccaccacgcacggctaattttttgtatttttagtagagacagggtttcaccgtgttagccaggatagtctcaatctcctgactttgtgatccaccctcctcggcctcccaaagtgctagaattacaggcgtgagctactgcgcctggtcaggacacaccatctttaagaagtgtaacactcaccgggagggtccgcgcttcatttttgaagtcagtgagaccaagaacccacgggaaggaataaattccggacacagaaccgtgactgggaccatgtgaagtggggacttcacatgatcccaataggagatcgcaccactgcactccagcctgtgtgtcagagtgagactctgtctcaaaaaaaaaaaaaaaaaaaaaaaaaaagaaagagattagatgccccttgccatgcagaaagttagggaaatagtgttctagttacaggaagcttttaggcagtgctgagcttgatgagttcaaagaatcaaaagaagtccagtgtgtggctggaacacactgaaggaggggaggggtgacaatgagattgtcaagttgagcacagaccagccttgtaaatcatgttaaagaatttaactttaagtgtttttgtaaataattgaaatattttaagctgggtaatgacatggtctgttttatgctttaaaaaagatggttcttttttgatttcagattggaaaggactaaaagagaagcaggacacgacttaagagggaagatattcgggctgggcgtggtggctcacgcctgtaattccagcactttgggaggctgaggcaggcggatcactcgaggtcaggagttcgagaccagcctggccatcgtggcgaaacacc

SEQ ID NO: 2731 - DNA, 323 bp, Homo sapiens
tatatggcataagaaaatagttgaactgggcacagtgtttcatgcctgtaattccagcactttgggaggccaaggtgggcagattgcttgagctcaggagttctttcagaccagccagggcaacgtggcaagaccttatctctaccaaaaatacaaatagctggtcatggtatgtgcctgtggtcccagctgaggccggcaggattgcctgagccctggaggtcaaggctacagtgagccaaaactgtgccactgcactccagcctgggcaacagagtgagatcctgtctcaaaaaaataaataaataaaataaaataaaaaa

SEQ ID NO: 2732 - DNA, 289 bp, Homo sapiens
ccaaatagtgaaatatttttcaaaagatgggctgttaagaatataacagatacccagtacacaacccagatctatttcagtatttgttttttgttgttgttgttttggagacagagtctcgctctatcccccaggctggatggagtgcagcggcacaatctcggctcactgcaacctccacctcccatgttcaagtgattctcatgcctcagcctcctgagtagctgggattacaggcacctgccaccacatctggctaatttttctatttttagtagcgatggggttt

SEQ ID NO: 2733 - DNA, 312 bp, Homo sapiens
ttgtatttctgttaaccattttttttaaagcttaaatgtatcataagccagcaaaaaccctttgtagaccagatttacttaccagtttgcaatttgtgatatagaatcttgttttattataagagggtggtatttaacaaattcaaaattagtcatcactttttaactgtgaaacattgtaactaattctttgaacaggtatacttaaagtatggtatacccttctgttataaagatgaagcaggtctcttatgactgttcctgccaacgagttatggaggtaaatgactgtgacctggagtggagaacaaa

SEQ ID NO: 2734 - DNA, 265 bp, Homo sapiens
caagtagcttgaattacagttgtatgccaccatgcctagccattttttaatttaaaaattttttggtagcaatggggtctgaatatgtggcctaggctgatctcaaactcctgggctcaagcatccctcctgcctcagcctcccaaagtgcttgggattacgggtatgaggcaccatgcccagcctgaacttgatttttttgttgtttccttttcataacaaacatcaaatgccttcagtgtactagttcttctaggttctggaa

SEQ ID NO: 2735 - DNA, 349 bp, Homo sapiens
ggaaaacattttacacaggtcacccgtaagtctggccatattaaatgaaaagaagaactcaaaatgcatgtggtttggccctgaggagcatcttttgatttggtggcttgtgaaaagtcagctttatggccaggcccgttggttgatgcccgaaatcccagcactttgggaggccaaggtgggcggatcccctgaggtcaggagttcaagactagcctggccaacatggtgaaactctgttttttactaaaaatacaaaaattagtcgggcatggtggcgggagcctgtaatcccagctcctcaggaggttgaggcaggagaatcgcttgaacccgggaggcggaggtt

SEQ ID NO: 2736 - DNA, 425 bp, Homo sapiens
ggaaaacattttacacaggtcaaccgtaagtctggccatattaaatgaaaagaagaactcaaaatgcatgtggtttggccctgaggagcatcttctgatctggtggcttgtgaaaagtcagctttatggccaggcacgttggctgatgcccgaaatcccagcactttgggaggccaaggtgggcggatcacctgaggtcaggagttcaagactagcctggccaacatggtgaaactctgtctctactaaaaatacaaaaattagtcgggcatggtggcgggagcctgtaatcccagctcctcaggaggctgaggcaggagaatcgcttgaacccgggaggcggaggttgcagtgagcagagatcacaccactgcactccagcctgggcgacagagtgagactctgtctcacaaaaaaaaaaaaaa

SEQ ID NO: 2737 - DNA, 610 bp, Homo sapiens
  SITE (319): n equals a,t,g, or c
ccttttatttggagatgcttttatactttatgaccacttgaagtctctccaattgttacatactgagagtgtaaaacattgagataaaaacttatacaaatagtcacaaaatggagaattgaatattggctcctgagttactctctcctattacccaaaagcccatgatacacagcctgttgtaaatatagtttcttttcaccttgaaaacattgccataaaactgaaaacactttctaaagttgtaaatttctattagcatattactgatgatttttaaaggagactttccattaaaaagaaatgataattttcttanttgcaagattaaacatggaaggtaaaagccctatgaaaatgataatactcataaaataagagtacctctggtcattagaaaactggaaagagaaggatacagaattactagattaataggttgtggtcatctctgaaaatttggcttaggagaaaatttagtgagtgtttctataagtcaggttatattcaaccatatttgtggttactccctaaagcaagggcttaaataaaatcctggtttgactaaagaatgcgctcagctgggcgcagggttcacgcccttatccca

SEQ ID NO: 2738 - DNA, 617 bp, Homo sapiens
ccttttatttggagatgcttttatactttatgaccacttgaagtctctccaattgttacatactgagagtgtaaaacattgagataataacttatacaaatagtcacaaaatggagaattgaatattggctcctgagttactctctcctattacccaaaagcccatgatacacagcctgttgtaaatatagtttcttttcaccttgaaaacattgccataaaactgaaaacactttctaaagttgtaaatttctattagcatattactgatgatttttaaaggagactttccattaaaaagaaatgataattttcttaattgcaagattaaacatggaaggtaaaagccatatgaaaatgataatactcataaaataagagtacctctggtcattagaaaactggaaagaaaaagattacagaattactagattaataggttgtggtcatctctgaaaattatgcttagtagaagatattagtgagtatttctataagtcagttaatattcaccaatattttggtaactccataaagcaaggcttagaataaaatcctgatatgactaaagaaatgcgctcagctgggcgcagtggttcacgccttaatcccaacac

SEQ ID NO: 2739 - DNA, 434 bp, Homo sapiens
ggaaaaggcaacttctgcaaagtgtcctcttgaaaagttcttcataagacacaaatgaggacacaccttcttttaaaaatcttaggagcatctgcaagtatatagtcaagaatgtcaatttaaagagtaggagattgtcttgaaaataaggtactgaaacactttctgtgacagagactgccattttcttacctattatccatttttttactatctttctttcttaatgccactgttactgggaataacagtgtccctagttaaaacctacattgctcaaccttctttgcagatggggtggcactgaggtacagttctggctagtgagatgtaagaagtttttccatagagcttctaggatatcgccttaagaggatagagggccagggagagggagtgtatatagcaggcaccactgttactcctctttttgt

SEQ ID NO: 2740 - DNA, 216 bp, Homo sapiens
ggaaaaggcaacttctgcaaagtgtcctcttgaaaagttcttcataagacacaaatgaggacacaccttcttttaaaaatcttaggagcatctgcaagtatatagtcaagaatgtcaatttaaagagtaggagattgtcttgaaaataaggtactgaaacactttctgtgacagagactgccattttcttacctattatccatttttttactatct

SEQ ID NO: 2741 - DNA, 571 bp, Homo sapiens
tgctttgtaggaaatgcgagctgggccgtgaggcgtgtagtcacactttccagcacagccgaggtagaggacctgactcctcttgaggctgaaagataccctctgccttggttgcacttccctcaccccattctgattttctccattcatgagagaatttccacatagtcagtggtctccttgccttcattcccaccttagtctaatataggagttggtaaatgatggtcctcaggacagatccatacctcctggctttgtaaatacatgtgcattagaacacagccgggttctttcttaaatgaaatacttaaatgtattgtcttatggctgctttcacactacagcagcagagttgagaagttgtaacaaagactgtgtggtccacaaggccacaaatatttaccctttggcctgctgaccccttaatccatccaactggctgcctgtgagtgatctcttaaacctcagatcgaaccacaccactcttctgcttacaaaaaaaaaaaaaaaaaaaatctcttgggaggccaaggcagatggattatttgaggttaggagttcaagacaa

SEQ ID NO: 2742 - DNA, 335 bp, Homo sapiens
catcattcataatagcaagatagtagaaacaagataagtaccctggctggacctggtgactcacgcctgtaatcccagcactttgggaggctgaggcgggcagatcacttgaagtcaggagttcgagaccagcctggccaatatggtgaaaccccgtctctactaaaaacacaaaatttagccaggcatggtggcacgcgcctgtagtgccagctactcgggaggctgaggcacgagaattgcttgaacccagagggcggaggttgcagtgagctgagatcatgccactgcactccagcctgggtgacatagtgagactctgtcccaaagaaaaa

SEQ ID NO: 2743 - DNA, 383 bp, Homo sapiens
gtggctgtgctctgctcagataattcataaagggcgtgcctgttgctgcctgaggccgcagcttgagatgctgacatccagaccacctagagcagggagggacctgggtcctaagcctagagagaactgcaggggagaagggtggaccagctgcccgcctcagggctgcggagagcaggtctgggcagagaggagggaactgggagtgaagggggtacatgtacccacttgtctgcgagcctggcctggccctccagccctctggggagagacacctgggactagggggagacaggagctacacaaaagaggaccctagaaatgatgcatagttttcactatcttgaagactctgttatttaacacatgcctcccctgccccc

SEQ ID NO: 2744 - DNA, 794 bp, Homo sapiens
caggcctggagtggggtaagggtataactggaaaaaggaacatgagacaatggaaagagcttgtacattcagaatcgggactcctgggttcagcatgtgacttcctcacttgacctctagagtgatccttttggaaaatgcccactctctgtaggcatcagtgcagtaataagttggtagcaggatgtgggttgggggaaaaaatcagatttggtttatttgtttacaaaacattttgggttcctcaggcaaaaggtatttattagtagtggtttagtcatcctgagaattttccttcaccttggtctttctgtcagatgtttctagtccacaaccaggggtgtaagtcattttgaaagacaagctccaggcctgcttccttcatctgctttgctttttcccccagtgcattaagtggctgattttctgtcctgttcctcacgtacttgatccataactccagattctataggtagaaagtatgtttgtgggaaagcactttgaggaagctggctggaaaagagaacttggagtgaactgagacttaggcaactagttgctgccatgtctctctcagcctgtgatagcgaaagggcacgtgagattccattcattttctgattctaggtctgtttgggagtagttatgtcatcttatcccacttcctttctcttccttgtcgttagtcatggtgcagtctcctcataattccccttattagaagctttcctgccaggcgcggtggctcacacctgtaatcccagcattttgggaggccgaggcaggcagatcac

SEQ ID NO: 2745 - DNA, 794 bp, Homo sapiens; identical to SEQ ID NO: 2744

SEQ ID NO: 2746 - DNA, 465 bp, Homo sapiens
ctccttaagggatctcgggcccttgtcatcaatccaaaagtaccatttacattcttactttgaacctagtcctcactcttctctgggatgcattatgatccctataactttctttagcttctctttctccctcctcaatcccccaactttttagaggtttctgtctgtaggggagagatttgacagtgcccttcccattcaggatttccaactttgacacctccctcgagtttcagggatttctctgatccttgtgacatttgttctgtttttcccgtgggcttcatgtgttctctgttacactctttatctccacataccacttatttcaggatcaactaaaccttgaactaagaagaaaaatgtgttgtgagcagggggagcctcagctgcctcaggccgttcaggacagaagggtgtttctgaaggccggagcaagttttgaagaagtccctatcagattac

SEQ ID NO: 2747 - DNA, 465 bp, Homo sapiens
ctccttaagggatctcgggcccttgtcatcaatccaaaagtaccatttacattcttactttgaacctagtcctcactcttctctgggatgcattatgatccctataactttctttagcttctctttctccctcctcaatcccccaactttctagaggtttctgtctgtaggggagagatttgacagtgcccttcccattcaggatttccaactttgacacctccctcgagtttcagggatttctctgatccttgtgacatttgttctgtttttcccgtgggcttcatgtgttctctgttacactctttatctccacataccacttatttcaggatcaactaaaccttgaactaagaagaaaaatgtgttgtgagcagggggagcctcagctgcctcaggccgttcaggacagaagggtgtttctgaaggccggagcaagttttgaagaagtccctatcagattac

SEQ ID NO: 2748 - DNA, 2461 bp, Homo sapiens
ctactctcatttgtgtttttatgggcgattccttccttctggcagaaaaatgaatcaaatcagccttgttcactatcaacccagaataaatcattgtgggcccaggtatcttatgatttttcttttatttttattacttgtaaacatggccatatatcaaaattttagattatgttaccctgtaaggctgatctatcagactgatgcagtaaccagttaattaaataaaaaacaaatccttttacatgccatctaacattaaagagagaagggggatatcctcttcatgcaattagtaggttctatcctttcttagaatgatcatgatgcactaaagattgcaaataggctctttcttgtccacagtaaacagttaagggatgagtacaatggtgtaatttcctctattttactatacttaggctctctggagtaggtttgctgattattagtcattgtgggttgtcaaaaattggcgtttgatttcaagactggttagttgggttgattagagcatagtactaatcagggtagtgtaacaggttttatccccacgtgggctaattaattttatcctattctaccgttgcagatggcatccattacccatcttgttaatgcatgctgttagtcataatgagtgaccaagtggttggatgtggtttacactaacacctagtagtggaaaaacaaagtattcattctacttcaagaacaatgacctccctccttctcatcactttttctttcctctttcccttcctcttccgtatccaccttgatgataggaactagggccaaaaagtgtaacagttattctctaccttcaagggactcactgtgagcaagagatgaagtaataaagctaagcttatacaaggtgataatagaggtgagtgtaaggtctatggaatcacagaaaagggagtaacttattctgcctgagctagagaacaatatctatacccttgcatatttatagggaaatccccacatttttcagttgctttaagtatgaaggagaatgataggacagggaaggttattccttatttccttagacgattgaattccttgctgtgtgacttcggaataccttgtacttctatcactctagtggtaagcacttgcgtcgtaattgcctatttacttttatagggcaaggagccatttcttttttgcttattagtacatcttcagcacttagtatagcactggcacaattaatatatgatgaatgaatgagcaagccttcatattttgtgtatatgagtaatatatatttctattttctggggaaaatgctgtttacgatgcagattataaaacactgatgttaacgagggattaggtatttttaccttattttgcagaaatacaggttaccatacacctattatattaagtgattgggtcaagctcagtattgagatcaactacaagtcacaggctggacatttccaagatggcattcaagtgttcactgtctaagactagtactatggtttaaagagtggtttcaggaccagcagcagcagcattactggggaacctgaatcagaagctcagggatgggacctagaaatctgtggtttaattagcgctccagtgattctgatgcacactcaagtgtaagaactactgaactagcggttttgaaaattgtattttagcaccagaaacctttcttcacatgatccaagatagaagttacgttatttatataaacttataaaagagagaggtgttgtgtgcatgcatgatgttaaacagaacttgaaaatcaattgagaacctttgtttctgctcctataatcccatcatgttatttaaaaattatatgaaaatgttatacaccttatcaattcaacataactttttttcccccagaaatataataggcttttgtagttcattcacagttttatctatctctgttttattatttgtattttcattcattctcatatttctggtacatggatttcacctggatgtagaaaacacatttgcaattttgttctttttacagatttgttgggcgaatcaatatctacagtaatagtcttgaggctgttgccaggtaagtttgctgtttctttaatttgtcctttggttgggggggggggtctatttttctgttaaatcaactaaaatagccaaatacctttctattatagaaaggaatataggccgggtgcggtagctcacgcctgtaatcccagcactttgggaggctgaggtgggtggatcacctgaggtcaggagtttgaagccagcctggccaacggggtgaaacccaatctctattaaaaatacaaatttagctgggcgtggtggcacacatctgtaatcccaactactcaggaggctgaggcaggagaatctcttgaacccgggaggcgaaggtcgcagtgagccaagattgagccattgcactgtaccctgggcaacaagagca

SEQ ID NO: 2749 - DNA, 417 bp, Homo sapiens
caggtggtttcgtatataatcacaatcagctgtctgttatctaggggcaggttgtcctctctgaggttcacctctggaaaaatttcaatcctgatcagacctttctctcatcccagcaaaacatagttgggaaaataaaccttcttgtaaccctcgtggcatccatcccggggtactggccagtgggtaggagtgtttaagtcctgagtcggggattcttggttccactctggctctggacgagtcacaggctcccctgtggctctggtccagaagttaagaggagggccatggactagcctcagaggctgttttgagcataggatgaccctgtgggaactggtggcccagtgcccggcccacagggacttctcagtgaggcgagtcgctgttgtggcctgagagtttgttcccccg

SEQ ID NO: 2750 - DNA, 293 bp, Homo sapiens
ggcgtggtggctcacgcctgtaatcccagcactttgggaggcggaggtgggcagatcatgaggtcaggagattgagaccatcctggctaacatggtgaaaccccatctctactaaaaatacaaaaaaaaattagctgggcatggtgtcgggcacctgtagtcccagctactcgggaggctgaggcaggagaatagtgtgaacctgggaggcggagcttgcagtgagccaggatggcaccactgcactccagcctgggcaacagagctagactccgtctcaaaaaaaaaaaaaa

SEQ ID NO: 2751 - DNA, 429 bp, Homo sapiens
gctaattatatttgttatccccgttgctattaccaaatctatatctatattcaataaaaagagcttaatgaaaacctgtgcacccaggattctgttatacatgattcagaacaaagtatctggcatgactttcatggagataccaacgtaaatatcaagagaaaacataaatacttaagtcaacaagtgattattgctttatttcatatttgccatgtgccagacactgagcaatgtatgggagaaacaaagttgattaagagacaattcctagtctctagatgctgctagtctgagaaccacacttggatgaccacggcatgtggcaatgcttctcgaagtgtgatctggaaaccactgggggtccctgagactctttcagtgggtccccaagggcaaaactgttttcataacgctaagatattattt

SEQ ID NO: 2752 - DNA, 430 bp, Homo sapiens
gctaattatatttgttatccccgttgctatttaccaaatctatatctatattcaataaaaagagcttaatgaaaacctgtgcacccaggattctgttatacatgattcagaacaaagtatctggcatgactttcatggagataccaacgtaaatatcaagagaaaacataaatacttaagtcaacaagtgattattgctttatttcatatttgccatgtgccagacactgagcaatgtatgggagaaacaaagttgattaagagacaattcctagtctctagatgctgctagtctgagaaccacacttggatgaccacggcatgtggcaatgcttctcgaagtgtgatctggaaaccactgggggtccctgagactctttcagtgggtccccaagggcaaaactgttttcataacgctaagatattattt

SEQ ID NO: 2753 - DNA, 305 bp, Homo sapiens
gtctgttactaagcacaaggaatttgagcaaaggagggagaaaaataaataactatttttaaagggaaccattgtattcaatggactcctcctttttgagggtctgtcgtgggcaaaagattgtggtgcctcctgagagtgatacagaggcaagtgagtccccgactcttcctgcaggagtgtgtaggtcagcaatattgcagtttccaggtgaggagagaggtgctcgatggaggggacgtgatggggaactcaggaaggggttcctggaggtgcacttcagccgcgccttcagcaatctgcag

SEQ ID NO: 2754 - DNA, 305 bp, Homo sapiens; identical to SEQ ID NO: 2753

SEQ ID NO: 2755 - DNA, 304 bp, Homo sapiens
gtctgttactaagcacaaggaatttgagcaaaggagggagaaaaataaataactatttttaaagggaaccattgtattcaatggactcctcctttttgagggtctgtcgtgggcaaaagattgtggtgcctcctgagagtgatacagaggcagtgagtccccgactcttcctgcaggagtgtgtaggtcagcaatattgcagtttccaggtgaggagagaggtgctcgatggaggggacgtgatggggaactcaggaaggggttcctggaggtgcacttcagccgcgccttcagcaatctgcag

SEQ ID NO: 2756 - DNA, 213 bp, Homo sapiens
ggacttcagcttaacacagggagtgagggagagggcaagagcacgggcaagagggagggtttagttttgagcagatagatccagctcctagtttgccttagaccctggaacactggcttctttcattcggccctttagaggagtggcccagagtagcctagcagggactgaactctttcggatggcttccagagcattgttcccaagaccctc

SEQ ID NO: 2757 - DNA, 213 bp, Homo sapiens; identical to SEQ ID NO: 2756

SEQ ID NO: 2758 - DNA, 213 bp, Homo sapiens
ggacttcagcttaacacagggagtgagggagagggcaagagcatgggcaagagggagggtttagttttgagcagatagatccagctcctagtttgccttagaccctggaacactggcttctttcattcggccctttagaggagtggcccagagtagcctagcagggactgaactctttcggatggcttccagagcattgttcccaagaccctc

SEQ ID NO: 2759 - DNA, 349 bp, Homo sapiens
gacagacagggtgcttgtgcctcaagccaacagctcagtcaccatagagaacgaggccctgccctgactctggagcttctctaacactgtgcgtgtctgtgctcccattcttgtctctaccagccgctccagagcatctgtggcttgcatactgttactgtaggagggttgcttgtgccccaggcaccagtgccattaattcccagatctcatagcaacagactctccacatgttctcatgtttcaggcctcagctccatgactgttccacaggtaccactcaaatactggtactgtcactactgcaagacagcccataaaccagacccagtgccaagacatacccttt

SEQ ID NO: 2760 - DNA, 522 bp, Homo sapiens
agttgaacagtgagaacacatggacatggggggatgtgggggaggtgggcatcacgcagcggggcctcttgaggagggctagcattaggagaagtacctaatgtagatggcagattgatgggtgcagcaaaccaccatggcacgtgtatacctatgtaacaaaccggcacgttctgcacatgtaccccagagcttaaagtataataaagaaagagacaagagttaagtgtctgtagcatacagtacattatttcacttaagtcagtttccaagaacctattgagaacattgaggacatattgtagttctacatgctgcacaaactttacatattcttatgtattcaggaattacaactaggcaactgaattcatcctgaacactctttattcccaacagcatattcaagcaaagacacagagcaaaataaaggctgctcacataacacttaactaaatggaaacatgaatgaaaagccactgaaatatcggtctagcatgtcttcaccaagagggcatacta

SEQ ID NO: 2761 - DNA, 12104 bp, Homo sapiens
taaaaatacaaaaaattagccgggcgtggtggcgggcgcctgcagtcccagctactcaggaggctgaggcaggagaatggcgtgaacctgggaggcagagtttgcagtgagccgagatggcgccactgcactccagcctgggggacagagcgagactccatctcaaaaaaaaaaaagaaaattaaaaattaagttctttagttgcactagccatatttcaaatacttgatggatacatgtggctagtggctaacataagggatagcacagatataaaacatttcctcgtcatataaagttctattggatagtgctggtctgtagcttataggatggtatcttagtctgcttcagctgctaaaacagaataccataaattaggtagcttaaacagtagatattttgaccaggcgtggtggcttatgcctgtattcctaacactttgggaggccgaggcaggtggataacttgagctcaggagtttgagactagcctgggcagcatggcaaaaccttgtctctacgaaaatcagctgggcatggtggtgcacgcctgtagtctgagctacttgggaggctgaggtgggagaattgcttgaacctgggaggcggaggttgcagtgagccatgatcgcaccactgtactccagcctggatgacagaatgagactctgtctcaaaaaaaacaaaaacaaacaaacaaaaaaacagatatttctcacagttctggagactggaagtgcaagatcaaagtgttggcaaattgtgtttcttaaagagggcctgcttcctagattggaaatggccatcttctctcggtatcctcacatggtagggagaaaagcagctctagtgtctcttcttataaaggaagtaatgccaccataggggctctattctcatgacctcatctaaacctaattctctcctaaaggccacgcctcccagtatcctcaccttgggggttagggctttatcatatgaattttttttttttttttttttgagacagagtctcgctctgtctgtcacccaggctggagtgcagtggcacaatctcggctctctacaagctccgcctcctgggttcacgccgttctcctgcgtcagcctcctcagtagctgggactaaggcgcccgccactgcgcccggctaattttttgtattttcagtagagacggggttttaccatgttagccaggatgatctcgatctcctgacctcatgatccacccgcctcggcctcccaaagtgctgggattacaggcatgagccaccgcgcccggcctatcatatgaattttgagggaacacaaacatgcagtctgtagcagatggtaataggctgacatattacacttgttgatgtaaatctgataggtttctttctctccaaggacagctttttaaatatttaacagtatcaataatttttcaggttctgtgagaattttataatttataatttgcagacttaacgtataatctattttgtcctaacaattacaaatatattttttatttcagattgtatatattcctaccagatggagataattacagctttaaaaatttttattttttcattttatttcacacattgacattaaatttttatggacacataataactgtacatatatatggggtagaatgtgatgttttaatacatgtactcaatgtgtaatgatcaaatcagggtaatttgcataatgatttttctgtagggagaaaattcaaaatctactcttctggctattttcaaatatataatatgttattgttaactatactcatcctactatgcaataggacaccagaacttattcctgggttctacatccgttaaggcaaccaaggattggaaatattggaaaaaaaaattgcgtctgtactgaacatgtacagacttttttcttgtccttattccttacacaatatagtacaataactatttgcatgacatttacatcggatattatgagtgatctagagttgatatgaagtatatgggaggatgtgcaaaggtgatgtgcaaatactatgtcattttatatcagggacttgagtatcctttgttaccctcaggagatcctgaaaccagtcccccatggatactgagggctgactgtatagtcctatcctcacggaactttcattctaatgggggaagactgactataaacaaaatatatgtaataggtggtggtaagtaccgtggagaagtaacaaatggggcaaagtgagttatacagctccattcttagaaaccttggagtacttttcttagtttatactcgtggtggtttccttttgtctcctttattacatgggactctgacatgtgcccatagctagggtgacagtaggatctacccgatagtagggtggcagtaggatctacccaaaaagcgtcctgctgatacaggaccaaagcatcctgttgttctcgagcctataaaaagagctaatggtgttgcttctcttaactgtggcctcctacactgtgttttggatgattggtgatgtcttggatattctgtttctttggaactttgaatatacaacactttactagggaattagcaatggaagcagagcaaagatgtacagaggaaacaatgcgtaactctgatggaattgaagtcatgaggcagcagagagcttaaattacagctttaaaaatttttattttttagagggaatttacttgggagtaacagcagtaatagttaacggagccagaatgcttgagtcatataattgcaaagcagagttgggagcaacagatgctaaagagtagttgctgtagttcctctttgggtcgtaggagcagttgtcatattactatatagctactgcatgaagaagagttcttagtgaggcctgggtgaacagctcttcttagtattctgtgtgaccccatttgaccttttaacaaatccctaagtaaataaatagcccctcaggaaaactaagtttttctctgctgtttttttgcttgagagagctataactgtaatagacttatatttctgaacattttagtgcttgccaatatttggtaatatttatgtttcctatatttgtaatgaacattcttcttccggtacattttttgttaaattattgtttgatggataaaagttcaccttttattgtataaaattgactgagattaatttatacacattgacaatgggtaaatagaatttttcagattattaaaagctgaaggatgcccacgtaagcaaaaaaaaaaaagaaaaaaccaacaaaaataaacccaaacccctcaaacaatttcgaacacgaaacattcttctgatgccggcatccctgcttgcaggtgtgaagggggcaggaatcagcgaggtgtcctgggctgagtccccggagtgggaagaggtggcaggaaggggatctgaggaggagaacaggggtcctggtggtctgtgcttcttcccagacacgggagctgtacaggagacctctgcagcagatgctaggggggccagtaggcccaggcagtcttgggacttgggtctgtcctgctgtgcatccatagtgggtgctttagaaacgggaggcccacccgaagcccctgttgcaagtgaggacaaagtgtgggaaggccgtgagggtctgcagtccgagatggccttgtcctcaacgtgcagtgcagtgttgatgtggggcctagaggcctgggatctgggggagccacccctgggggcaagtgtctgccctggtgctgtacctgccttgttttcacagcggtgacccgaagagacagcctgaggtccgtcctcactcactgtgtttgaggaactgtgggccagctggcagtgggatgaggctggccccctcctccgctttagttcctggaggccttccgtagagctgtgggagctggagctggcatttcgtttgaggcaggatctggtccgggaggtctgggatctctggttatatctcacttctgacctctgggcacgtgctgcagctgtggctgaggccaagaaatgtgaggggcctccatccactgcattgagtagcgaccccgacgtggggttcaatgtggaggggggaagggctgctgcggcagctgcaggagccgaggtgccaggccttgttcttctcatgccggcatccctgcttgcagctgtgaaggtggcaggaatcagcgaggtgacctgggctgagtcccgggagtgggaagagttggcaggaaggggatctgaggaggagaacaggggtcctggtggtctgtgcttcttcccagacacgggagctgtagaggggacctctgcagcagatgctaggggggccactaggcccaggcagtcttgggacttgggtctgtcctgctgtgcgtccatagtgggtgctttagaaacgggaggcccacccgaagcccctgttgcaagtgaggacaaagtgtgggaaggccgtgagggtctgcagtccgagatggccttgtcctcaacgtacagtgcactgttgatgtggggcctagaggcctgggatctgggggagcctcccctgggggcgagtgtctgccctggtgctgtacctgccttgttttcacagcggtgacccgaagagacagcctgaggtccgtcctcactcactgtgtttgaggaactgtgggccagctggcagtgggatgaggctggccccctcctccgctttagttcctggaggccttccgtagagctgtgggagctggagctggagctggcatttcgtttgaggcaggatctggtccgggaggtctgggatctctggttatatctcacttctgacctctgggcacgtgctgcagctgtggctgaggccaagaaatgtgaggggcctccatccactgcattgagtagtgaccccgacgtgttgttcaatgtggaggggggaggggctgctgtggcagctgcaggagccgaccttgttcttctcatgccggcatccctgcttgcagctgtgaaggtggcaggaatcagcgaggtgacctgtgctgtgtcccgggagtggtaagaggtggcaggaaggggatctgaggaggagaacaggggtcctggtggtctgtgcttcttcccagacacgggagctgtacaggggacctctgcagcagatgctaggggggccagtaggcccagggagtcttgggacttgggtctgtcctgctgtgcatccatagtgggtgctttagaaacgggaggcccacccgaagcccctgttgcaagtgaggacaaagtgtgggaaggccgtgagggtctgcagtccgagatggccttgtcctcaacgtgcagtgcagtgttgatgtggggcctagaggcctgggatctgggggagccacccctgggggcaagtgtctgccctggtgctgtacctgccttgttttcacagcggtgacccgaagagacagcctgaggtccgtcctcactcactgtgtttgaggaactgagggccagctggcagtgggatgaggctggccccctcctccgctttacttcctggaggccttccgtagagctgtgggagctggagctggcatttcgtttgaggcaggatctggtccgggaggtctgggatctctggttatatctcacttctgacctctgggcacgtgctgcagctgtggctgaggccaagaaatgtgaggggcctccatccactgcattgagtagtgaccccgacgtggggttcaatgtggaggggggaggggctgctgcggcagctgcaggagccgaccttgttcttctcatgccggcatccctgcttgcagctgtgaagggggcaggaatcatcgaggtgacctgggctgagtcccgggagtgggaagagttggcaggaaggggatctgaggaggagaacaggggtcctggtggtctgtgcttcttcccagacacgggagctgtagcggggacctctgcagcagatgctaggggggccactaggcccaggcagtcttgggacttgggtctgtcctgctgtgcatccatagtgggtgctttagaaacgggaggcccacccgaagcccctgttgcaagtgaggacaaagtgtgggaaggccgtgagggtctgcagtccgggatggccttgtcctcaacgtgcagtgcactgttgatgcgctggaatgccgtctctttttccaggtgcaggtcttcagccgtgacccggtaccccagctctaagggaggtggcagcatcaaaggctcccctcgcctgcgtggcagcaggggaatcttgcgtctacggggcctagagtcctgggatctgggggagccacccgttggggcgattgtctgccctggtgctgtatctgcccccttttcacaccgtgtgtgacccgaagagacagcctgaggcctgtcctcactcactgtctttgagtaactgagggtcagctggcagcgggatgaggctggccccctcctctgctttagccccggcaagcctcccgtggagctgtaggagctggagatggcatttcgtttggtgctcgagctcgtccaggatgtctgggatgtgtggttatatctgatttctgagctctgggcgtggaggtctgtctgcagaggcccgggcctgggcacaaagggagaggggcctccattgtcccgcaggggccaaaatgcagaccgtgcatccccggtgacctcggggaccgttctctgatcatcaggattttcttggactctggggtccttgtcctgctcaggcatccctgccccgctctccttgagggccctcaacactatcttccctggacacaagtctggggacagccgggtgttgtggaccccaaaggggtgactacctgctcctgggccccacagagtccttgtgctcagtgtagtggctgagctgggggatgccctggaactcggagcacacagcactggcttactgtggtacctgtgcagtgaaattgaagacagaatcaccaggatggaacacaggtcttgcaggatcacggaaaaccttcttagagttgtcttgacaccactgatgtcgagtgtgcgggtgtttgtaggatggcctgccactcagtccaggggcaggagcaacggggagatcccacaagcaaagtgaactgggggatgggctgaaggggctccaggcaactgagccctactcgcaggtcctcggccttggcccaaacaggaatgaggggcacagagtgcccgggtaaccgctcctgggagcagtggggaactgtcggatacttgaactctcaagagctgggctctgagcgtcctcatccagctgccaacttggccaaaggctaagccagcagattgttctgttgccgggcaacgcgacttctaaacctgagggagtgggcatgtgagcacataatggcaccagtgacagagcgaccataatggatgaataagcacagccaggtacccgcgcaaggcacctgctggcaatggcaggaggcggacgtggggggtcgtgcagtaggtactggagggagagacgtgggcacaaaggtcgcgggaggaacaggtgcccacaatggctgcatatttgcccgtggatcactgaagattcctgctctcctgctgaggtggagactgcagtgagctgagatcgcaccattgcactccagcctgggcaacgagtgcaaaactcagtctccagataaaaaaaagaaaaagaaaaaaaagaggccgggtgtggtggcttatgcctatgatcctagcactttgggaggtcggggtggacggatcacgagatcaggagttggaggccagcctggccaacatagtgaaagcccgtctctagtaaaaatacaaaatttagtcagacatggtgggcaggagagagcatgtgcaggggaacatccatttataaaaccatcagacctcatgagacttattcactaccatgagaacagcatgggggaaactgcctccatgattcagttatctccacctggccccacccttgacacatgggaattgttacaattcaagatgagatttgggtgcggacagagccaaaccatataattcttccccggcccctcccaaatctcatgtcctcatatttcaaaagcaatcgtgccttcccctaagtcccccaaactcttatttcagcattaactcaaaattccatagtccaaagtctcatctgagacaaggcaagtcccttccacctatgagcctgtaaaatcaaaagcaagttagttattttctagatacacagggatacaggcattgggtaaatacactcgtttcaaatgggagaaattggccaaagcaaaagagctacaggccccatgcaagtccaaaacccagcaggcaaatcttaaagctccaaaatgacctcctttgactccatgtgtcacatctaggtgatgcaagaagtgggttcccagggtcttgggcagccccgcccctgtggctttgcagggtacagccccccttctggctgcattgagtgtctgcagcttttccaggcacacagtgcaagctgtcagtggatctaccattctggggtctggaggatggtggcccttttctcacagctctgcttggcagtaccccagtggggactctgtgtgggagctccaaccccatatttccctttgacactgccctagcagaggttatccatgagggcccccccctcccctcccccccacagcaaacttttgcctggatttccaggcattttcatacatcttctgaaatgtaggcggaggttcatgaacgttaattcttgactttggtgcatctgcaggcttaacaccacctagaacctgaaaggcttggaacttgcaccctctgaagccatggcctgaggtgtaccttggccccttttacctatggcaggagcagctgggatgcagggccccaagttcctaggctgcacacagcagggggttctggacccacaaaaccatttttccttctaagcctcctggcctgtgatgggagggtctgctgtgagggtctctaacatgccctggagacatttgccccattgtcttggtgattaacatttggctcctcattacttatgcaaatttctacaacccagtctcctgagaaaatagatttttcttttctgttgcatcatcaggctacaaattttctgaacttttatgctctgcttcttctcgaatgctttgctgcttagaaatttcttctgtcagataccttaaatcatctctctcaagttcaaagttccacagatctgtagggaactctagaaagaaattcttattttccctctttcccgcctatcttatgcccgtttctaatacaggtgcacaatgcctgcagtgtctttgcatagtaagagtgactttactccatttcccaacaaattcctcatctccctctgagaccacctccgcctggaccttgttgtccatatcactattaacattttggtcaaagccattcaacaagtctctaggaagttccaaactttcccacattttcctatcctcttctgagccttccaaactgttccagcctctccctgttacccatttccaaagttgcttccacattttcgggtatctttacagcagcaccccactctactggtatcaacttattgtattagtctgttctcacaccgcaaataaagacatacctgagactgggtaatttataaaggaaagaggttgaattgactcacagttctgcatggctggggaggcctcacaatcatggtggaaggcaaggaggtgcaaaagcatgtctcacatagtggcaggcaggagagagcatgtgcaggggagctcccatttataaaaccatcagatctcatgagacttagtcactaccgcgagaacagtatggggggaaccatccccatgattcagttatctgcacccggccccacccttgacacgtgggaattattacaatgcaaggtgagatttgggtggggacccatccaaactatgtcagtatgttttgacttcttgcttgattgctaggttgcatagaggacaaacatggaaattaatgaagtaccttaatatctggcttcagatcttagacaggatcagagggccagctcaaatttgcaaggaggggaggtagatcccaccattttatgggtgaatggcaaaatcaaacagaaattatgtgggatgggagatactgatgcagccatctttggaaacattctacttagctaattttatgctaggctttaggtcaagaaggagagagagagctgacatgctgtggtacacacttatagtcccagcgacttggaaagctgaggcaggaggattgcttgatcccaggagtttgaggtagtgtgcgatgatcgttcttgtgaatagccactagccactgaactccagcttgggcaacattgagacaccctgtctcttaatttaaaaaaaaaaaaaaaaaaaggaaagaaagtggtctcagtttttaatgtaagtatttttaatgggataatgatattttaagattaatgtatattgtatatcagttaactgtaggtcaataattatataaaacttaaggtatgaaaaacatttatttttgctaacatatctgtgagttgactgttcttggcttggtgaggctgcaagctgcagatagagtctaggtatgttttctgtgtgtttgttcccccttggatcagtggactacctgagaatgtgtttttgtcacagtgatagaatcacaaggaaactccagttctggaagtacattttaagccattgcttctctcatgtccactaacattcagtcagccaaagcacataccttgtccatggctaacattgatagtatagataaatatacctgatctctagcaggaggaactgcattgtcttggggaaaggttttagatatagggaggggtgatgagttgggaacaataatgtagtctgccacaaacatattaaagtgtaactggatatggttgctgcagaattttgaacctttgttttaattgtgatttttactcttttccccctatctagtgcccttttgtaatacagtaattatcatgatttttgtctgaactgaaatcttctgagattagattgtctacgaaaatacagtcgatcctccttgttttcagcttttgtatttgtgaactcacctactattttttgtaacccccaaatcagtactcacagcactttcatagtcatgtgtttgcgcagagtgtcaaagaatttgagtttgaacaggatgatattctgccttctttttcagctctcatacaatagtcaggtatcctttttgtggtctatttaatgccatgcttttcctgtttttgtgctgtttgttggttgttttgccatttaaattaacccccaagcatagtgctgaagtgctgcttagcattcacaagtccaagaagtctgtgatgtgtcttacagagaaaatacatgcattaaataaactccattcaggcgtgagtgctgtagtgccgttggctgtgagttcaatgttaatgaatgaacaatgtatattatttatttattcttcatttaattaattattattattattttttttgagatagagtctcactctgttgctcaggctggagtgcagtggtgcagtcttggctcactgcaacctctgcctcctgggttcaagcgattcccctgccttagcctcccaagtagctaagactacaggcatgcgccaccatgcctggctaatttttttttttttttttttttttgtagttttagtagagacggggtttcaccacgttggccaggctggtctcgaactccagacctcaaatgatctgcccgccttggcttcgcaaagtgctgggattacaggcgttagccactgtgcctggccaacaatatatattaaataagcacacatacaacaaaagtaggtgttggtaagcttacaaaagtgtgaccagtagcttgctgaaacctaactttttatttgttcatggaactttctagaccgtaactacactgaataatgagaatctgctgtaatctttttaggtgctgtagatgagccattggattaaattattacagtatgtttcagactgctgtatgttgaaccctagtgaaatgcctctcaaaccttcataaggatcacaatctcatgtccttttttt

SEQ ID NO: 2762 - DNA, 155 bp, Homo sapiens
acatttcctcgtcatataaagatctattggatagtgctggtctgtagcttataggatggtatcttagtctgcttcagctgctaaaacagaataccataaattaggtagcttaaacagtagatattttgaccaggcgtggtggcttatgcctgtat

SEQ ID NO: 2763 - DNA, 1453 bp, Homo sapiens
atattacagaccattttggagcatggtgaataagaaattttcaccttaggagttcacttgaatagtcatttttatatttgtgactgcaaatcactcttaggggctgtacttccttagtactggtagcattattatccaatggacttttatagctttcattaggttttcttttgtttttgttctttaaagaacgttttacttatcttagtatttcatttttcatctatattatgaggcagtaagagtcttctgtttttccaaagtggagactgctttatatttatttcgtattgtctacagctgtagtgttcaatacattagccactagccacatgtggttatttaaataagataaaataaaaattggccgggcgtggtgggtcacgccggtaatcccagcactttgggaggccgaggcgggcagatcattaggtcaggagatcgagaccatccttactaagacggtgaacccccatctctattaaaaatacaaaaaattagccgggcgtggtggcgggcgcctgcagtcccagctactcaggaggctgaggcaggagaatggcgtgaacctgggaggcagagtttgcagtgagccgagatggcgccactgcactccagcctgggggacagagcgagactccatctcaaaaaaaaaaagaaaattaaaaattaagttctttagttgcactagccatatttcaaatacttgatggatacatgtggctagtggctaacataagggatagcacagatataaaacatttcctcgtcatataaagttctattggatagtgctggtctgtagcttataaggatggtatcttagtctgcttcagctgctaaaacagaataccataaattaggtagcttaaacagtagatattttgaccaggcgtggtggcttatgcctgtattcctaacactttgggaggccgaggcaggtggataacttgagctcaggagtttgagactagcctgggcagcatggcaaaaccttgtctctacgaaaattagctgggcgtggtggtgcacgcctgtagtctgagctacttgggaggctgaggtgggagaattgcttgaacctgggaggcggaggttgcagtgagccatgatcgcaccactgtactccagcctggatgacagaatgagactctgtctcaaaaaaaacaaaaacaaacaaaaaaaaaaaaacagatatttctcacagttctgcagactggaagtgcaagatcaaagtgttggcaaattacgtttcttaaagagggcctgcttcctagattggaaatggccatcttctctcggtatcctcacatggtagggagaaaagcagctctagtgtctcttcttataaaggaagtaatgccaccataggggctctattctcatgacctcatctaaacctaattctctcctaaaggccacgcctcccagtatcctcaccttgggggttagg

SEQ ID NO: 2764 - DNA, 7642 bp, Homo sapiens
ctcccagagtgctgggattacatccccttcttaccttctctgtcagaggagcccccacagcatgtgagtactgagtcatgcggtcttgtggttgctgaacgggctctgctgctctggtcctaggctctgtatgtggatgtgatccgtgtgaacagctactactcttggtatcgcaactacgggcacctggagttgattcagctgcagctggccgcccagtttgagaattggtgtaagacatcacaatcccattattcagagcgcgtatggagtggaaacgcttgtagggcttcaccaggtaagcggtgttgaactttctgcttgtgtattctctctgggcagagatgccacttgcctcccccaccatgccatctctgaagaatattacagaccattttggagcatggtgaataagaaattttcaccttaggagttcagttgaatagtcatttttatatttgtgactgcaagtcactcttaggggctgtacttccttagtactggtagcattattatccaatggacttttatagctttcattaggttttcttttgtttttgttctttaaagaacgttttacttatcttagtatttcatttttcatctatattatgaggcagtaagagtcttctgtttttccaaagttgagactgctttatatttatttcgtattgtctacagctgtagtgttcaatacattagccactagccacatgtggttatttaaataagataaaataaaaattggccgggcgtggtggctcacgccggtaatcccagcactttgggaggccgaggcgggcagatcattaggtcaggagatcgagaccatccttactaagacggtgaacccccatctctattaaaaatacaaaaaattagccgggcgtggtggcgggcgcctgcagtcccagctactcaggaggctgaggcaggagaatggcgtgaacctgggaggcagagtttgcagtgagccgagatggcgccactgcactccagcctgggggacagagcgagactccatctcaaaaaaaaaaagaaaattaaaaattaagttctttagttgcactagccatatttcaaatacttgatggatacatgtggctagtggctaacataagggatagcacagatataaaacatttcctcgtcatataaagttctattggatagtgctggtctgtagcttataggatggtatcttagtctgcttcagctgctaaaacagaataccataaattaggtagcttaaacagtagatattttgaccaggcgtggtggcttatgcctgtattcctaacactttgggaggccgaggcaggtggataacttgagctcaggagtttgagactagcctgggcagcatggcaaaaccttgtctctacgaaaattagctgggcgtggtggtgcacgcctgtagtctgagctacttgggaggctgaggtgggagaattgcttgaacctgggaggcggaggttgcagtgagccatgatcgcaccactgtactccagcctggatgacagaatgagactctgtctcaaaaaaaacaaaaacaaacaaacaaaaaaaaacagatatttctcacagttctgcagactggaagtgcaagatcaaagtgttggcaaattatgtttcttaaagagggcctgcttcctagattggaaatggccatcttctctcggtatcctcacatggcagggagaaaagcagctctagtgtctcttcttataaaggaagtaatgccaccataggggctctattctcatgacctcatctaaacctaattctctcctaaaggccacgcctcccagtatcctcaccttgggggttagggctttatcatatgaatttttttttttttttttttttttgagacagagtctcgctctgtctgtcacccaggctggagtgcagtggcacaatctcggctctctacaagctccgcctcctgggttcacgccattctcctgcgtcagcctcctcagtagctgggactaaggcgcccgccactgcgcccggctaattttttgtattttcagtagagacggggttttaccatgttagccaggatgatctcgatctcctgacctcatgatccacccgcctcggcctccgaaagtgctgggattacaggcatgagccaccgcgccgggcctatcatatgaattttgagggaacacaaacatgcagtctgtagcagatggtaataggctgacatattacacttgttgatgtaaatctgataggtttctttctctccaaggacagctttttaaatatttaacagtatcaataatttttcaggttctgtgagaattttataatttataatttgcagacttaatgtataatctattttgtcctaacaattacaaatatattttttatttcagattgtatatattcctaccagatggagataattacagctttaaaaatttttattttttcattttatttcacacattgacattaaatttttatggacacataataactgtacatatatatggggtagaatgtgatgttttaatacatgtactcaatgtgtaatgatcaaatcagggtaatttgcataatgatttttctgtagggagaaaattcaaaatctactcttctggctattttcaaatatataatatgttattgttaactatactcatcctactatgcaataggacaccagaacttattcctgggttctacatccgttaaggcaaccaaggattggaaatattggaaaaaaaaattgcgtctgtactgaacatgtacagacttttttcttgtccttattccttacacaatatagtacaataactatttgcatgacatttacatcggatattatgagtgatctagagttgatatgaagtatatgggaggatgtgcaaaggtgatgtgcaaatactatgtcattttatatcagggacttgagtatcctttgttaccctcaggagatcctgaaaccagtcccccatggatactgagggctgactgtatagtcctatcctcacggaactttcattctaatgggggaagactgactataaacaaaatatatgtaataggtggtggtaagtaccgtggagaagtaacaaacggggcaaagtgagttatacagctccattcttagaaaccttggagtacttttcttagtttatacttgtggtggtttccttttgtctcctttattacatgggactctgacatgtgcccatagctagggtgacagtaggatctacccgatagtagggtggcagtaggatctacccaaaaagcgtcctgctgatacaggaccaaagcatcctgttgttctcgagcctataaaaagagctaatggtcttgcttctcttaactgtggcctcctacactgtgttttggatgattggtgatgtcttggatattctgtttctttggaactttgaatatacaacactttactagggaattagcaatggaagcagagcaaagatgtacagaggaaacaatgcgtaactctgatggaattgaagtcatgaggcagcagagagcttaaattacagctttaaaaatttttattttttagagggaatttacttgggagtaacagcagtaatagttaacggagccagaatgcttgagtcatataattgcaaagcagagttgggagcaacagatgctaaagagtagttgctgtagttcctctttgggtcgtaggagcagttgtcatattcctatatagctactgcatgaagaagagttcttagtgaggcctgggtgaacagctcttcttagtattctgtgtgaccccatttgaccttttaacaaatccctaagtaaataaatagcccctcaggtaaactaagtttttctctgctgtttttttgcttgagagagctataactgtaatagacttatatttctgaacatttcagtgcttgccaatatttggtaatatttatgtttcctatatttgtaatgaacattcttcttccggtacattttttgttaaattattgtttgatggataaaagttcaccctttattgtataaaattgactgagattaatttatacacattgacaatgggtaaatagaatttttcagattattaaaagctgaaggatgcccacgtaagcaaaaaaaaaaaagaaaaaaccaacaaaaataaacccaaacccctcaaacaatttcgaacacgaaacattcttctgatgccggcatccctgcttgcaggtgtgaagggggcaggaatcagcgaggtgtcctgggctgagtccccggagtgggaagaggtggcaggaaggggatctgaggaggagaacaggggtcctggtggtctgtgcttcttcccagacacgggagctgtagaggagacctctgcagcagatgctaggggggccagtaggcccaggcagtcttgggacttgggtctgtcctgctgtgcatccatagtgggtgctttagaaacgggaggcccacccgaagtccctgttgcaagtgaggacaaagtgtgggaaggccgtgagggtctgcagtccgggatggccttgtcctcaacgtgcagtgcactgttgatgcgctggaatgccgtctctttttccaggtgcaggtcttcagccgtgacccggtaccccagctctaagggaggtggcagcatcaaaggctcccctcgcctgcgtggcagcaggggaatcttgcgtctacggggcctagagtcctgggatctgggggagccacccgttggggcgattgtctgccctggtgctgtatctgcccccttttcacaccgtgtgtgacccgaagagacagcctgaggcctgtcctcactcactgtctttgagtaactgagggtcagctggcagcgggatgaggctggccccctcctctgctttagccccggcaagcctcccgtggagctgtaggagctggagatggcatttcgtttggtgctcgagctcgtccaggatgtctgggatgtgtggttatatctgatttctgagctctgggcgtggaggtctgtctgcagaggcccgggcctgggcacaaagggagaggggcctccattgtcccgcaggggccaaaatgcagaccgtgcatccccggtgacctcggggaccgttctctgatcatcaggattttcttggactctggggtccttgtgctgctcaggcatccctgccccgctctccttgagggccctcaacactatcttccctggacacaagtctggggacagccgggtgttgtggaccccaaaggggtgactacctgctcctgggccccacagagtccttgtgctcagtgtagtggctgagctgggggatgccctggaactcagagcacacagcactggcttactgtggtacctgtgcagtgaagttgaagacagaatcaccaggatggaacacaggtcttgcaggatcacggaaaaccttcttagagttgtcttgacaccactgatgtcgagtgtgcgggtgtttgtaggatggcctgccactcagtccaggggcaggagcaacggggagatcccacaagcaaagtgaactgggggatgggctgaaggggctccaggcaactgagccctactcgcaggtcctcggccttggcccaaacaggaatgaggggcacagagtgcccgggtaaccgctcctgggagcagtggggaactgtcggatacttgaactctcaagagctgggctctgagcgtcctcgtccagctgccaacttggccaaaggctaagccagcagattgttctgttgccgggcaacgcgacttctaaacctgagggagtgggcatgtgagcacataatggcaccagtgacagagcgaccataatggatgaataagcgcagccaggtaccggcgcaaggcacctgctggcaatggcaggaggcggacgtggggggtcgtgcagtaggtactggagggagagacgtgggcacaaaggtcgcgggaggaacaggtgcccacaatggctgcatatttgcccgtggatcactgaagattcctgctctcctgctgaggtggagactgcagtgagctgagatcgcaccattgcactccagcctgggcaacgagtgcaaaactcagtctccagataaaaaaaagaaaaagaaaaaaaagaggccgggtgtggtggcttatgcctatgatcctagcactttgggaggtcggggtggacggatcacgagatcaggagttggaggccagcctggccaacatagtgaaagcccgtctctagtaaaaatacaaaatttagtcagacatggtgggcaggagagagcatgtgcaggggaacatccatttataaaaccatcagacctcatgagacttattcactaccatgagaacagcatgggggaaactgcctccatgattcagttatctccacctggccccacccttgacacatgggaattgttacaattcaagatgagatttgggtgcggacagagccaaaccatataattcttccccggcccctcccaaatctcatgtcctcatatttcaaaagcaatcgtgccttcccctaagtcccccaaactcttatttcagcattaactcaaaattccatagtccaaagtctcatctgagacaaggcaagtcccttccacctatgagcctgtaaaatcaaaagcaagttagttattttctagatacacagggatacaggcattgggtagatacactcgtttcaaatgggagaaattggccaaagcgaaagagctacaggccccatgcaagtccaaaacccagcaggcaaatcttaaagctccaaaatgacctcctttgactccatgtgtcacatctaggtgatgcaagaagtgggttcccagggtcttgggcagccccgcccctgtggctttgcagggtacagccccccttctggctgcattgagtgtctgcagcttttctaggcacacagtgcaagctgtcagtggatctaccattctggggtctggaggatggtggcccttttctcacagctctgcttggcagtaccccagtggggactctgtgtggaagctccaaccccatatttccctttgacactgccctagcagaggttatccatgagggcccccccctcccctcccccccacagcaaacttttgcctggatttccaggcattttcatacatcttctgaaatgtaggcggaggttcatgaacgttaattcttgacttcggtgcatctgcaggcttaacaccacctagaacctgaaaggcttggaacttgcaccctctgaagccatggcctgaggtgtaccttgtccccttttacctatggcaggagcagctgggatgccagggccccaagttcctaggctgcacacagcagggggttctggacccacaaaaccatttttccttctaagcctcctggcctgcgatgggagggtctgctgtgagggtctctaacatgccctggagacatttgccccatgtcttggtgattaacatttggctcctcattacttatgcaaatttctacaacccagtctcctgagaaaatagatttttcttttctgttgcatcatcaggctacaaattttctgaaattttatgctctgcttcttctcgaatgcttgctgcttagaaatttcttctgtcagataccttaaatcatctctctcaagttcaaagttccacagatctc

SEQ ID NO: 2765 - DNA, 15819 bp, Homo sapiens
cagaagcaaatgagagtgcctgggagtggtcattgtggggccttcccgtttgtgtgacccaggtcatgtccctccctaagccctggtctctcttgcctcctgcagggctggtgaattaccagatctccgtcaagtgcagtaaccagttcaagttggaagtgtgtcttttgaatgcagaaaacaaagtcgtggacaaccaggctgggacccagggccagctgaaggtgctggtgccaacctctggtggccgtacctgatgcacgaacaccccgcctacctgtactcgtgggaggtaatggtggtttgggacttgcgtaagggaggtcttttgcccccatctggtagccctggcttcagcaggagcccaggacaggtgaacgggcaggtgtggtcctctgagctttctgatgtttcccacccttggtgggaggcccagattttttatttatttatttatttatttatttatttatttatttgtttgtttgtttttgtgatggtctcactctgtcacccaggctggaatgcaatggcctgatcacagctcactgcagctttgagctgcaatcctcctaccttggcctcctgagtagctgggactacaggcacatgccaccatgcctggctaattaaaaaaattttttttgtaggccgggcatggtggctcacacctgtaatcccagcacttcgggaggctgacgcgggcggatcactttaggccaggagttggagaccagcctggccaacatggtgaaaccccgtctctactaaaatatgaaaatttgcagggcatgatggtgcacgtctgtaatcccagctactcgggaggctgaggcaggggaattgcttgaacccaggaggcaggggctgcggtgaattgagatcatgccgcagcactctatcctgggtgacagagtgagactgtctcaaaaaaaaaaaactcctttttatagagttggggtcttactaggttgcccaggctggtcttgaactcctggactcaggtgatcctcctgccttagcctcccaaagtgtagggattccaggcatgagccacctcgtctggtcaaggagaaggcctgattttgaagggcaggtcccagggtcagccagtgaagggcagagcctctggttgctgcttctctgcaggcccagtggcgacttctggggtgcatgcacgaggggtcttcctgctgtagggcaggccagatggggctcaggctgtcggggcgctcacacctggcgctttggctgtcgtaggtgcggctgactgcacagaagtcactggggcctttgacttctacacactccctgtgggcgtccgcactgtgcccgtcaccgagagccagtgggtgagagccagtttcatttgcggtagaggcagcagaggttgtagaaatgctccttgaggcagatgccacaccccaatttcatggagtgatttgggctgagccgagtctgcagcaggcagaaggctctgagatgttgtcctagcctgggcaaaggacaattcagagctcgggggaataggggtgtgctcagcacgactgggtggacaggccgtttgttgtgaatcgtacaggcttccaggagcgggtgcctgaggcttccagacaggctttgggaggtggccagaggagatgcctgtttccggggcaggaaatggagggagggcccaggctggagaggttcagccaggctgtcacaaggctttgaagcttcccatctgagagcctggctattggagagtgtgggtttggaacttgaggctaggaggttctattctgtcctgtgccagccacagccttcggatgggcagagcaatgatggggggaagatgtaaaagaaaagaactgaggaaagaagaagaaaaccagcttcaacaacggtctaggccggatgcggtgggtcacgcctgtaatcccagcagtttgggaggctgaggtgggtggatcacccgaggtcaggagttcgagaccagcctggtcaacaggtagtgaatcctgtctctactaaaaatacaaaaattagctgggcatggtggtggacgtctgtaatcccagctaccaggtaggctgaggcaggagaatcgcctcaggtgaaccaggaggcagagattgcaatgagctgagataatgccactgcattccagcctgggctacagactgagactctgtatctcaacaaaacaaaacaacacaaaaacacaacagtctgttctgtggaggccttgggcagatgctcggcgctctgagcacggactggtccctctgttgggagcctcttcccttcatccctcctggttaacttgactcagcataaaggccatttcttctaagagcctgtccctgactctccaatcggggatgtgtctgttgtctcatagagtgcccaattcctgccaccacttgtcatttccattcgcaacatttctttcattgtttgtttttcagagtcagggtctcactctgttgcccaggctggagtgcagtggtgcaatcatagctcgttgccatctcgacctcctgggcttaagcgatcctccccactcagcctcccaaatagctgagaccacagacgtgcgctgccttgccaggctaaattttaatatttttttttccccacgagtcagagtcttgctctgtctcccaggctggagagcagtgttgcgatcttggctcactgcatcctctacctcctgggtacaaacagttctcctgcctcaccctcccgagtagctgggattacaggctcacgccaccatgcccagctagttttcttctttattttttgttgagatggggtttcaccatgttggccaggctggtctcgaactcttgagctcgtgatccacctgccttggcctcccaaagtgctcacaggcttgagccaccatgcccggccctaatttttaaatttgttgtagaaacaaggtcttgctatgttgtccaggctggtctcaagcgcctggtctcaagtaagcctcccaaagtgctggggttctaggcttgagccacctcgcctggcacttgcaccgtttttctgtgcatgcatctccactcccactgcccaggacctgtggacttagatttgagtcattactgagcacctagcacccagcctcatgcctccctcccacctcgcactacctgtttgcttgatgcattaataaatattccacctgaatccacagcccattcactcctgtgttcaagagctatttcaggaagtgaacctcatttctggcagtgttcagtccagtgacctcagctctgtgtacccggcagggtggctacgcctctgggggagttggattcaggggtgggggagaaagagtgttgttagagagctcggtctaggactagaggaacgtgcccttatgtaaaatacatctcaagttagggaagaaagcagcggctctgtgctttgttgtttttttttttttttcttttctttctttctttttttttgtttgtttgtttgtttgtttgtttgtttgtttgtttgttttggggcagggtcttgctctgtggcccaggctggagtgcagtagcgtgatttcggctcactgcaacctccacctcccgggttcaagcaattcttgtgcctcagcctcccgagtagctggagttacagatgcgtgccactaagcctggctaatttttgtatatttagtagaaatggggttttgccatgttggccaggctgttcttgaacccctgacctcagtgatctgcctgcctcagcctcctgaagtgctgggattacaggcgtgagccatcgtgcctggcccccagttgtgttctggcaggggaagatgggacagagaggatgggaggttgtctgagcctttcccggactgacggaacctgtgtcttctctcttttgtggacaggatggtgattgctcacaccaaagccttggacccctcccagcctgtgacctttgggaccaactccacctacgcagcagacaaggcggtgagcctgggggtccccaccccatttctccctgcctttgcctgggcttgtcctgaagcctgctcatgggaacagctggaaagaaccatgtgctgccagtctgagctttttattttgttttacttagaaagatagagacagggtcttgccatgttgcccaggctggtctcgaactcctgggctcaagtgatcctcctgcctcggccttccaaagggctggggttacaggcgtgtgccaccgcactcagccgcggccagtctgttttcaaagatggtctttgggttaatgacaattctctctctgcttactctccaggcagtgtggctttctgaatccaaggaggctgggcatagggagatgggatttgtttgcccggtttggactcagcattttttgtactcgatttaatagactcataaaatgtcaaaggtttaagtgagcttagagttcatctggcccaaacctggctgatcagaatctccaggggaagttttattgaaatgccagatctctgcgttctgagatcctgatttagtaactccagggttggaacctgagttttttgtttttttgtgtgtgtgtgtgaaggcaaggtcttactctgttgctctggctggagtgcagtggtgtgatcacagctcactgcagccttgaattcctgggcctaagcaaccctcttgcctcagccttccaagtagctgggactccgggggtacaccactgtgcccggctaattttaaatgtttttgtagagatgggatctcactatgttgcccaggccagtctcaaactcttgagctcaagtgatcctcctgccttagcctcctaaagtgctgggattacaggcatgagccaccgtgcctggctgatactagcattcttttttattttttattatttttttaagatagagtcttgctctgttgcccaggctggagtgcagtggcacagtctcagctcagtgcaacctccgcctcccaggttcaagcaattctcctgcctcagcctcccaagtagctgggataacaggcacatgccaccacgcctgcgcttgatcgtgggaggcagaggttgcattattgtgccactccattctagcctgggcaacagagcgagactctgtcttccaaacaaagcggaaaaagattatctgcgagaatgactgcattggccccttgggtgggagggcttctccagggcaaggtgaggggatgcccagtgctgggagtgctgcctggagaggagtcagttccagtggcgggggccctgggttttggctgaggactgcgtgttggcagctgctctgcctctcacagcccttcccagctgcacacgtcgtgagcgtcagtgtgcaatcacaggcctgcctcctttgggccactttgtgaccatgttttttgcttgtggggcagggtaatttcaggatctaaattggtgcagttggatgttctcagccccgagaggcagctcttcccgttgtaggctttttgttttgttttgtagaaatggagtcctacgacgttgcccaggctggtctcaaactcctgggctcaagtgatcctcccaccttggcctcccaatgtgctgggattacaggcatgagccactgtgccgtgctgattttcttgatactattttttgtagagctggggtcttgctgtgttgcccaggctggtctcgaactcctggccacaagccaccctcctgcctcagcctcccagagtgctgggattacatccccttcttaccttctctgtcagaggagcccccacagcatgtgagtactgagtcatgcggtcttgtggttgctgaacgggctctgctgctctggtcctaggctctgtatgtggatgtgatccgtgtgaacagctactactcttggtatcgcaactacgggcacctggagttgattcggctgcagctggccgcccagtttgagaattggtgtaagacatcacaatcccattattcagagcgcgtatggagtggaaacgcttgtagggtttcaccaggtaagcggtgttgaactttctgcttgtgtattctctctgggcagagatgccacttgcctcccccaccatgccatctctgaagaatattacagaccattttggagcatggtgaataagaaattttcaccttaggagttcagttgaatagtcatttttatatttgtgactgcaagtcactcttaggggctgtacttccttagtactggtagcattattatccaatggacttttatagctttcattaggttttcttttgtttttgttctttaaagaacattttacttatcttagtatttcatttttcatctatattatgaggcagtaagagtcttctgtttttccaaagttgagactgctttatatttatttcatattgtctacagctgtagtgttcaatacattagccactagccacatgtggttatttaaataagataaaataaaaattggccgggcatggtgggtcacgccggtaatcccagcactttgggaggccgaggcgggcagatcattaggtcaggagatcgagaccatccttactaagacggtgaacccccatctctattaaaaatacaaaaaattagccgggcgtggtggcgggcgcctgcagtcccagctactcaggaggctgaggcaggagaatggcgtgaacctgggaggcagagtttgcagtgagccgagatggcgccactgcactccagcctgggggacagagcgagactccatctcaaaaaaaaaaagaaaattaaaaattaagttctttagttgcactagccatatttcaaatacttgatggatacatgtggctagtggctaacataagggatagcacagatataaaacatttgctcgtcatataaagttctattggatagtgctggtctgtagcttataggatggtatcttagtctgcttcagctgctaaaacagaataccataaattaggtagcttaaacagtagatattttgaccaggcgtggtggcttatgcctgtattcctaacactttgggaggccgaggcaggtggataacttgagctcaggagtttgagactagcctgggcagcatggcaaaaccttgtctctacgaaaattagctgggcgtggtggtgcacgcctgtagtctgagctacttgggaggctgaggtgggagaattgcttgaacctgggaggcggaggttgcagtgagccatgatcgcaccactgtactccagcctggatgacagaatgagactctgtctcaaaaaaaacaaaaacaaacaaacaaaaaaaaacagatatttctcacagttctgcagactggaagtgcaagatcaaagtgttggcaaattatgtttcttaaagagggcctgcttcctagattggaaatggccatcttctctcggtatcctcacatggtagggagaaaagcagctctagtgtctcttcttataaaggaagtaatgccaccataggggctctattctcatgacctcatctaaacctaattctctcctaaaggccacgcctcccagtatcctcaccttgggggttagggctttatcatatgaattttttttttttttttttttttttttttgagacagagtctcgctctgtctgtcacccaggctggagtgcagtggcacaatctcggctctctacaagctccgcctcctgggttcacgccattctcctgcgtcagcctcctcagtagctgggactaaggcgcccgccactgcgcccggctaattttttgtagttttagtagagacggggttttaccatgttagccaggatgatctcgatctcctgacctcatgatccacccgcctcggcctcccaaagtgctgggattacaggcatgagccaccgcgccgggcctatcatatgaattttgagggaacacaaacatgcagtctgtagcagatggtaataggctgacatattacacttgttgatgtaaatctgataggtttctttctctccaaggacagctttttaaatatttaacagtatcaataatttttcaggttctgtgagaattttataatttataatttgcagacttaatgtataatctattttgtcctaacaattacaaatatattttttatttcagattgtatatattcctaccagatggagataattacagctttaaaaatttttattttttcattttatttcacacattgacattaaatttttatggacacataataactgtacatatatatggggtagaatgtgatgttttaatacatgtactcaatgtgtaatgatcaaatcagggtaatttgcataatgatttttctgtagggagaaaattcaaaatctactcttctggctattttcaaatatataatatgttattgttaactatactcatcctactatgcaataggacaccagaacttattcctgggttctacatccgttaaggcaaccaaggattggaaatattggaaaaaaaaattgcgtctgtactgaacatgtacagacttttttcttgtccttattccttacacaatatagtacaataactatttgcatgacatttacatcggatattatgagtgatctagagttgatatgaagtatatgggaggatgtgcaaaggtgatgtgcaaatactatgtcattttatatcagggacttgagtatcctttgttaccctcaggagatcctgaaaccagtcccccatggatactgagggctgactgtatagtcctatcctcacggaactttcattctaatgggggaagactgactataaacaaaatgtatgtaataggtggtggtaagtaccgtggagaagtaacaaacggggcaaagtgagttatacagctccattcttagaaaccttggagtacttttcttagtttatactcgtggtggtttccttttgtctcctttattacatgggactctgacatgtgcccatagctagggtgacagtaggatctacccgatagtagggtggcagtaggatctacccaaaaagcatcctgctgatacaggaccaaagcatcctgttgttctcgagcctataaaaagagctaatggtcttgcttctcttaactgtggcctcctacactatgttttggatgattggtgatgtcttggatattctgtttctttggaactttgaatatacaacacttttctagggaattagcaatggaagcagagcaaagatgtacagaggaaacaatgcgtaactctgatggaattgaagtcatgaggcagcagagagcttaaattacagctttaaaaatttttattttttagagggaatttacttgggagtaacagcagtaatagttaacggagccagaatgcttgagtcatataattgcaaagcagagttgggagcaacagatgctaaagagtagttgctgtagttcctctttgggtcgtaggagcagttgtcatattaccatatagctactgcatgaagaagagttcttagtgaggcctggatgaacagctcttcttagtattctgtgtgaccccatttgaccttttaacaaatccctaagtaaataaatagcccctcaggtaaactaagtttttctctgctgtttttttgcttgagagagctataactgtaatagacttatatttctgaacattttagtgcttgccaatatttggtaatatttatgtttcctatatttgtaatgaacattcttcttccggtacattttttgttaaatattgtttgatggataaaagttcaccttttattgtataaaattgactgagattaatttatacacattgacaatgggtaaatagaatttttcagattattaaaagctgaaggatgcccacgtaagcaaaaaaaaaaaaagaaaaaaccaacaaaaataaacccaaacccctcaaacaatttcgaacacgaaacattcttctgatgccggcatccctgcttgcaggtgtgaagggggcaggaatcagcgaggtgtcctgggctgagtccccggagtgggaagaggtggcaggaaggggatctgaggaggagaacaggggtcctggtggtctgtgcttcttcccagacacgggagctgtagaggagacctctgcagcagatgctaggggggccagtaggcccaggcagtcttgggacttgggtctgtcctgctgtgcatccatagtgggtgctttagaaacgggaggcccacccgaagcccctgttgcaagtgaggacaaagtgtgggaaggccgtgaggtctgcagtccgagatggccttgtcctcaacgtgcagtgcagtgttgatgcggggcctagaggcctgggatctgggggagccacccctgggggcaagtgtctgccctggtgctgtacctgccttcttctcacagcgggtgtgacccgaagagacagcctgaggtccgtcctcactcactgtgtttgaggaactgtgggccagctggcagtgggatgaggctggccccctcctccgctttagttgcgggaggccttccgtagagctgtgggagctggagctggcatttccttggaggcaggatctggtccgggaggtctgggatctctggttatatctcacttctgacctctggacacgtgctgcagctgtggctgaggccaagaaatgtgaggggcttccatccactgcattgagtagtgaccccgacgtggggttcaatgtggaggggggaggggctgctgctgcagctgcaggagccgaggtgccaggccttgttcttctcatgccggcatcgctgcttgcagctgtgaagggcgcgggaatcagcgaggtgacctgggctgagtcccgtgagtggtaagaggtggcaggaaggggatctgaggaggagaacaggggtcctggtggtctgtgcttcttcccagacacgggagctgtagaggggacctctgcagcagatgctaggggggccagtaggcccaggcagtcttgggacttgggtctgtgctgctgtgcatccatagtgtgtgctttagaaacgggaggcccacccgaagcccctgttgcaagtgaggacaaagtgtgggaaggctgtgagggtctgcagtccgggatggccttgtcctcaacgtgcagtgcactgttgatgcgctggaatgccgtctctttttccaggtgcaggtcttcagccgtgacccggtaccccagctctaagggaggtggcagcatcaaaggctcccctcgcctgcgtggcagcaggggaatcttgcgtctacggggcctagaatcctgggatctgggggagccacccgttggggcgattgtctgccctggtgatgtatctgcccccttttcacaccgtgtgtgacccgaagagacagcctgaggcctgtcctcactcactgtctttgagtaactgagggtcagctggcagcgggatgaggctggccccctcctctgctttagccccggcaagcctcccgtggagctgtaggagctggagatggcatttcgtttggtgttcgagctcgtccaggatgtctgggatgtgtggttatatctgatttctgagctctgggcgtggaggtctgtctgcagaggcccgggcctgggcacaaagggagaggggcctccattgtcccgcaggggccaaaatgcagaccgtgcatccccggtgacctcggggaccgttctctgatcatcaggattttcttggactctggggtccttgtcctgctcaggcatccctgccctgctctccttgagggccctcaacactatcttccctggacacaagtctggggacagccgggtgttgtggaccccaaaggggtgactacctgctcctgggccccacagagtccttgtgctcagtgtagtggctgggctgggggatgccctggaactcggagcacacagcactggcttactgtggtacctgtgcagtgaaattgaagacagaatcaccaggatggaacacaggtcttgcaggatcacggaaaaccttcttagagttgtcttgacaccactgatgtcgagtgtgcgggtgtttgtaggatggcctgccactcagtccaggggcaggagcaacggggagatcccacaagcaaagtgaactgggggatgggctgaaggggctccaggcaactgagccctactcgcaggtcctcggccttggcccaaacaggaatgaggggcacagagcggagatataccgctcctgggagcagtggggaactgtcggatacttgaactctcaagagctgggctctgagcgtcctcgtccagctgccaacttggccaaaggctaagccagcagattgttctgttgccgggcaacgcgacttctaaacctgagggagtgggcatgtgagcacataatggcaccagtgacagagcgaccataatggatgaataagcgcagccaggtacccgcgcaaggcacctgctggcaatggcaggaggcggacgtggggggccgtgcagtaggtactggagggagagacgtgggcacaaaggtcgcgggaggaacaggtgcccacaatggctgcatatttgcccgtggatcactgaagattcctgctctcctgctgaggtggagactgcagtgagctgagatcgcaccattgcactccagcctgggcaacgagtgcaaaactcagtctccagataaaaaaaagaaaaagaaaaaaaagaggccgggtgtggtggcttatgcctatgatcctagcactttgggaggtcggggtggacggatcacgagatcaggagttggaggccagcctggccaacatagtgaaagcccgtctctagtaaaaatacaaaatttagtcagacatggtgggcaggagagagcatgtgcaggggaacatccatttataaaaccatcagacctcatgagacttattcactaccatgagaacagcatgggggaaactgcctccatgattcagttatctccacctggccccacccttgacacatgggaattgttacaattcaagatgagatttgggtgcggacagagccaaaccatataattcttccccggcccctcccaaatctcatgtcctcatatttcaaaagcaatcatgccttcccctaagtcccccaaactcttatttcagcattaactcaaaattccatagtccaaagtctcatctgagacaaggcaagtcccttccacctatgagcctgtaaaatcaaaagcaagttagttattttctagatacacagggatacaggcattgggtaaatacactcgtttcaaatgggagaaattggccaaagcgaaagagctacaggccccatgcaagtccaaaacccagcaggcaaatcttaaagctccaaaatgacctcctttgactccatgtgtcacatctaggtgatgcaagaagtgggttcccagggtcttgggcagccccgcccctgtggctttgcagggtacagccccccttctggctgcattgagtgtctgcagcttttccaggcacacagtgcaagctgtcagtggatctaccattctggggtctggaggatggtggcccttttctcacagctctgcttggcagtaccccagtggggactctgtgtgggagctccaaccccatatttccctttgacactgccctagcagaggttatccatgagggcccccccctcccctcccccccacagcaaacttttgcctggatttccaggcattttcatacatcttctgaaatgtaggcggaggttcatgaacgttaattcttgacttcggtgcatctgcaggcttaacaccacctagaacctgaaaggcttggaacttgcaccctctgaagccatggcctgaggtgtaccttggccccttttacctatggcaggagcagctgggatgcagggccccaagttcctaggctgcacacagcagggggttctggacccacaaaaccatttttccttctaagcctcctggcctgtgatgggagggtctgctgtgagggtctctaacatgccctggagacatttgccccattgtcttggtgattaacatttggctcctcattacttatgcaaatttctacaacccagtctcctgagaaaatagatttttcttttctgttgcatcatcagggtacaaattttctgaacttttatgctctgcttcttctcgaatgctttgctgcttagaaatttcttgtgtcagataccttaaatcatctctctcaagttcaaagttccacagatctgtagggaactctagaaaaaaattcttattttccctctttcccgcctatcttatgcccgtttctaatacaggtgcacaatgcctgcagtgtctttgcatagtaagagtgactttactccatttcccaacaaattcctcatctgcctctgagaccacctccgcctggaccttgttgtccatatcactattaacattttggtcaaagccattcaacaagtctctaggaagttccaaactttcccacattttcctatcctcttctgagccttccaaactgttccagcctctccctgttacccatttccaaagttgcttccacattttcgggtatctttacagcagcaccccactctactggtatcaacttattgtattagtctgttctcacactgcaaataaagacatacctgagactgggtaatttataaaggaaagaggttgaattgactcacagttctgcatggctggggaggcctcacaatcatggtggaaggcaaggaggtgcaaaagcatgtctcacatagtggcaggcaggagagagcatgtgcaggggagctcccatttataaaaccatcagatctcatgagacttagtcactaccgcgagaacagtatggggggaaccatccccatgattcagttatctgcacccggccccacccttgacacgtgggaattattacaatgcaaggtgagatttgggtggggacccatccaaactatgtcagtatgttttgacttcttgcttgattgctaggttgcatagaggacaaacatggaaattaatgaagtaccttaatatctggcttcagatcttagacaggatcagagggccagctcaaatttgcaaggaggggaggtagatcccaccattttatgggtgaatggcaaaatcaaacagaaattatgtgggatgggagatactgatgcaggcatctttggaaacattctacttagctaattttatgctaggctttaggtcaagaaggagagagagagctgacatgctgtggtacacacttatagtcccagcgacttggaaagctgaggcaggaggattgcttgatcccaggagtttgaggtagtgtgcgatgatcgttcttgtgaatagccactagccaccgaactccagcttgggcaacattgagacaccctgtctcttaatttaaaaaaaaaaaaaaaaaaaggaggaaagaaagtggtctcagtttttaatgtaaatatttttaatgggatactgatattttaagattaatgtatattgtatatcagttaactgcaggtcaataattatataaaacttaaggtacgaaaaacatttatttttgctaacatatctgtgagttgactgttgttggcttggtgaggctgcaagctgcagatagagtctaggtatgttttctgtgtgtttgttcccccttggatcagtggactacctgagaatgtgtttttgtcacagtgatagaatcacaaggaaactccagttctggaagtacattttaagccattgcttctctcatgtccactaacattcagtcagccaaagcacataccttgtccatggctaacattgatagtatagataaatatacctgatctctagcaggaggaactgcattgtcttggggaaaggttttagatatagggaggggtgatgagttg

SEQ ID NO: 2766 - DNA, 3057 bp, Homo sapiens
  SITE (2485): n equals a,t,g, or c
  SITE (2486): n equals a,t,g, or c
  SITE (2487): n equals a,t,g, or c
  SITE (2498): n equals a,t,g, or c
  SITE (2499): n equals a,t,g, or c
  SITE (2501): n equals a,t,g, or c
  SITE (2506): n equals a,t,g, or c
ttcaaatacttgatggatacatgtggctagtggctaacataagggatagcacagatataaaacatttgctcgtcatataaagttctattggatagtgctggtctgtagcttataggatggtatcttagtctgcttcagctgctaaaacagaataccataaattaggtagcttaaacagtagatattttgaccaggcgtggtggcttatgcctgtattcctaacactttgggaggccgaggcaggtggataacttgagctcaggagtttgagactagcctgggcagcatggcaaaaccttgtctctacgaaaattagctgggcgtggtggtgcacgcctgtagtctgagctacttgggaggctgaggtgggagaattgcttgaacctgggaggcggaggttgcagtgagccatgatcgcaccactgtactccagcctggatgacagaatgagactctgtctcaaaaaaaacaaaaacaaacaaacaaaaaaacacagatatttctcacagttctggagactggaagtgcaagatcaaagtgttggcaaattatgtttcttaaagagggcctgcttcctagattggaaatggccatcttctctcggtatcctcacatggtagggagaaaagcagctctagtgtctcttcttataaaggaagtaatgccaccataggggctctattctcatgacctcatctaaacctaattctctcctaaaggccacgcctcccagtatcctcaccttgggggttagggctttatcatatgaatttttttttttttttttttttttttgagacagagtctcgctctgtctgtcacccaggctggagtgcagtggcacaatctcggctctctacaagctccgcctcctgggttcacgccattctcctgcgtcagcctcctcagtagctgggactaaggcgcccgccactgcgcccggctaattttttgtattttcagtagagacggggttttaccatgttagccaggatgatctcgatctcctgacctcatgatccacccgcctcggcctcccaaagtgctgggattacaggcatgagccaccgcgccgggcctatcatatgaattttgagggaacacaaacatgcagtctgtagcagatggtaataggctgacatattacacttgttgatgtaaatctgataggtttctttctctccaaggacagctttttaaatatttaacagtatcaataatttttcaggttctgtgagaattttataatttataatttgcagacttaacgtataatctattttgtcctaacaattacaaatatattttttatttcagattgtatatattcctaccagatggagataattacagctttaaaaatttttattttttcattttatttcacacattgacattaaatttttatggacacataataactgtacatatatatggggtagaatgtgatgttttaatacatgtactcaatgtgtaatgatcaaatcagggtaatttgcataatgatttttctgtagggagaaaattcaaaatctactcttctggctattttcaaatatataatatgttattgttaactatactcatcctactatgcaataggacaccagaacttattcctgggttctacatccgttaaggcaaccaaggattggaaatattggaaaaaaaaattgcgtctgtactgaacatgtacagacttttttcttgtccttattccttacacaatatagtacaataactatttgcatgacatttacatcggatattatgagtgatctagagttgatatgaagtatatgggaggatgtgcaaaggtgatgtgcaaatactatgtcattttatatcagggacttgagtatcctttgttaccctcaggagatcctgaaaccagtcccccatggatactgagggctgactgtatagtcctatcctcacggaactttcattctaatgggggaagactgactataaacaaaatatatgtaataggtggtggtaagtaccgtggagaagtaacaaacggggcaaagtgagttatacagctccattcttagaaaccttggagtacttttcttagtttatactcgtggtggtttccttttgtctcctttattacatgggactctgacatgtgcccatagctagggtgacagtaggatctacccgatagtagggtggcagtaggatctacccaaaaagcgtcctgctgatacaggaccaaagcatcctgttgttctcgagcctataaaaagagctaatggtcttgcttctcttaactgtggcctcctacactgtgttttggatgattggtgatgtcttggatattctgtttctttggaactttgaatatacaacactttactagggaattagcaatggaagcagagcaaagatgtacagaggaaacaatgcgtaactctgatggaattgaagtcatgaggcagcagagagcttaaattacagcttgaaaattttttatttnnntttagagggannantttancttgggggaagtaacagcagtaatagttaacggagccagaatgcttgagtcatataattgcaaagcagagttgggagcaacagatgctaaagagtagttgctgtagttcctctttgggtcgtaggagcagttgtcatattactatatagctactgcatgaagaagagttcttagtgaggcctgggtgaacagctcttcttagtattctgtgtgaccccatttgaccttttaacaaatccctaagtaaataaatagcccctcaggaaaactaagtttttctctgctgtttttttgcttgagagagctataactgtaatagacttatatttctgaacattttagtgcttgccaatatttggtaatatttatgtttcctatatttgtaatgaacattcttcttccggtacattttttgttaaattattgtttgatggataaaagttcaccttttattgtataaaattgactgagattaatttatacacattgacaatgggtaaatagaatttttcagattattaaaagctgaaggatgcccacgtaagcaaaaa

SEQ ID NO: 2767 - DNA, 3049 bp, Homo sapiens
ttcaaatacttgatggatacatgtggctagtggctaacataagggatagcacagatataaaacatttcctcgtcatataaagttctattggatagtgctggtctgtagcttataggatggtatcttagtctgcttcagctgctaaaacagaataccataaattaggtagcttaaacagtagatattttgaccaggcgtggtggcttatgcctgtattcctaacactttgggaggccgaggcaggtggataacttgagctcaggagtttgagactagcctgggcagcatggcaaaaccttgtctctacgaaaatcagctgggcgtggtggtgcacgcctgtagtctgagctacttgggaggctgaggtgggagaattgcttgaacctgggaggcggaggttgcagtgagccatgatcgcaccactgtactccagcctggatgacagaatgagactctgtctcaaaaaaaacaaaaacaaacaaacaaaaaaaaccagatatttctcacagttctggagactggaagtgcaagatcaaagtgttggcaaattatgtttcttaaagagggcctgcttcctagattggaaatggccatcttctctcggtatcctcacatggtagggagaaaagcagctctagtgtctcttcttataaaggaagtaatgccaccataggggctctattctcatgacctcatctaaacctaattctctcctaaaggccacgcctcccagtatcctcaccttgggggttagggctttatcatatgaatttttttttttttttttttttttttttgagacagagtctcgctctgtctgtcacccaggctggagtgcagtggcacaatctcggctctctacaagctccgcctcctgggttcacgccgttctcctgcgtcagcctcctcagtagctgggactaaggcgcccgccactgcgcccggctaattttttgtattttcagtagagacggggttttaccatgttagccaggatgatctcgatctcctgacctcatgatccacccgcctcggcctcccaaagtgctgggattacaggcatgagccaccgcgcccggcctatcatatgaattttgagggaacacaaacatgcagtctgtagcagatggtaataggctgacatattacacttgttgatgtaaatctgataggtttctttctctccaaggacagctttttaaatatttaacagtatcaataatttttcaggttctgtgagaattttataatttataatttgcagacttaacgtataatctattttgtcctaacaattacaaatatattttttatttcagattgtatatattcctaccagatggagataattacagctttaaaaatttttattttttcattttatttcagacattgacattaaatttttatggacacataataactgtacatatatatggggtagaatgtgatgttttaatacatgtactcaatgtgtaatgatcaaatcagggtaatttgcataatgatttttctgtagggagaaaattcaaaatctactcttctggctattttcaaatatataatatgttattgttaactatactcatcctactatgcaataggacaccagaacttattcctgggttctacatccgttaaggcaaccaaggattggaaatattggaaaaaaaaattgcgtctgtactgaacatgtacagacttttttcttgtccttattccttacacaatatagtacaataactatttgcatgacatttacatcggatattatgagtgatctagagttgatatgaagtatatgggaggatgtgcaaaggtgatgtgcaaatactatgtcattttatatcagggacttgagtatcctttgttaccctcaggagatcctgaaaccagtcccccatggatactgagggctgactgtatagtcctatcctcacggaactttcattctaatgggggaagactgactataaacaaaatatatgtaataggtggtggtaagtaccgtggagaagtaacaaatggggcaaagtgagttatacagctccattcttagaaaccttggagtacttttcttagtttatactcgtggtggtttccttttgtctcctttattacatgggactctgacatgtgcccatagctagggtgacagtaggatctacccgatagtagggtggcagtaggatctacccaaaaagcgtcctgctgatacaggaccaaagcatcctgttgttctcgagcctataaaaagagctaatggtgttgcttctcttaactgtggcctcctacactgtgttttggatgattggtgatgtcttggatattctgtttctttggaactttgaatatacaacactttactagggaattagcaatggaagcagagcaaagatgtacagaggaaacaatgcgtaactctgatggaattgaagtcatgaggcagcagagagcttaaattacagctttaaaaatttttattttttagagggaatttacttgggagtaacagcagtaatagttaacggagccagaatgcttgagtcatataattgcaaagcagagttgggagcaacagatgctaaagagtagttgctgtagttcctctttgggtcgtaggagcagttgtcatattactatatagctactgcatgaagaagagttcttagtgaggcctgggtgaacagctcttcttagtattctgtgtgaccccatttgaccttttaacaaatccctaagtaaataaatagcccctcaggaaaactaagtttttctctgctgtttttttgcttgagagagctataactgtaatagacttatatttctgaacattttagtgcttgccaatatttggtaatatttatgtttcctatatttgtaatgaacattcttcttccggtacattttttgttaaattattgtttgatggataaaagttcaccttttattgtataaaattgactgagattaatttatacacattgacaatgggtaaatagaatttttcagattattaaaagctgaaggatgcccacgtaagcaaaaa

SEQ ID NO: 2768 - DNA, 458 bp, Homo sapiens
gctaacataatggatagcacagatataaaacatttcctcgtcatataaagttctattggatagtgctggtctgtagcttataggatggtatcttagtctgcttcagctgctaaaacagaataccataaattaggtagcttaatcagtagatattttgaccaggcatggtggcttatgcctgtattcctaacactttgggaggccgaggcaggtggataacttgagctcaggagtttgagactagcctgggcagcatggcaaaaccttgtctctacaaaaattagctgggcatggtggtgcacgcctgtagtctgagctacttgggaggctgaggtgggagaattgcttgaacctgggaggtggaggttgcagtgagccatgatcgcaccactgtactccagcctggatgacagaatgagactctgtctcaaaaaaaaaaaaaaaaaaaaaaaaaagaa

SEQ ID NO: 2769 - DNA, 456 bp, Homo sapiens
gctaacataatggatagcacagatataaaacatttcctcgtcatataaagttctattggatagtgctggtctgtagcttataggatggtatcttagtctgcttcagctgctaaaacagaataccataaattaggtagcttaatcagtagatattttgaccaggcatggtggcttatgcctgtattcctaacactttgggaggccgaggcaggtggataacttgagctcaggagtttgagactagcctgggcagcatggcaaaaccttgtctctacaaaaattagctgggcatggtggtgcacgcctgtagtctgagctacttgggaggctgaggtgggagaattgcttgaacctgggaggtggaggttgcagtgagccatgatcgcaccactgtactccagcctggatgacagaatgagactctgtctcaaaaaaaaaaaaaaaaaaaaaaaagaa

SEQ ID NO: 2770 - DNA, 744 bp, Homo sapiens
gaggcgggcagatcattaggtcaggagatcgagaccatccttactaagacggtgaacccccatctctattaaaaatacaaaaaattagccgggcgtggtggcgggcgcctgcagtcccagctactcaggaggctgaggcaggagaatggcgtgaacctgggaggcagagtttgcagtgagccgagatggcgccactgcactccagcctgggggacagagcgagactccatctcaaaaaaaaaaaagaaaattaaaaattaagttctttagttgcactagccatatttcaaatacttgatggatacatgtggctagtggctaacataagggatagcacagatataaaacatttcctcgtcatataaagttctattggatagtgctggtctgtagcttataggatggtatcttagtctgcttcagctgctaaaacagaataccataaattaggtagcttaaacagtagatattttgaccaggcgtggtggcttatgcctgtattcctaacactttgggaggccgaggcaggtggataacttgagctcaggagtttgagactagcctgggcagcatggcaaaaccttgtctctacgaaaattagctgggcgtggtggtgcacgcctgtagtctgagctacttgggaggctgaggtgggagaattgcttgaacctgggaggcggaggttgcagtgagccatgatcgcaccactgtactccagcctggatgacagaatgagactctgtc

SEQ ID NO: 2771 - DNA, 3049 bp, Homo sapiens
ttcaaatacttgatggatacatgtggctagtggctaacataagggatagcacagatataaaacatttgctcgtcatataaagttctattggatagtgctggtctgtagcttataggatggtatcttagtctgcttcagctgctaaaacagaataccataaattaggtagcttaaacagtagatattttgaccaggcgtggtggcttatgcctgtattcctaacactttgggaggccgaggcaggtggataacttgagctcaggagtttgagactagcctgggcagcatggcaaaaccttgtctctacgaaaatcagctgggcatggtggtgtacgcctgtagtctgagctacttgggaggctgaggtgggagaattgcttgaacctgggaggcggaggttgcagtgagccatgatcgcaccactgtactccagcctggatgacagaatgagactctgtctcaaaaaaaacaaaaacaaacaaacaaaaaaacagatatttctcacagttctggagactggaagtgcaagatcaaagtgttggcaaattgtgtttattaaagagggcctgcttcctagattggaaatggccatcttctctcggtatcctcacatggtagggagaaaagcagctctagtgtctcttcttataaaggaagtaatgccaccataggggctctattctcatgacctcatctaaacctaattctctcctaaaggccacgcctcccagtatcctcaccttgggggttagggctttatcatatgaatttttttttttttttttttttttttttttgagacagagtctcgctctgtctgtcacccaggctggagtgcagtggcacaatctcggctctctacaagctccgcctcctgggttcacgccgttctcctgcgtcagcctcctcagtagctgggactaaggcgcccgccactgcgcccggctaattttttgtattttcagtagagacggggttttaccatgttagccaggatgatctcgatctcctgacctcatgatccacccgcctcggcctcccaaagtgctgggattacaggcatgagccaccgcgcccggcctatcgtatgaattttgagggaacacaaacatgcagtctgtagcaaatggtaataggctgacatattacacttgttgatgtaaatctgataggtttctttctctccaaggacagctttttaaatatttaacagtatcaataatttttcaggttctgtgagaattttataatttataatttgcagacttaacgtataatctattttgtcctaacaattacaaatatattttttatttcagattgtatatattcctaccagatggagataattacagctttaaaaatttttattttttcattttatttcagacattgacattaaatttttatggacacataataactgtacatatatatggggtagaatgtgatgttttaatacatgtactcaatgtgtaatgatcaaatcagggtaatttgcataatgatttttctgtagggagaaaattcaaaatctactcttctggctattttcaaatatataatatgttattgttaactatactcatcctactatgcaataggacaccagaacttattcctgggttctacatccgttaaggcaaccaaggattggaaatattggaaaaaaaaattgcgtctgtactgaacatgtacagacttttttcttgtccttattccttacacaatatagtacaataactatttgcatgacatttacatcggatattatgagtgatctagagttgatatgaagtatatgggaggatgtgcaaaggtgatgtgcaaatactatgtcattttatatcagggacttgagtatcctttgttaccctcaggagatcctgaaaccagtcccccatggatactgagggctgactgtatagtcctatcctcacggaactttcattctaatgggggaagactgactataaacaaaatatatgtaataggtggtggtaagtaccgtggagaagtaacaaatggggcaaagtgagttatacagctccattcttagaaaccttggagtacttttcttagtttatactcgtggtggtttccttttgtctcctttattacatgggactctgacatgtgcccatagctagggtgacagtaggatctacccgatagtagggtggcagtaggatctacccaaaaagcgtcctgctgatacaggaccaaagcatcctgttgttctcgagcctataaaaagagctaatggtgttgcttctcttaactgtggcctcctacactgtgttttggatgattggtgatgtcttggatattctgtttctttggaactttgaatatacaacactttactagggaattagcaatggaagcagagcaaagatgtacagaggaaacaatgcgtaactctgatggaattgaagtcatgaggcagcagagagcttaaattacagctttaaaaatttttattttttagagggaatttacttgggagtaacagcagtaatagttaacggagccagaatgcttgagtcatataattgcaaagcagagttgggagcaacagatgctaaagagtagttgctgtagttcctctttgggtcgtaggagcagttgtcatattactatatagctactgtatgaagaagagttcttagtgaggcctgggtgaacagctcttcttagtattctgtgtgaccccatttgaccttttaacaaatccctaagtaaataaatagcccctcaggaaaactaagtttttctctgctgtttttttgcttgagagagctataactgtaatagacttatatttctgaacattttagtgcttgccaatatttggtaatatttatgtttcctatatttgtaatgaacattcttcttccggtacattttttgttaaattattgtttgatggataaaagttcaccttttattgtataaaattgactgagattaatttatacacattgacaatgggtaaatagaatttttcagattattaaaagctgaaggatgcccacgtaagcaaaaa

SEQ ID NO: 2772 - DNA, 462 bp, Homo sapiens
gctaacataatggatagcacagatataaaacatttcctcctcatataaagttctattggatagtgctggtctgtagcttataggatggtatcttagtctccttcagctgctaaaacagaataccataaattaggtagcttaaacagtaggtattttgaccaggcgtggtggcttatgcctgtattcctaacactttgggaggccgaggcaggtggataacttgagctcaggagtttgagactagcctgggcagcatttcaaaaccttgtctctacaaaaattagctgggcatggtggtgcacgcctgtagtctgagctacttgggaggctgaggtgggagaattgcttgaacctgggaggcggaggttgcagtgagccatgatcgcacccctgtactccagcctggatgacagaatgagactctgtctcaaaaaaaaaaaaaaaaacaaaaaacaaaaaaaa

SEQ ID NO: 2773 - DNA, 462 bp, Homo sapiens
gctaacataatggatagcacagatataaaacatttcctcgtcatataaagttctattggatagtgctggtctgtagcttataggatggtatcttagtctgcttcagctgctaaaacagaataccataaattaggtagcttaaacagtagatattttgaccaggcgtggtggcttatgcctgtattcctaacactttgggaggccgaggcaggtggataacttgagctcaagagtttgagactagcctgggcagcatggcaaaaccttgtctctacagaaattagctgggcatggtggtgcacgcctgtagtctgagctacttgggaggctgaggtgggagaattgcttgaacctgggaggcggaggttgcagtgagccatgatcgcaccactgtactccagcctggatgacagaatgagactctgtctcaaaaaacaaaacaaaacaaaaaaaaaaaacaaa

SEQ ID NO: 2774 - DNA, 1453 bp, Homo sapiens
atattacagaccattttggagcatggtgaataagaaatttttaccttaggagttcacttgaatagtcatttttatatttgtgactgcaagtcacttttaggggctgtacttccttagtactggtagcattattatccaatggacttttatagctttcattaggttttcttttgtttttgttctttaaagaacgttttacttaacttagtatttcatttttcatctatattatgaggcagtaagagtcttctgtttttccaaagttgagactgctttatatttatttcgtattgtctacagctgtagtgttcaatacattagccactagccacatgtggttatttaaataagatgaaataaaaattggccaggcgtggtggctcacgcctgtaatcccagcactttgggaggccgaggcgggcagatcattaggtcaggagatcgagaccatccttactaagacggtgaaaccccatctctattaaaaatacaaaaaaattagccgggcgtggtggcgggcgcctgcagtcccagctactcaggaggctgaggcaggagaatggcgtgaacctgggaggcagagtttgcagtgagccgagatggcgccactgcactccagcctgggggacagagcgagactccatctcaaaaaaaaaaaaaaaaattaaaaattaagttctttagttgcactagccatatttcaaatacttgatggatacatgtggctagtggctaacataagggatagcacagatataaaacatttcctcgtcatataaagttctattggatagtgctggtctgtagcttataggatggtatcttagtctgcttcagctgctaaaacagaataccgtaaattaggtagcttaaacagtagatattttgaccaggcgtggtggcttatgcctgtattcctaacactttgggaggccgaggcaggtggataacttgagctcaggagtttgagactagcctgggcagcatggcaaaaccttgtctctacgaaaattagctgggcatggtggtgcacgcctatagtctgagctacttgggaggctgaggtgggagaattgcttgaacctgggaggcggaggttgcagtgagccatgatcgcaccactgtactccagcctggatgacagaatgagactctgtctcaaaaaaaacaaaagcaaacaaacaaaaaaaacagatatttctcacagttgtggagactggaagtgcaagatcaaagtgttggcaaattgtgtttcttaaagagggcctgcttcctagattggaaatggccatcttctctcagtatcctcacatggtagggagaaaagcagctctagtgtctcttcttataaaggaagtaatgccaccacaggggctctattctcatgacctcatctaaacctaattctctcctaaaggccacgcctcccagtatcctcaccttgggggttagg

SEQ ID NO: 2775 - DNA, 462 bp, Homo sapiens; identical to SEQ ID NO: 2772

SEQ ID NO: 2776 - DNA, 130 bp, Homo sapiens
ttttttgtattttcagtagagacggggttttaccatgttagccaggatgatctcgatctcctgacctcatgatccacccgcctcggcctcccaaagtgctgggattacaggcatgagccaccgcgccggg

SEQ ID NO: 2777 - DNA, 1118 bp, Homo sapiens
taggcgtgagccaccatgcccggcgttgacttcttaataataaccatactgactggtgtgagatggtatgccattgtggttttgatttgcatttctctaatgatcagtgatattgagctttttctcatatgcttgttggccgcatgtgtgtcttcttttgaagtgtctgtttatgtcctgtgcccactttctaatgagatttttttttttcttgtaaatttgtttaagttccttatcagtgttggacattagatctttgtcacatgcattgttgcaaaaattttctcccattctgtaggttgtctgttcactctgttgatagtttcttttgctgtgcagaagcttcaagaagaaaggaatccgattggttctgtgtctgtctcttttggtattctcagaattatgtagtcattcatatagaaagatgattaggaaaataggacaagaatagcagaaatctacataaaaatgtaggaaattaaaattagttaccagcatacaaaaaacttctgtatgttataattacatactataactcacccctccttggcaaatattctctctcttttaacttcaaaatcatggcttatatgtactttctctatttcccagatgcaaatataattaattgactttatttatctaggaaatgttactcatatcttaattgtagtcattggcttgagtgacgggttttggtaattcaactactattacttgaaagtagtagatttcataggatactgttataaaatctttttaacctcttttctgatttcaggagtaattagtaattgtggtttactggaaaattcaatgaatagggtgttaaaggaagcaattcattaataatatatctaatctattgggagactgaggcgggtggatcacctgagttcaggagttcgagaccagcctggccaacatggcaaaactccgtctctactgaaaatagaaaaattcgccgggcatggtggtgcattcctgtattcccaggtactcggaaggctgaggcaggagaatcacctgaactccagaggtggaggttgcagcgagtcaggatcgcagcactacactgcagcctgggtgacagtgagactccatctcaaaaaaaaaaa

SEQ ID NO: 2778 - DNA, 468 bp, Homo sapiens
tgcattggccccttgggtgggagggcttctccagggcaaggtgaggggatgcccagtgctgggagtgctgcctggagaggagtcagttccagtggcgggggccctgggttttggctgaggactgcgtgttggcagctgctctgcctctcacagcccttcccagctgcacacgtcgtgagcgtcagtgtgcaatcacaggcctgcctcctttgggccactttgtgaccatgtttttgcttgtggggcaggtaatttcaggatctaaattggtgcagttggatgttctcagccccgagaggcagctcttcccgttctaggctttttgttttgttttgtagaaatggagtcctacgacgttgcccaggctggtctcaaactcctgggctcaagtgatcctcccaccttggcctcccaatgtgctgggattacaggcatgagccactgtgccgtgctgattttcttgatact

SEQ ID NO: 2779 - DNA, 213 bp, Homo sapiens
gaactttctgcttgtgtattctctctgggcagagatgccacttgcctcccccaccatgccatctctgaagaatattacagaccattttggagcatggtgaataagaaattttcaccttaggagttcacttgaatagtcatttttatatttgtgactgcaagtcactcttaggggctgtacttccttagtactggtagcattattatccaatgg

SEQ ID NO: 2780 - DNA, 1398 bp, Homo sapiens
taggcgtgagccaccatgcccggcgttgacttcttaataataaccatactgactggtgtgagatggtatgccattgtggttttgatttgcatttctctaatgatcagtgatattgagctttttctcatatgcttgttggccgcatgtgtgtcttcttttgaagtgtctgtttatgtcctgtgcccactttctaatgagatttttttttttcttgtaaatttgtttaagttccttatcagtgttggacattagatctttgtcacatgcattgttgcaaaaattttctcccattctgtaggttgtctgttcactctgttgatagtttcttttgctgtgcagaagcttcaagaagaaaggaatccgattggttctgtgtctgtctcttttggtattctcagaattatgtagtcattcatatagaaagatgattaggaaaataggacaagaatagcagaaatctacataaaaatgtaggaaattaaaattagttaccagcatacaaaaaacttctgtatgttataattacatactataactcacccctccttggcaaatattctctctcttttgacttcaaaatcatggcttatatgtactttctctatttcccagatgcaaatataattaattgactttatttatctaggaaatgttactcatatcttaattgtagtcattggcttgagtgacgggttttggtaattcaactactattacttgaaagtagtagatttcataggatactgttataaaatctttttaacctcttttctgatttcaggagtaattagtaattgtggtttactggaaaattcaatgaatagggtgttaaaggaagcaattcattaataatatatgtaatctattgggagactgaggcgggtggatcacctgagttcaggagttcgagaccagcctggccaacatggcaaaactccgtctctactgaaaatagaaaaattcgccgggcatggtggtgcattcctgtattcccaggtactcggaaggctgaggcaggagaatcacctgaactccagaggtggaggttgcagcgagtcaggatcgcagcactacactccagcctgggtgacagtgagactccatctcaaaaaaaaaaaaaaaaaaaaaaaaaaaaaattaaaaaattaaattaaaagcgggctgggcgcattggttcagggccgggcacggtggctcaagcctgtaatcccagcactttgggaggccgaggcaggcggatcacgaggtcaggagatcaagaccatcctggctaatgtggtgaaaccccgtctctactaacaatacaaaaattagctggatgtggtggcaggtgcctgtaatcccagctattccagaggctgaggcaggagaatcacttgaacctgggaggcagaggtt

SEQ ID NO: 2781 - DNA, 596 bp, Homo sapiens
agctgtagaggggacctctgcagcagatgctaggggggccagtaggcccaggcagtcttgggacttgggtctgtcctgctgtgcatccatagtgggtgctttagaaacgggaggcccacccgaagcccctgttgcaagtgaggacaaagtgtgggaaggccgtgagggtctgcagtccgagatggccttgtcctcaacgtgcagtgcagtgttgatgtggggcctagaggcctgggatctgggggagccacccctgggggcaagtgtctgccctggtgctgtacctgccttgttttcacagcggtgacccgaagagacagcctgaggtccgtcctcactcactgtgtttgaggaactgagggccagctggcagtgggatgaggctggccccctcctccgctttacttcctggaggccttccgtagagctgtgggagctggagctggcatttcgtttgaggcaggatctggtccgggaggtctgggatctctggttatatctcacttctgacctctgggcacgtgctgcagctgtggctgaggccaagaaatgtgaggggcctccatccactgcattgagtagtgaccccgacgtgg

SEQ ID NO: 2782 - DNA, 596 bp, Homo sapiens
agctgtagaggggacctctgcagcagatgctaggggggccagtaggcccagggagtcttgggacttgggtctgtcctgctgtgcatccatagtgggtgctttagaaacgggaggcccacccgaagcccctgttgcaagtgaggacaaagtgtgggaaggccgtgagggtctgcagtccgagatggccttgtcctcaacgtgcagtgcactgttgatgtggggcctagaggcctgggatctgggggagccacccctgggggcaagtgtctgccctggtgctgtacctgccttgttttcacagcggtgacccgaagagacagcctgaggtccgtcctcactcactgtgtttgaggaactgtgggccagctggcagtgggatgaggctggccccctcctccgctttacttcctggaggccttccgtagagctgtgggagctggagctggcatttcgtttgaggcaggatctggtccgggaggtctgggatctctggttatatctcacttctgacctctgggcacgtgctgcagctgtggctgaggccaagaaatgtgaggggcctccatccactgcattgagtagcgaccccgacgtgg

SEQ ID NO: 2783 - DNA, 101 bp, Homo sapiens
agggtggcagaggtgggaggacagcttgagcccaggagtttgagatctgcctgggcaacatagtgagaccccgttacccacaaaaaggaaaaggaaaaaac

SEQ ID NO: 2784 - DNA, 679 bp, Homo sapiens
atgttacagaccattttggagcatggtgaataacaaatttttaccttaggagttcacttgaatagtcgtttttatatttgtgactgcaagtcacttttaggggctgtacttccttagtactggtagcattattatccaatggacttttatagctttcattaggttttcttttgtttttgttctttaaagaacattttacttatcttagtatttcatttttcatctatattatgaggcagtaagagtcttctgtttttccaaagtggagactgctttatatttatttcatattgtctacagctgtagtgttcaatacagtagccactggccacatggggttatttaaataagatgaaataaaaattggccgggcgcggtggctcacgcctgtaatcccagcactttgggaggccgaggcgggcagatcatgaggtcaggaggtcgagaccatccttaataagacggtgaaaccccatctctattaaaaataccaaaaattagctgggcgtggtggcgggcacctgcagtcccagctactcaggaggctgaggcaggagaatggcttgaacctgggaggcagagtttgcagtgagccgagatggcgccactgcactccagcctgggggacagagcgagactccttctcaaaaaaaaaataaaaaaaaattaaaaaaaataa

SEQ ID NO: 2785 - DNA, 659 bp, Homo sapiens
atattacagaccattttggagcatggtgaataacaaatttttaccttaggagttcacttgaatagtcgtttttatatttgtgactgcaagtcacttttaggggctgtacttccttagtactggtagcattattatccaatggacttttatagctttcattaggttttcttttgtttttgttcttttatgaacatttacttatctcagtatttcatttttcatcatatattgatgaggcagtaagagtctgctgtttttccaaagtgaagactgctttatatttatttcatagtgtgaacagctgtagtgttcaatacagtagccactggccacatggggtgatttaagatgaaataaaaattggccgggcgtggtggctcacgcctgtaatcccagcactttgggaggccgaggcgggcagatcatgaggtcaggagatcgagaccatccttaataagatggtgaaaccccatctctattaaaaatacaaaaaattagctgggcgtggtggcaggcacctgcagtcccagctactcaggaggctgaggcaggagaatggcttgaacctgggaggcagagtttgcagtgagccgagatggcgccactgcactccagcctgggggacagagcgagactccttctcaaaaaaaaataaaaaa

SEQ ID NO: 2786 - DNA, 116 bp, Homo sapiens
agtagagacggggttttaccatgttagccaggatgatctcgatctcctgacctcatgatccacccgcctcggcctcccaaagtgctgggattacaggcatgagccaccgcgcccgg

SEQ ID NO: 2787 - DNA, 596 bp, Homo sapiens
agctgtagaggagacctctgcagcagatgctaggggggccagtaggcccaggcagtcttgggacttgggtctgtcctgctgtgcatccatagtgggtgctttagaaacgggaggcccacccgaagcccctgttgcaagtgaggacaaagtgtgggaaggccgtgagggtctgcagtccgagatggccttgtcctcaacgtgcagtgcactgttgatgcggggcctagaggcctgggatctgggggagccacccctgggggcgagtgtctgccctggtgctgtacctgccttgttttcacagcggtgacccgaagagacagcctgaggtccgtcctcactcactgtgtttgaggaactgtgggccagctggcagtgggatgaggctggccccctcctccgctttacttcctggaggccttccatagagctgtgggagctggagctggcatttcgtttgaggcaggatctggtccgggaggtctgggatctctggttatatctcacttctgacctctgggcacgtgctgcagctgtggctgaggccaagaaatgtgaggggcctccatccactgcattgagtagcgaccccgacgtgg

SEQ ID NO: 2788 - DNA, 213 bp, Homo sapiens; identical to SEQ ID NO: 2779

SEQ ID NO: 2789 - DNA, 664 bp, Homo sapiens
atattacagaccattttggagcatggtgaataacaaatttttaccttaggagttcacttgaatagtcatttttatatttgtgactgcaagtcacttttaggggctgtacttccttagtactggtagcattattatccaatggacttttaaagctttcattaggttttcttttgtttttgttctttaaagaacattttacttaacttagtatttcatttttcatctatattatgaggcagtaagagtcttctgtttttccaaagttgagactgctttatatttatttcatattgtctacagctgtagtgttcaatacattagccactagccacatgtggttatttaaatacgataaaataaaaactggccggtcgtggtggctcacgcctgtaatcccagcactttgggaggccgaggcgggcagatcatgaggtcaggagatcgagaccatccttactaagatggtgaaaccccatctctattaaaaatacaaaaaattagccgggcgtggtggcgggcgcctgcagtcccagctactcaggaggctgaggcaggagaatggcgtgaacctgggaggcagagtttgcagtgagccgagatggtgccactgcactccagcctgggggacagagcgagactccatctcaaaaaaaaaaaaaaaaaa

SEQ ID NO: 2790 - DNA, 213 bp, Homo sapiens
gaactttctgcttgtgtattctctctgggcagagatgccacttcgctcccccaccatgccatctctgaagaatattacagaccattttggagcatggtgaataagaaattttcaccttaggagttcacttgaatagtcatttttatatttgtgactgcaagtcactcttaggggctgtactttcttagtactggtagcattattatccaatgg

SEQ ID NO: 2791 - DNA, 11469 bp, Homo sapiens
ttttttttttttttttttttttttgagacagagtctcgctctgtctgtcacccaggctggagtgcagtggcacaatctcggctctctacaagctccgcctcctgggttcacgccattctcctgcgtcagcctcctgagtagctgggactaaagcgcccgccactgcgcccggctaattttttgtatttttagtagagacggggttttaccatgttagccaggatgatctcgatctcctgacctcgtgatccacccgcctcggcctcccaaagtgctgggattataggcatgagccaccgcgcccggcctatcatatgaattttgagggaacacaaacatgcagtctgtagcagatggtaataggctgatatattacacttgttgatgtaaatctgataggtttctttctctccaagggcagctttttaaatatttaacaataccaataatttttcaggttctgtgagaattttataatttataatttgcaaacttaaaataatctataatcttattttgtcctaacaattacaaatatattttttatttcagattatatatattcctaccagatggagataattacagctttaaaaatttttattttttcattttatttcacatattgacattaaatttttattggcacataataattgtacatatatacggggtacaatgtgatgttttaatacacgtactcaatgtgtaatgatccaatcagggtaatttgcataatgatttttctgtagggagaaaattcaaaatctactcttctggctattttcaaatatatgatacgttattgttaactatactcatcctactatgcaataggacaccagaacttattcctgggttctacatctgtttattaagccaaccaaggattggaaatattggaaaaagaaattgcgtctgtactgaacatgtacagacttttttcttctccttattccttacacaatatagtacaataactatttgcatgacatttacatcggatattatgagtgatctagagttgatatgaagtatatgggaggatgtgcaaaggtgatgtgcaaatactatgtcattttatatcagggacttgagtatcctttgttatcctcaggagatcctgaaactagtcccccatggatactgagggctgactgtatagtcctatcctcacggaactttcattctaatgagggaagactgactataaacaaaatatacgtaataggtggtggtaagtaccgtggagaagtaacaaatggggcaaagtgagttatacagctccattcttagaaaccttggagtacttttcttagtttatactcgtggtggtttccttttgtctcctttattacatgggactctgacatgtgcccatagctagggtggcagtaggatctacccgatagtagggtggcagtaggatctacccgaaaagcatcctgctgatacaggaccaaagcatcctgttgttctcgagcctataaaaagagctaatggtcttgcttctcttaactgtggcctcctacactgtgttttggatgattggtgatgtcttggatattctgtttctttggaactttgaatatacaacactttactagggaagtagcaatggaagcagagcaaagatgtacagaggaaacaatgcataactctgatggaattgaagtcatgaggcagcagaaagcttaaattgcagctttaaaaatttttattttttagagggaatttaattgggagtaacagcagtaatagttaacggagccagaatgcttgagtcatataattgcaaagcagagttgggagcaacagatgctaaagagtagttgctgtagttcctctttgggtcgtaggagcagttgtcatattaccatatagctactgaatgaagaagagttcttagtgaggcctgggtgaacagctcttcttagtattctgtgtgaccccatttgaccttttaacaaatctctaagtaaataaatagcccctaaggtaaactaagtttttctctgctatttttttgcttgagagagctataactgtaatagacttatatttctgaacattttagtgcttgccaatatttggtaatatttatgtttcctatatttgtaatgaacattcttcttccagtacattttttgttaaattattgtttcatgcataaaagttcaccttttattgtataaaattgactcagattaatttatacacattgacaatgggtaaatagaatttttcagattattaaaagctgaaggatgcccatgtaagcaaaaaaaaaaacaaaaaaaaacccaacaaaaataaacccaaaccgctcaaacaatttcgaacacaaaacattcttctcatgccggcatccctgcttgcagctgggaagggggcaggaatcagcgaggtgacctgggctgagtcccgggagtgggaagaggtggcaggaaagggatctgaggaggagaacaggggtcctggtggtctgtgcttcttcccagacacgggagctgtagaggggacctctgcagcagatgctaggggggccactaggcccaggcagtcttgggacttgggtctgtcctgctgtgcatccatagtgggtgctttagaaacgggaggcccaccagaagcccctgttgcaagtgaggacagtgtgggaaggccgtgagggtctgcagtccgagatggccttgtcctcaacgtgcagtgcactgttgatgcggggcctagaggcctgggatcacggggagccacccctgggggtgagtgtctgccctggtgctgtatctgccgccttttcacaccgggtgtgacccgaagagacagcctgaggtccgtcctcactcactgtctttgaggaactgagggccagctggcagcgggatgaggctgacaccctcctccgctttagttccgggaggccttccgtagagctgtgggagctcgagctggcatttcgtttgcggcacgatctggtccgggaggtctgggatctctggttacatctcacttctgacctctgggcacctactgcagctgtggctgaggcccagaaatgtgaagggcctccatccactgccttgagtagtgaccccgacgtggggttcaatgtggaggggggaggggctgccgcggcagctgcaggagccgacgtgccaggccttgttcttctcatgccggcatccatgcttgcagctgtgaagggcgcaggaatcagcgaggtgacctgggctgagtcccgggagtgggaagaggtggcaggaaagggatctgaggaggagaacaggggtcctggtggtctttgtttcttcccagacacgggagctgtagaggggacctctgcagcagatgctagggggggccactaggcccaggcagtcttgggacttgggtctgtcctgctgtgcatccatagtgggtgctttagaaacgggaggcccaccagaagcccctgttgcaagtgaggacagagtgtgggaaggccgtgagggtctgcagtccgagatggccttgtcctcaacatgcagtgcactgttgatgcggggcctagaggcctgggatctgggggagccactcctgggggcgagtgtctgccctggtgctgtatctgccttattttcacaccgggtgtgacccgaagagacagcctgaggtccatcctcactcactgtctttgaggaattgagggccagctggcagcaggatgaggctggccccctcctccgctttagttccgggaggccttccatagaactgtgggagcttgagctggcctttcgtttgcggcacgatctggtccgggaggtctgggatctctggttatatctcacttctgacctctgggcacctgctgcagctgtggctgaggcccagaaatgtgaagggcctccatccactgccttgagtagtgaccccgacgtggggttcaatgtggaggggggaggggctgccgcggcagctgcaggagccgacgtgccaggccttgttcttctcatgccggcatccatgcttgcagctgtgaagggcgcaggaatcagcgaggtgacctgggctgagtcccgggagtgggaagaggtggcaggaaagggatctgaggaggagaacaggggtcctggtggtctgtgcttcttcccagacacgggagctgtagaggggacctctgcagcagatgcaaggggggccactaggcccaggcagtcttgggacttgggtctgtcctgctgtgcatccatagtgggtgctttagaaacgggaggcccaccagaagcccctgttgcaagtgaggacagtgtgggaaggccgtgagggtctgcagtccgagatggccttgtcctcaacgtgcagtgcactgttgatgcggggcctagaggcctgggatcacggggagccacccctgggggtgagtgtctgccctggtgctgtatctgccgccttttcacaccgggtgtgacccgaagagacagcctgaggtccgtcctaactcactgtctttgaggaaccgagggccagctggcagcgggatgaggctgacaccctcctccgctttagttctgggaggccttccggagagctgtgggagctcgagctggcctttcgtttgcggcacaatctggtccgggaggtctgggatctatgggtatatctcacttctgacctctgggcacctgctgcagctgtggctgaggcccagaaatgtgaagggcctccatccactgccttgagtagtgaccccgacgtggggttcaatgtggaggggggaggggctgccgcggcagctgcaggagccgacgtgccaggccttgttcttctcatgccggcatccatgcttgcagctgtgaagggcgcaggaatcagcgaggtgacctgggctgagtcccgggagtgggaagaggtggcaggaaggggatctgaggaggagaacaggggtcctggtggtctgtgcttcttcccagacatgggagctgtagaggggacctctgcagcagatgcaaggggggccactaggcccaggcagtcttgggacttgggtctgtcctgctgtgcatccatagtgggtgctttagaaacaggaggcccaccagaagcccctgttgcaagtgaggacagagtgtgggaaggccatgagggtctgcagtccgagatggccttgtcctcaacctgcagcgcactgttgatccgctggaatgccgcctctttttccaggtgcaggtcttcagccgtgacccggtaccccagctctaagggaggtggcagcatcaaaggctcccctcgcctgcgtggcagcagggcaatcttgcgtctacggggcctagaggcctgggatctgggggagccaccccttggggcaagtgtctgccctggtgctgtatctgccgccttttcacaccgtgtgtgacccgaagagacagcctgaggcctgtcctcactcactgtctttgagtaactgagggtcagctggcagcgggatgaggctggccccctcctctgctttagccccggcaagcctcccgtggagctgtaggagctggagatggcatttcgtttggtgctcgagctcgtccaggaggtctgggatgtctgattatatctgatttctgagctctgggcatggaggtctgtctgcagaggcccgggcctgggcgcaaagggagagaggcctccattgtaccgcaggggccgaactgtagaccgtgcatccccggtgacctcggggaccgttctctgatcatcaggattttcttggactctggggtccttgtcctgctcaggcatccctgccccgctgttttgctccgctggccccctcctccactttagccccagcaagcctcccgcggagctgtaggagctggagatggcattttggttggtgcacgagctcgtccaggtggtctgggatgtctggttggatctgatttctgacctctgggcatggaggtatgtctgcagaggcccgggactgggcacaaagggaaagaggactccagtgtcccgcaggggccaaaatgcagaccgtgcatccccggtgacctcggggactcttctctgatcatcaggattcttttggactctagggtccttgtcctgcccaggcatccctgccccgctctccttgagggccctcgacactatcttccctggaaacaagtctggggacagctgggtgttgtggaccccaaaggggtgactacctgctcctgggccccacagagtccttgtgctcagtgtagtggctgagctgggggatgccctggaactcggagcacacagcactggcttactgtggtacctgtgcagtgaaattgaaggcagaatcaccaggatggaacacaggtcttgcaggatcacggaaaaccttcttagagttgtcttgacaccactgatgtcgagtgtccgggtgcttgtaggatggcctgccactcagtccaggggcaggagcaacggggagatcccacaagcaaagtgaactgggggatgggctgaaggggctccaggcaactgagccctactcgcaggtcctcggccttggcccaaacaggaatgaggggcacagagtgcccgggtaaccgctcctgggagcagtggggaaccgtcggatgcttgaactctcgagagctgggctctgagcgtcctcgtccagctgccaactcggccaaaggctaagccagcagattcttctgttgccgggcaacgcaccttctaaacctgagggagtgggcgcgtgagcacataatggcaccagtgacagagcgaccataatggattaataagcgcagccaggtacccgcgcaaggcacttgctggcaatggcaggaggcggacgtgggggggtcgtgcaataggtactggagggagagacgcgggcacaaaggtcacgggaggaacaggtgcccacaatggctgcagatctgcccgtggatcactgaagattcctgctctcctgctgaggtggagactgcagtgagctgagatcgcaccattgcactccagcctgggcaacgagtgcaaaactgagtctccagataaaaaaaagaaaaagaaaaaaaagaggccgggtgtggtggcttatgcctataatcctagcactttgggaggtcggggtggacggatcacgagatcaggagttggagtccagcctggccaacatagtgaaaccccgtctctagtaaaaatacaaaatttagtcagacatggtgggcaggagagagcacgtgcaggggagctcccatttataaaaccatcagatctcatgagacttattcactaccatgagaacagcatgggggaaactgcctccatgattcaattatctccacctggccccacccttgacacatgggaattgttacaattcaagatgagatttgggtggggacagagccaaaccatataattcttccccggcccctcccaaatctcatgtcctcacatttcaaaagcaatcatgccttccccaatgtcccccaaactcttatttcagcattaactcaaaattccatagtccaaagtctcatctgagacaaggcaagtcccttccacctatgagcctgtaaaatcaaaagcaagtgagttattttctagatacacagggatacaggcattgggtaaatacactcgtttcaaatgggagaaattggccaaagcgaaagagctacaggccccatgcaagtccaaaacccagcaggcaaatcttaaagctccaaaatgacctcctttgactccatgtgtcacatctaggtgatgcaagaagtgggttcccagggtcttgggcagccccgcccctgtggctttgcagggtacagccccccttctggctgcattgagtgtctgcagcttttccaggcacacagtgcaagctgtcagtggatctaccattctggggtctggaggatggtggcccttttctcacagctctgcttggcagtaccccagtggggactctgtgtgggggctccaaccccatatttccctttgacactgccctaccagaggttatccatgagggccccccccccgcagcaaacttttgcctggatttccaggcattttcatacatcttctgaaatctaggcggaggttcatgaacgttaattcttgacttcggtgcatctgcaggcttaacaccgcctagaacctgaaaggcttggaacttgcaccctctgaagccatggcccgaggtgtaccttggccccttttacctatggcaggagcagctgggatgcagggcaccaagttcctgggctgcacacagcagggggttctggacccacaaaaccatttttccttctaagcctcctggcctgtgatgggagggtctgctgtgagggtctctaacatgccctggagacgtttgccccattgtcttggtgattaacatttggctcctcattacttatgcaaatttctacaacccagtctcctcagaaaatagacttttgttttctgttgcatcatcaggctacaaattttctgaacttttatgctctgcttcttctcgaatgctttgctgcttagaaatttcttctgtcagataccttaaatcatctctctcaagttcaaagttccacagatctctagggaactctagaaaaaaattcttattttcactctttcccgcctatcttatgcctgtttctaatacaggtgcacaatgcctgcagtgtctttgcatagtaagagtgactttactccgtttccccacaaattcctcatctccctctgagagaaccacctccgcctggaccttattgtccatatcactattaacattttggtcaaagccgttcaacaagtctctaggaagttccaaactttcccacattttcctatcctcttctgagccttccaaactgttccagcctctccctgttacccatttccaaagttgcttccacatttttgggtatctttacagcagcaccccactctactggtaccaacttattgtattagtctgttctgacactgcaaataaagacatacctgagactgggtaatttataaaggaaagaggttgaattgactcacagttctgcgtggctggggaggcctcacaatcatggtggaaggcaaggaggtgcaaaagcatgtctcccatagtggcaggcaggagagagcatgtgcaggggaactcccatttataaaaccatcagatctcatgagacttattcactactacgagaacagtatggggggaaccatccccatgattcagttatctgcacccggccccacccttgacacgtgggaattattacaatgcaaggtgagatttgggtggggacacatccaaactatatcagtaggttttgacttcttgcttgattgctaggttgcatagaggacaaacatggaaattaatgaagtaccttaatatctggcttcagatcttagacaggatcagagggccagctcaaatttgcaaggaggggaggtagatcccaccattttatgggtgaatggcaaaatcaaacagaaattatgtgggatgggagatagtgatgcaggcatctttggaaacattctacttagctaattttatgctaggctttaggtcaagaaggagagagagagctgacatgctgtggtacacacttatagtcccagctacttggaaagctgaggcaggaggattgcttgatcccaggagtttgaggttgtgtgcgatgatcgttcttgtgaatagccactagccactgaactccagcttggacaacattgagacaccctgtctcttaatttaaagaaaaaaaaaaaaaaaggaggacagaaagtggtctcagtttttaatgtaaatatttttaatgggatgatgatattttaagattaatgtatattgtatatcagttaactataggtcaataattatataaaacttaaggtacgaaaaacatttatttttgcgaacatatctgtgagttgactgttcttggcttggtgaggctgcaagctgcagatagagtctaggtatgttttctgtgtgtttgttcccccttggatcagtggactacctgagaatgtgttttttgtcacagtggtagaatcacaaggaaactccagttctggaagtacattttaagcctttgcttctatcatgtccactgacattcagtcagccaaagcacataccttgtccatggctaacattgatagtatagataaatatacctgacctctagcaggaggaactgcattgtcttggggaaaggttgtagatatagggaggggtgatgagttgggaacaataatgtagtctgctacaaatatattaaagtgtaactggatatggttgatgcagaattttgaacctttgttttaattctgatttttactcttttccccctatctagtgcccttttgtaatacagtaattctcatgatttttgtctgaattgaaatcttctatgagattagattgtctacgaaaatacagtcaatcctccttgttttcagcttttgtatttgtgaactcacctactattttttgtaacccccaaatcagtactcacagcactttcatagtcacgtgtttgcatagagtgtcaaagaatttgagtttgaacaggatgatattctgccttctttttcagctctcatacaatagtcaggtatcctttttgtggtctatttaatgccatgcttttcctatttttgtactgtttgttggttgttttgccatttaaattaacccccaagcatagtgctgaagtgctgcttagcattcacaagtccaagaagtctgtgatgtgccttacagagaaaatacatgcattaaataaactccattcaggcgtgagtgctgtggtgccattggctgtgagttcaatgttaatgaatgaacaatgtatattatttatttattcattcatttaattaattattattattattttttgagatagagtctcactctgttgctcaggctggagtgcagtggtgcagtcttggctgactgcaacctctgcctcctgggttcaagcgattcccctgccttagcctcccaagtagctaagactacaggcatgcgccaccatgcctggctaatttttttttttttttgtagttttagtagagacggggtttcaccacgttggccaggctggtctcgaactccagacctcaaatgatctgcccgccttggcttcccaaagtgctgggattacaggcgttagccactgtgcctggccaacaatatatattaaataagcacccatacaacaaaagtaggtgttggtaagcttacaaaaatgtgaccagtagcttgctgaaacctaactttttatttgttcatggaactttctagaccgtaactacactgaataatgagaatctgctgtaacctttttaggtgctgtagatgagccattggattaaattattacagtatgtttcagactgctctatgttgaaccctagtgaaatgcctctcagaccctcataaggatcacaatctcatgtccttttttt

SEQ ID NO: 2792 - DNA, 672 bp, Homo sapiens
atattacagaccattttggagcatggtgaataacaaatttttactttaggagttcacttgaatagtcatttttatatttgtgactgcaagtcacttttaggggctgtacttcgttagtactggtagcattattatccaatggacttttatagctttcattaggttttcttttgtttttgttctttaaagaacattttactcaacttagtatttcatttttcatctatattatgaggcagtaagagtcttctgtttttccaaagttgagactgctttatatttatttgatattgtctacggctgtggtgttcaatacattagccactagccacatgtggttatttaaataagataaaataaaaattggccaggcgtggtggctcacgcctgtaatcccagcactttgggaggccgaggcgggcagatcatgaggtcaggagatcgagaccatccttactaagacggtgaaaccccatctctactaaaaatacaaaaaattagccgggcgtggtggcgggcgcctgcagtcccagctactcaggaggctgaggcaggagaatggcgtgaacctgggaggcagagtttgcagtgagccgagatggcgccactgcactccagcctgggggacagagcgagactccatctcaaaaaaaaaaaaaaaaaattattaag

SEQ ID NO: 2793 - DNA, 11071 bp, Homo sapiens
ttttttttttttttttgagacagagtctcgctctgtcacccaggctggagtgcagtggcacaatctcggctctctacaagctccgcctcctgggttcacgccattctcctgcgtcagcctcctcagtagctgggactaaggcgcccgccactgcgcccggctaattttttgtatttttagtagagacggggttttaccatgttagccaggatgatctcgatctcctgacctcgtgatccacccgcctcggcctcccaaagtgctgggattacaggcatgagccaccgcgcccggcctatcatatgaattttgagggaacacaaacatgcagtctgtagcagatggtaataggctgatatattacacttgttgatgtaaatctgataggtttctttctctccaacgacagctttttaaatatttaacagtatcaataatttttcagtttctgtgagaattttataatttgtaatttgcagattaatgtataatctattttgtcctaacaattacaaatatattttttatttcagattatatatattcctaccagatggagatgattacagctttaaaaatttttattttttcattttatttcacatattgacattaaatttttatggacacataataattgtacatatatatggggtacaatgtgatgttttaatacatgtactcaatgtgtaatgatcaaatcagggtaatttgcataatgatttttctgtagggagaaaattcaaaatctactcttctggctattttcaaatatataatatgttattgttaactatactcatcctactatgcaataggacaccagaacttattcctgggttctacatctgttaagccaaccaaggattggaaatattggaaaaaaaaattgcgtctgtactgaacatgtaaagacttttttcttgtccttattccttacacaatatagtacaataactatttgcatgacatttacatcggatattatgagtgatctagagttgatatgaagtatatgggaggatgtgcaaaggtgatgtgcaaatactatgtcattttatatcagggacttgagtatcctttgttatcctcaggagatcctgaaactagtcccccatggatactgagggctgactgtatattcctatcctcacggaactttcattctaatgggggaagactgactataaacaaaatatatgtaataggtggtggtaagtaccgtggagaagtaacaaatggggcaaagtgagttatacagctccattcttagaaaccttggagtacttttcttagtttatactcgtggtggtttccttttgtctcctttattacatgggactctgacatgtgcccatagctagggtggcagtaggatctacccgaaaagcgtcctgctgatacaggaccaaagcatcctgttgttctcgagcctataaaaagagctaatggtcttgcttctcttaactgtggcctcctacactgtgttttggatgattggtgatgtcttggatattctgtttctttggaactttgaatatacaacactttactagggaattagcaatggaagcagagcaaagatgtacagaggaaacaatgcataactctgatggaattgaagtcatgaggcagcagagagcttaaattagagctttaaaaatttttattttttagagggaatttaattgggagtaacagcagtaatagttaacggagccagaatgcttgagtcatataattgcaaagcagagttgggagcaacagatgctaaagagtagttgctgtagttcctctttgggtcgtaggagcagttgtcatgttactatacagctactgaatgaagaagagttcttagtgaggcctgggtgaacagctcttcttagtattctgtgtgaccccattcgaccttttaacaaatccctaagtaaataaatagcccctaaggtaaactaagtttttctctgctgtttttttgcttgagagagctataactgtaatagacttatatttctgaacattttagtgcttgccaatatttggtaatatttatgtttcctatatttgtaatgaacattcttcttcaggtacattttttgttaaattattgtttcatgcataaaagttcaccttttattgtataaaattgactcagattaatttatacacattgacaatgggtaaatagagtttttcagattattaaaagctgaaggatgcccatgtaagcaaaaaaaaaagagaaaaaaccaacaaaaataaacccaaacccctcaaacaatttcgaacacaaaacattcttctcacgccggcatccctgcttgcaggtgtgaagggggcaggaatcagcgaggtgtcctgggctgagtccccggagtgggaagaggtggccggaaggggatctgaggaggagaacaggggtcctggtggtctgtgcttcttcccagacacgggagctgtagaggagacctctgcagcagatgctaggggggccactaggcccaggcagtcttgggacttgggtctgtcctgctgtgcatccatagtgggtgctttagaaacgggaggcccacccgaagcccctgttgcaagtgaggacaaagtgtgggaaggccgtgagggtctgcagtccgagatggccttgtcctcaacgtgcagtgcactgttgatgcggggcctagaggcctgggatctgggggagccacccctgggggcgagtgtctgccctggtgctgtatctgccttttcacagcgggtgtcacgcgaagagacagcctgaggtccgtcctcactcactgtgtttgaggaactgagggccagctggcagtgggatgaggctggccccctcctccgctttagttcctggaggccttccgtagagctgtgggagctggagctggcatttcgtttgaggcaggatctggtccgggaggtctgggatctctggttatatctcacttgtgacctccgggcacgtgctgcagctgtggctgaggccaagaaatgtgaggggccttcatccactgcattgagtagtgaccccgacgtggggttcaatgtggaggggggaggggctgctgcggcagctgcaggagccgaggtgccaggccttgttcttctcatgctggcatccctgcttgcagctgtgaagggggcaggaatcatcgaggtgacctgggctgagtcctgggagtgggaagaggtggcaggaaggggatctgaggaggagaacaggggtcctggtggtctgtgcttcttcccagacatgggagctgtagaggagacctctgtagcagatgctagggcggccactaggcccaggcagtcttgggacttgagtttgtccggctgtgcatccatagtgggtgctttagaaacgggaggcccacccgaagcccctgttgcaagtgaggacaaagtgtgggaaggccgtgagggtctgcagtccgaggtggccttgtcctcaacgtgcagtgcactgttgatgcggggcctagaggcctgggatctgggggagccacccctgggggcgagtgtctgccctggtgctgtatctgccttttcacagcgggtgtgacgcgaagagacagcctgaggtccgtcctcactcactgtgtttgaggaactgagggccagctggcagtgtgatgaggctggccccctcctccgctttagttcctggaggccttccgtagagctgtgggagctggagctggcatttcgtttgaggcagtatctggttcgggaggtctgggatctctggttatatctcacttgtgacctccgggcacgtgctgcagctgtggctgaggccaagaaatgtgaggggcctccatccactgcattgagtagtgaccccgacgtggggttcaatgtggaggggggaggggctgctgcggcagctgcaggagccgaccttgttcttctcatgccggcatccctgcttgcagctgtgaagggggcaggaatcatcgaggtgacctgggctgagtcccgggagtgggaagaggtggcaggaaggggatctgaggaggagaacaggggtcctggtggtctgtgtttcttcccagacacgggagctgtagaggggagctctgcagcagatgctaggggggccagtaggcccaggcagtcttgggacttgggtctgtcctgctgtgcatccatagtgggtgctttagaaacgggaggcccacgcgaagcccctgttgcaagtgaggacaaagtgtgggaaggccgcgagggtcggcagtccgagatggccttgtcctcaacgtgcagtgcactgttgatgtggggcctagaggcctgggatctgggggagccacccctgggggcgagtgtctgccctggtgctgtatctgccctcttttcacagcgggtgtgacccgaagagacagcctgaggtccgtcctcactcactgtctttgaggaactgtgggccagctggcagtgggatgaggctggccccctcctccgctttagttccgggaggccttccgtagagctgtgggagctggagctggcatttcgtttgaggcaggatctggtccgggagatctgggatctctggttgtatctcacttctgacctctgggcacgtgctgcagctgtggctgaggccaagaaatgtgaggggcctccatccactgcattgagtagtgaccccgacgtggggttcaatgtggaggggggaggggctgctgcggcagctgcaggggccgaccttgttcttctcatgccggcatccctgcttgcagctgtgaagggggcaggaatcatcgaggtgacctgggctgagtcccgggagtgggaagaggtggcaggaaggggatctgaggaggagaacaggggtcctggtggtctctgcttcttcccagacacgggagctgtagaggagacctctgcagcagatgctaggggggccactaggcccaggcagtcttgggacttgggtctgtcctgctgtgcatccatagtgggtgctttagaaacgggaggcccacccgaagcccctgttgcaagtgaggacaaagtgtgggaaggccgtgagggtctgcagtccgagatggccttgtcctcaacgtgcagtgcactgttgatgcgctggaatgccgcctgtttttccaggtgcaggtcttcagccgtgacccggtaccccagctctaagggaggtggcatcatcaaaggctcccctcgcctgcttggcagcaggggaatcttgcgtctacggggcctagaggcctgggatctgggggagccacccctgggggcgagtgtctgccctggtgctgtatctgccgccttttcacaccgtgtgtgacccgaagagacagcctgaggcctgtcctcactcactgtctttgagtaactgagggtcagctggcagcgggatgaggctggtcccctcctctgctttagccccggcaagcctcccgtggagctgtaggagctggagatagcatttcgtttggtgctcgagctcgtccaggatgtctgggatgtctggttatatctgatttctgagctctgggcatggaggtctgtctgcagaggcccgggcctgggcacaaagggagagaggcctccattgtcccgcaggggccaaaatgcagaccgtgcatccccggtgacctcggggaccgttctgtgatcatcaggattttcttggactctggggtccttgtcctgctcaggcatccctgccctgctctccttgagggccctcaacactatcttccctggacacaagtctggggacagccgggtgttgaggagcccaaaggggtgactacctgctcctgggccccacagagtccttgtgctgagtgtagtggctgagctgggggatgccctggaattcggagcacacagcactggcttactgtggtacctgtgcagtgaaattgaagagagaatcaccaggatggaacacaggtcttgcaggatcacggaaaaccttcttagagttgtcttgacaccactgatgtcgagtgtccgggtgtttgtaggatggcctgccactcagtccaggggcaggagcaacggggagatcccacaagcaaagtgaactgggcgatgggctgaaggggctccaggcaactgagccctactcgcaggtcctcggccttggcccaaacaggaatgaggggcacagagtgcccgggtaaccgctcctgggagcagtggggaactgtcggatacttgaactctcgagagctgggctctgagcgtcctcgtccagctgccaacttggccaaaggctaagccagcagattgttctgttgccgggcgacgcgacttctaaacctgagggagtgggcacgtgagcacataatggcaccagtgacagagcgaccataatggattaataagcgcagccaggtacccgcgcaaggcacttgctggcaatggcaggaggcggacgtggggggtcgtgcaataggtactggagggagagacgtgggcacaaaggtcgcgggaggaacaggtgcccacaatggctgcagatctgcccgtggatcactgaagattcctgctctcctgctgaggtggagactgcagtgagctgagatcgcaccattgcactccagcctgggcaacgagtgcaaaactcagtctccagataaaaaaaaagaaaaagaaaaaaaagaggccgggtgtggtggcttatgcctataatcctagcactttgggaggtcggggtggacggatcacgagatcaggagttggaggccagcctggccaacatagtgaaaccccgtctctagtaaaaatacaaaatttagtcagacatggtgggcaggagagagcatgtgcaggggaacatccatttataaaaccatcagacctcatgagacttattcactaccatgagaacagcatgggggaaactgcctccatgattcagttatctccacctggccccacccttgacacatgggaattgttacaattcaagatgagatttgggtggggacagagccaaaccatataattcttccccggcccctcccaaatctcatgtcctcatatttcaaaagcaatcgtgccttcccctaagtcccccaaactcttatttcagcattaactcaaaattccatagtccaaagtctcatctgagacaaggcaagtcccttccacctgtgagcctgtaaaaccaaaagcaagttagttattttctagatacacagggatacaggcattgggtaaatacactcgtttcaaatgggagaaattggccaaagcgaaagagctacaggccccatgcaagtccaaaacccagcaggcaaatcttagagctccaaaatgacctcctttgactccatgtgtcacatctaggtgatgcaagaagtgggttcccagggtcttgggcagccccgcccctgtggctttgcagggtacggcccccccttctggctgcattgagtgtctgcagcttttccaggcacacagtgcaagctgtcagtggatctaccattccggggtctggaggatggtggcccctttgtgacagctctgcttggcagtaccccagtggggactctgtgtgggggctccaaccccatatttccctttgacactgccctagcagaggttatccatgagggccccccgctcccgtgcacagcaaacttgcctggatttccaggcattttcatacatcttctgaaatctaggcggaggttcatgaacgttaattcttcggtgcatctgcaggcttaacaccacctagaacctgaaaggcttggaacttgcaccctctgaagccatggcctgaggtgtaccttggccccttttacctgtggcaggagcagctgggatgcagggcaccaggttcctaggctgcacacagcagggggttctggactcacaagagcatttttccttctaagcctcctggcctgtgatgggagggtctgctgtgagggtctctaacatgccctggagacatttgccccattgtcttggtgattaacatttggctcctcattacttatgcaaatttctacaacccagtctcctgagaaaatagatttttcttttctgttgcatcatcaggctacaaattttctgaacttttatgctctgcttcttctcgaatgctttgctgcttagaaatttcttctgtcagataccttaaatcatctctctcaagttcaaagttccacagatctctagggaactctagaaaaaaattcttattttgactctttcccgcctatcttatgcccgtttctaatacaggtgcacagtgcctgcagtgtctttgcatagtaagagtgactttactccatttcccaacaaattcctcatctccctctgagaccacctccgcctggaccttattgtccatatcactattaacattttggtcaaagccattcaacaagtctctaggaagttccaaactttcccacattttcctatcctcttctgagccttccaaactgttccagcctctccctgttacccatttccaaagttgcttccacattttcgggtatctttacagcagcagcccactctactggtatcaacttattgtattagtctgttctcacactgcaaataaagacatacctgagactgggtaatttataaaggaaagaggttgaattgactcacagttctgcatggctggggaggcctcacaatcatggtggaaggcaaggaggtgcaaaagcatgtctcacatagtggcaaggcaggagagagcatgtgcaggggagctcccatttataaaaccatcagatctcatgagacttagtcactaccacgagaacagtatggggggaaccatccccatgattcagttatctgcacctggccccacccttgacacgtgggaattattccaatgcaaggtgagatttgggtggggacccatccaaactatgtcagtatgttttgacttctggcttgattgctaggttgcatagaggacaaacatggaaattaatgaagtaccttaatatctggcttcagatcttagacaggatcagagggccagctcaaatttgcaaggaggggaggtagatcccaccattttatgggtgaatggcaaaatcaaacagaaattatgtgggatgggagatactgatgcaggcatctttggaaacattctacttagctaattttatgctaggctttaggtcaagaaggagagagagagctgacatgctgtggtacacacttatagtcccagcgacttggaaagctgaggcaggaggattgcttgatcccaggagtttgaggtagtgtgcgatgatcgttcttgtgaatagccactagccactgaactccagcttgggcaacattgagacaccctgtctcttaattttaaaaaaaaaaaaaaaaaaaaaaaggaggaaagaaagtggtctcagtttttaatgtaaatatttttaatgggataatgatattttaagattaatgtatattgtatatcagttaactataggtcaataattatataaaacttaaggtacgaaaaacatttatttttgctaacatatctgtgagttgactgttcctggcttggtgaggctgcgagctgcagatagagtctaggtatgttttctgtgtgtttgttcccccttggatcagtggactacctgagaatgtgtttttgtcacagtgatagaatcacaaggaaactccagttctggaagtacattttaagccattgcttctatcatgtccactaacattcagtcagccaaagcacataccttgtccatggctaacattgatagtatagataaatatacctgatctctagcaggaggaactgcattgtcttggggaaaggttttagatatagggaggggtgatgagttgggaacaataatgtagtctgccacaaacatattaaagtgtaactggatatggttgctgcagaattttgaacctttgttttaattgtgatttttactctttttcccctatctagtgcccttttgtaatacagtaattctcatgatttttgtctgaattgaaatcttctgagattagattgtctacgaaaatacagtctatcctccttgttttcagcttttgtatttgtgaactcacctactattttttgtaacccccaaatcagtactcacagcctttcatagtcatgtgtttgcgcagagtgtcaaaagaatttgagtttgaacaggatgatattctgccttctttttcagctctcatacaatagtcaggtatcctttttgtggtctatttaatgccatgcttttcctgtttttgtattgtttgttggttgttttgccatttaaattaacccccaagcatagtgctgaagtgctgcttagcattcacaagtccaagaagtctgtgatgtgtcttacagaggaaatacatgcattgaataaactccattcaggcgtgagtgctgtagtgccattggctgtgagttcaatgttaatgaatgaacaatgtatattatttatttattcttcatttaattaattattattattttttttgagatagagtctcactctgttgctcaggctggagtgcagtggtgcagtcttggctcactgcaacctctgcctcctgggttcaagcgattcccctgccttagcctcccaagtagctaagactacaggcatgcgccaccatgcctggctaatatatatatatattttttgtagttttagtagagacggggtttcaccacgttggccaggctggtctcgaactccagacctcaaatgatctgcccgccttggcttcccaaagtgctgggattacaggcattagccactgtgcctggccaacaatatatattaaataagcacacatacaacaaaagtaggtgttggtaagcttacaaaaatgtgaccagtagcttgctgaaacctaactttttatttgttcatggaactttctagaccgtaactacactgaataatgagaatctgctgtaatctttttaggtgctgtagatgagccattggattaaattattacagtatgtttcagactgctctatgttgaaccctagtgaaatgcctctcaaaccctcctaaggatcacaatctcatgtccttttttt

SEQ ID NO: 2794 - DNA, 104 bp, Homo sapiens
tttttgtatttttagtagagacggggttttaccatgttagccaggatgatctcaatctcctgacctcgtgatccacccgcctcggcctcccaaagtgctgggat

SEQ ID NO: 2795 - DNA, 664 bp, Homo sapiens; identical to SEQ ID NO: 2789

SEQ ID NO: 2796 - DNA, 403 bp, Homo sapiens
ctctgtctcaaaaaaaaaaaaagatacttcaggaagatttattgttaaacatagacagtataggggaaaaagagtactggttaccaatcactaaataacaaaatgtcctggcaagaagagtttctctctttctactccaatttcctcatctttaaaaatgatgcaaataatatttaagtttctttttttgtattctgggtgtgaatgacaaaaattaactttatgaacagagccatgatggtcttgttcattacataatgaatattgaaagaatgaatgaataaaaaaattaaaggactagctaaattccctgcttataaagtaatataatatagacatttaaaacataaagcagatatatatatacattcacatggaaagattgttcatagcctaatggtcg

SEQ ID NO: 2797 - DNA, 426 bp, Homo sapiens
cccgcacaggtgacagagcgagactctgtctcaaaaaaaaaaaaagattacttcaggaagatttattgttaaacatagacagtatagggaaaaagagtactggttaccaatcactaaataacaaaatgtcctggcaagaagagtttctctctttctactccaatttcctcatctttaaaaatgatgcaaataatatttaagtttctttttttgtattctgggtgtgaatgacaaaaattaactttatgaacagagccatgatggtcttgttcattacataatgaatattgaaagaatgaatgaataaaaaaattaaaggactagctaaattccctgcttataaagtaatataatatagacatttaaaacataaagcagatatatatatacattcacatggaaagattgttcatagcctaatggtcg

SEQ ID NO: 2798 - DNA, 1144 bp, Homo sapiens
cagaaatggttctgacatttgaagtaaatggcaaagtttactgactcctatgtcagttagtgataaaaaccaaagggaaaaacctacattccgggttactttgcagaacagtggtagattcttaggcctacaagggaggcatagactatactcaggagaaaagctgtttaataaataagattcaaggtgaggagtaggtagaaaagacagagttatttgattttcattttttaaggtattaaaattttttactttatatatgaaaatgtcatgaaatttataagcaataatgtattgatactcaaatttttaaaaatttttaaattttaaaatatttaatcaacttctattatttttcctcttctgggatgaattaagtggcaaacttggccattctaatatttactcactgatagccaaattttatagcgtctctatctaaagaagacagtaccagattccatttgatctagggagatagcactacaaaacttttttccttgaaaaaatattcctgaaggccggacgtggtggctcacgcctgtaatcccagcactttgggaggccaaggtgggcagatcacttgaggttagcagtttgagaacagcctggccaatatggtgaagccctgtctctactcagaatacaaaaattagccagatatggtggggtgtgcctgtaatcccagctacttgggaggctgaggcataagaatcagttgatcccaggaggtggaggttgccatgagctgagatcgtgccactgcactccagcctgggagacagagcaagactctgtctaaaaagaagaaagaaagaaaaaaagaaatattcctgagacattaactggatcccttggttgaaacagcagaggaagcagatttttgaacctgaagaaaaggcacatagaaaccaaaaaagttctcaacattattttacccccttgcagaagctagaatctcccagtttcagctgttttctcttctcccagcttcctaatgtacttactccctgagccagatattctccaactttggaagttcctcagaactcctgggaagcatgattacaaagtcagaattgtaagtagagggtggtcccagacagcaggctaccggaaccatcagacctcactggaagaaaca

SEQ ID NO: 2799 - DNA, 19183 bp, Homo sapiens
ggtgcacatgcgggaattgctgacagctgccgtacgagtcgggggagtgacgcatcttgtgggtccagtgacgatggtccttcagggaggacccaggttagttgtttctgttagtttatactgtcctttctagaatggtcagagccattcaaaagattattcttgggacccaaacataggcggtagtatttgctaatgttttcctctaaaatatttatataaaagtggtacatgatcttgcaaaaaactcaacatattaatagaacgtaaaactctcagtattcaccttcttctcctgaattccactctgtccattaagagctcattacagcaaccatacatgcataagcagctgtataattctttttgtacacataactgtgtttgtgtgtaaatttttttcaacttaattcagattatattatccatgcctttctataaccatggttgttttgctcagtatgtcttagatatctcagatatctgtgttttcatatcagcacatataggtctggtctgctttatcttttttttatttgacacagagtctcactctgtcaccaaggctggagtgcagcagcacgatcttggctcatggcagcctctgcctcccgggttcaagtgattctcgtgtctcaacctcccaagtagctgggattacaggcacatgccaccacacctggctaatttttatatttttagtagagatggggtttcaccatgttggccaggctggtctcaaactcccgacctcaggtgatctgcctgcctcggcccccccaaagtgctgtgattacaggcatgagccaccgtgcccagcctttttttttttttttaagcagattctcgttctgtcacccaggctggcatgcaatgacgtgatcatggctcactgcagccttgacctccccaggctcaagcgatcttcccacctcagcctcccaagtagctgggactataggcgcataccaccatgcccagctaatgtatttattttttgtagagatggggtcttgccatgttgcccaggctggtctcaaatttctgggctcaagggatcctcctgtctcagtctcccagactgctgggattaaaggcatgagccaccacacctggctgctttaagatttttaagagctcatagatatacattatatagatgaccttttctaaaaaaattaacacatcctctgctgacggacacataggttcatttgtctttattgcttttgtttttgctttgttttgtttttgcattaacaacctccttctgcctatatttttatacatttccataactgttattactgaaccaatttctaaaaatgtaatcatagatactaactctgaagatgattttataactcatttgtgagttgttctatatgagtttcctattgggcttcaaaaatcttcaaatagaaatagaaaatgcatttctctgcaagccctggactggagctgctggaggctgctgtgcttcctgacagttctttgaggaattctggccaacaggcagagagggttcagtggctggaggaaaatgggttaattaagagctgaagtgagtatcttgagaaatcttgagatcttcccacctcagccttccaagtagctgggagtacaggagaggtcagactattatttggaaacaagtccaaaatttaagtggcttaaaagacaaaattttgttgggcccagtgtctcacacctataatcccagcacttaaggaggccaaagcaggaggatcacttgaggctaggagttcaagaccagcctgggcaatatagtgagaccctgtctctacaaaaaggaaaaaattagccgtagtggtggggcatgcctgtggtcccagctactggagaagctgaggcaggaagatcgcttgaggccaggagcttgaggctgcagtaagctgtgatcgcaccaccctgcacttcagcctgggcaacagagcaaaaccttgtcacaaaaaatgaagaagacaaaattttaggtcttgcttctgttcatgatgggttcatgctggctcatggtaatcacagaagaggaaaccatcacctcaagagctgccaggctccttgtcagaactctggctcattgaccagacttgtcactgcccagccaaccacagggtgcccagaaagaaatagggaaaagccctaatgattaccacagcctatttccagaatttaatttctccataaaactggcagcactattccttttccctcgattattgtcatttgtcagaaacttgaaaaaaaaatgtagaaaatgccaaaaaatacaatgaaaatcacctacaagtacaccctcttaaaataacattctgttaacactttagtgtctgtgttctaactgtagatgtctcccgtagtgttcttagtggttctgtagctatatgcttgaaactttaacaaattccctatttttgaacattaggttagtttttcttgtttttgcttttataaacaatactatgttgcatgtctttgtagataaatcctgatagtttcagttctaaactaatattaattggtatagaatcggccctatgttgtgttttgcattgggaaagttttattttatatcaactaggctttcatcttctgctaataactgaagtgtgaactcaaaaacagacacttagctaatccatttgagccttagttgtctcattaataaaactgccttggctaggcacagtggctcaggcctgtaatcccagcactttgggaggccgaggtgggaggattacttgagctcaggagattgaaaccagcctgggcaacatagcgaaacatcatctctactaaaagtcaaaaaaattagctggatgtggtggtgtgcatctgtggtcccagctacttgggaggcagaggtgggaggatcacctgagcccaagagatcaaggctgcagtgagctgtgatcgtaccactgcactccagcctgggtaacagaccaagaccctgtctctaaaaaaaaaaaagaaaagaaaagaaaagaaaaagcacttacagtattcagtgctacttagattattgtagacatgtctgaaataactggtttcatgatcaaataagtttggaaaatgttgaatgtcccctgcttgtggagaggccattcgctttacccttactgaaggctctgaaaagtcctacagtagtctgttttaatttccctaacccaggatttcctagacttttctggagtgtggaccgctgttttggaggcacacctaaaacttctgtccagcagtcttgcatagtctaggaaacactgagctggatgttctccaagatcccttcagttctggattcatccagatactctagagtttctcaagaggcctctcctgctcagccactgttcttgacatggttcaggaagcctgagctttggtttctctttcacagaattgaagaactcacatgtggtgggatggtcgagcaggtccaggaagcctttggcgagaccatgacctctgttgtgtctctgtgtgctcgttaccctatcgcttgcgcaaatagcattggactcttatgtaccataccttacaccaggtaagtacggaaaggccttttgttgtatgtaagttaccctgcagtatagtcgattaagtgaaagtatttttaattttaaaaattggattttttgctttcattatccagagctagctatacaaaacttttctcctgaaagacacttaaggttcctatgtaaatttcttattattgagttccaacatgactaaatgcagccattagggttatattacattgtgaagatacagaggttcaaagaaaaataaaaggtccctaggaaattacttacatatttggcagaaatattttgcatatatacatttatttcctctcttgggtcacttagttactaatttgaagatgtcaagcattcattgaatccccttaggacaaaatacatgatttttttccatcatggcaacattgagttgattccatcgatttttgctgtatataaacaaaccagaatttgaagttccttgttaatgaagggaatcatcattatcagaaaatcattttgtgtttgattgcacatggcagtatcctaagttgtagggaaagagctgcaccagcatgttttatgcccctttgaacctcacatgagagtttcctgagtgtcggtcagttacgtttatctagtgtaatccatgaccctttgtcaggagcgaagagaagtgcctggtacgcagtggccttgtgcagctcatggatcgactgtgtagcttgagcaatcagaccgagtccagctccagtgagaaacagaccaagaagcagaaggtggccaccatggcctgggctgccttccaggtgcttgccaaccgctgtgttgagtgggaaaaagaggaaggtgagatgccagactcctttctagagctcactgatttcttctattggtgtgttagtttattggtttttttatgctaaatgaaagagagaaagcctctattaaatgacatgatcagatgggttaaatcagtggatgatttcatgagagacttttcctcagtgtggttttataaaaacttacagcattacgatgagactgaatgatatccctgtaccctgaaggagtacagtaatcccaggaaattgagaagatattttttattctctccttgtcaatactgctagtagtttccaaatatatttttttaattaaaaaaaatttattagacacaaggtctgtcacccaggctagggtacagtggtgcaatcatagctcactgtaacctcaacctccctggctcaaatgataagagatcccccgaccacagcctcccaagtaggactataggcgcactcaccatgcctagctaaggttttttgttgttgttgtttgtttttagagacaggatcttactatgttgcccaggttggtctcaaactcctggcctcaagcagtcctcgcgccttggcgttcaaaaaaacaaatattttttgaagtggcttttcagttgcattttcaaggtgatgtttccaaattttatttttagtgaccaatccaaataaaaagtaaacctgggctgggtgcagtgacacgtgcctatagtcccagccactcagaaggctgaagtgggaagattgcttgagccagggaggtcgaggctgcagtgagctgtgatcgtgccactacactccctgggcaacagagcgagaccctgtttcaaaaaaaaaagtaaacttgaaggataaatttcccaataagattccaggcctgtgtgtataacttgtttatttatctgtttatttgttcacgatgcattttaatgtcttgagagtctattatatgccaggcaaaagataaataaggcattattcctccctttaaaaatatggtctggcataggctgggtgcagtggctcacgcctgtaatcccagcactttgggaggctgaggagggcggatcaccagaggtcaggagttcgagaccagcctgaccaacatggagaaaccccatctctactaaaaatacaaaattagccgggcatggtggcacatacctgtaatcccagctactagggagggtgaggcaggagaatcacttgaacctgggaggcggaggttgcagtgaaccaagatcatgccattgcactccagcctgggcaacaagagcaaaactccatctcaaaaaaaaaaaaaaggtctgacagggaaatagaccaataagcaaatacttatagtgtaatcagtgccacaactgaggtagataggatgtgcagtgggagtgtagaggtcccagagaccagctgtgctagggatccagcaaagcttcccagagaaggtgacacgggagttactcttgaaggaaggagaatactttcgagcagaacaaacagcgtgtgtagactcagcgatctaaaagagcatggaaagttcaggaaacaacaaatactttttcataacttttacatgcttgggaggttctggaactatggtaaacatggaagaatccagaaaggtcttttattgtgtttgggaaagtatgagttaagaaatcaagatgttttcatcaccggtgaagtaatgattcttccctatcaatcaaagtatgttctttggttatgtatgaattaatcatattcaattttcattaatagtaatgtctaccccccacattgagttatttttaaaataactattatcctttttatgtgtagacattatctaatgaggagacactattagatggttcatgaaacattaagcaagataaatggacagggctcgccgccccctcaggctcaccatggcacccttaagttttcaccaatctctttttttctttctttaactgtgaaggtggctccacagaggctgtgcactcaggtctggcccggcaggtgtccagccttctcactaaccatcttgcccgagccacagagtgctgtggcaaccaggctgctgggaatgacgcgctccaggatgtccttagtcttctcaatgatctctcaaggtatgcaaggtccagcctggagctctgggagaagctggctttcctcttgaacgattggggtttcttttggtggtggttgtcttttcaaaatagctaaattactaggccattttgacacactcttgcctcaaaaaaataatggaggataaagtcattgaaacatagtatttagttccaaaatataaggattatttaggtgaatagctaaatcataaaataatatatcatcatttgctttaataccttactgacagcagctgctaacctttcccatagatgcagttgtattcattaaccaaaaatcttaccctcattgtagcaagattaaagaggaatgagtcagggcctgtaattaactcactttctcatgctgtgtctttaaaagaagatactctgtgctggttatatactccctgtgtgagccacgaggcccataaaatatccacatatgactgactgcatgttatttagctttcttggaatataacagttttagctgtggcagatcctagaacattgaagcctatgaaacactgtatgatagctttggtcttgaggtactcattaagaaagaataaataacgtaaattccaaagagaactatttacaagttaatctctgttcccagatccagtcattctccctagcaatcatttattatagaatgcttctcccctctcccttaacctggtttaccaggatccaagcccccattctttctgtaacctcaagatggtagataagcttctgtaactcatgggaaattgagtcttcactctgaaggctcctgtgtatacatgttaaataaatttgtatgtcttttttcccgttaaaaaaatgaaagaataaatgacaaactgaaaagctcttagtttgagtttctaagtctcagtgctccatgaatcactctgaatttaggatctcaagtaaacatcagagatcagaaaatattcaaaaatctttatttttaagtattagtgttgtttggtttcatcaaatgtttccaaaattcttaattcttcacagaagcatagtgccacattcatgattcctcgtgaaatcagatttcattggtttgtttcattcagagaactcttgcttctgaatgtctatagatcaacatttctagcactgtgtaccttttcttccttttttcccaggagccacataggtaaagccatcctgagccagccagcttgtgtgtccaaactcctctccctgctgcttgaccaacgcccgtctccaaagctagtccttattattctccagctgtgccgggcggcgctgcccctgatgagcgtagaagactgtggaaacgtggagctcccaccctggagctactctgtcccctccttaaacagtgagcaggaggatcccagcgacccagcttccaagatcgcctccctgctcttagcaaagctggcagattatgtggttccaggtgagaagctcctcaacaggagagtagcatggcagtgcagcattcctgtgcccagtcaggtcccccttgcatctgtgcttcctatgatgaaagagtgagtgacagagaagggagcggggacaggaatagagaagggggaagaaagattccaaatcccaaaccattatttttcattttagcagagccgccaaaacaacactgcagttttcctgaatgagctttgttttttgcttaaaggatgtcagacagttctttctccaaccgcttctgaacctgacaccacattgacaaaaaccagtcccaagaattccttgaaaggagataaagatcctggagaagagagtgaggctgtggatggcaagctctcgatatttatccacaagcgggaagaccagtcatcccatgaagtcctccagccattgctaaggtgaccataatgattgtgatagctacacatcctcaagcaccacccatgtcacaggcactgtgctaagtaagccctgtacatgtatcgactgcctcggccctctttacacccctttcaggtagacactgtcactgtgattcctgtggtgacacagaaagaaactgaggcagagctgaaatgcagatgtagtcttctctgaccatagaacccaagctctgaaccacaacttggtactgtctctctaagtgcaactgagagctaaagccatgtggacgatgtattattgtctatgggaagcctccagtgtgacttgggctttgagaaggaataatgccatttgatttttagttgttggcatccttcagctgttggtaaatttaggtaaactccaactcattgactgtgagttggagaaacaagagacacttttttaaatctttaattagttgaagtatgaaatggtgtgattactcaagaagaaagtaaaaatatagtcattgcccaaatattacaaacctgcagggctttgttagtgggatccagggcaacaggaaggcttgccacatagcacaggggaattcagagcaggtatttatgtctcagattgaagaggcctctctttacttaaatgatctgacgatgttgtcatcctcataattgaatcccctgtctgccattatggcaactgaaaacactaatgggaccatggtgtaaactaagcgggattatggcaggtcagggcttatatgaggaaatctccaagaaacattcctggacattgcaatgcatcattgtacaaatttgatgaaagattttttttggagaaccaagttcaggaggcaggggaagaagaactattagaaaggaacactaataaattttttcttagctcttttaagaaagtttaatagtttgaagttgaaaatagtttaatagcctaaaaatagtttgagataggtgagatagttgaaaataggtgaaaggttgctaagaaaataacagataataagaattacaaataccttattaaaaatataaaaatatacccaggctcacaaataattaaaggaaaggaataaaaacaatagtaatatatcatttttcatctgtcagacaagtaaaatcaagaaagattagtaataccctttattgtcaaggtgagggtaaataaagtctcaagtgtccagggagaaacacacagggtgttcttcacagttttgtttgaaaaaaacaaacaaaataggccaggcgctgtggctcacgcctgtaatcttcctttctaatagatgtcattcgccaagggatcacatctatggtgtcgttaaagttccctctccttggggtttagatgatgtcctcaggccctgcttttgttctgggttcatgtcagtttttcattttgtgcattattttcatctggatttctagatacccttacaactctaaaaacgctgttgttttgggccctaaagtgctataattaagcagtaataaattatttcctttttgaaaaattgagtcttaaattgtggattttaaaagctagtgttagaggtccaggcatggtggctcatgcctgtaatcccagtgctttaggagtccaaggcaggaggatggcttgagcccaggagttcgagaccagcctgggcaacatagtgagatcccatctcttcaaaaaatacaaaaattaggcaagcatagtggcatgaacctgtggtcccagctgtttgggaggctgaggtgggagaatcacctgaacctagggagatcgaggctgcagtgagctgtgatcacgccactgcactccagcctgggtgaaagagcaacaccctgtctcaaaaaaaaaaaaaaaaaaaaaaaaagctaatgttagtgtaagctaatgttagtgtataatagggcctcaccatgactgggtgaccccatggcatgcagcccacttttggcagtgcctgtaaggtgtgctgtgttctctgcctgccttttttcagtagttcagaaggacggcccttccgacttggtactggcgccaacatggagaaagttgtgaagatggatcgagacatgaccaaggtaacctcatgaggttaaaacgatgaaacccgaaattgtagagtatttgtcatgctttagattttcagaacaaattaagaaaacaaaaaattagttcaagttccaacgaagaggcaaggtgagaaattgaagtcagtgccttaactgaggccattttaaagagaactagttaaagtcagtttgtcaaaatcaaaacttttagttttgacctagaaattttttcttagctcttttaagaaagtttaataatttgaagttgaaaatagtttaatagcctaaaaatagtttgagataggtgagatagttgaaaataggtgaaaggttgctaagaaaataacagataataagaattacaaataccttattaaaaatataaaaatatacccaggctcacaaataattaaaggaaaggaataaaaacaatagtaatatatcatttttcatctgtcagacaagtcaagaaagattagtaataccctttattgtcaaggtgagggtaaataaagtctcaagtgtccagggagagacacacagggtgttcttcacagttttgtttgaaaaaacaaacaaaataggccaggcactgtggctcacgcctgtaatcccagcactttgagacaccaaggcaggtggatcacctgaggtcaggagtttgagactagcctggccaacatggcaaaatcctgtctactaaaaaatacaaaaattagccagacgtggtggcaggctcctgtaatcccagctacttgggaggctgaggcaggagaatcgcttgaacctgggaggtggaggttgcagtgagccgagatcgcaccactgcactctagtctgggcaacagagcaagactcaatctcgaacaaaacaaaaacagaaaataggatccacatactcataaagaggggattggttaaagaaattattacagtcatataatgaaatgctgtgcaactatgaaaaacaatgaggtagatctctgtgtattgatgtggaagagtctccgcgatacactgataactgataaaagcaaaatgaaatgcagtctgtgtcggggccctgtgatacgtatgccagaatttgcacagaagttatctagatgactaaccattatctcagcctggatgaggcctgggatgtctatggaaattttactctacatataatattttatgtttgaattaaaaaaaaatgagtgtggattgctttggtaattgaggggaaatagacttgaaaaatatagtgctgggaagactgaaatgaatcttctcagcgtcttcaacctcaccccagggtggctgttgcgaagtgattacagaagaggctgcagccgccctgcggaaagccaccaagtgggcacagtcaggcctcatcgtcagcattgggccacctgtagagtctatcaacccagagactgtgagtggactatccacaggcgacaaaaagaaaactgcccaaacttccatttgccgagagaggaactcggagcttgcaaggtaaaccttccacaggtaggagctgtccacactcatctcaggtttactttataatgggtttgtttttagctttttaattttctaccatccccttgacctcttggaaatgaggccgccatctgctgtagtagttgcactcaaggtacagcctggagtacgtcggggagtaatgaccatccaggtagatctgaggttgtcatgaaagaatagagggatgctcctggctgaggggacatttatagccagaggattcttttgagtagtattaataaactctggtcttgctacctttatttcttgcaaatggtacatctccactgccccaactgaacacaaacttctttctaggagcagaagcagcagttaagtgttgcctctgtgaagttggttcgaggtgttttgtgcttgaaagccaggaatagttgcaatgcagtgtctttccctgatcctcatggcttataaataaagtttgaggtccattgtttgaggcagttcttcagataccacaaagaatatgacacagtgatttcttcctaatgataatgtagcttcttgttttctcggtcaatggaatccactttttcttgtataaaaagaaaaggttttcctctgatgctaaccctgaaagccacttccctgcagtcttaaccatcactgggcactgacactttttcctgttgacacttgcaggactgatcctgtgcgtcccttcatcagtgggcatgtggcaaacagcatggctgcagaagtgatcgccttgctacatagcttgctcatggcacctgaatcaaatgctgctcaaatatggaccacaacagcagagaaggttagcgcagtgttgctactcaactgagaaaataagaagtaagctaattagaattagaatcatacccagcaaggggcatttcagtaaagagaaattttccaaattcatcagatacctgttaactgactttcccctggaagttgctttactgtagtactttcaactctgttaacctatatcacctgtcactcccggttctcattttgcagacgataggacagtattctcagggaaagagtgacaggccttgtttctcttcttcttgcttatgttagattggtactgacattaggagatcatgcagtgttggtttattggatttaagtgtactcactaagtccaaggaggcctctgcgtgatttacactgcctgagtgccctgtcagtaagtgattcatcattacaaacagtagtccagttgcctgaaactacggatctgtaagcaattccccctttccacagccactcttcaaatgaaccccttatgacatgtcctgaaggtaactgagtgttgccaagtggacagtatgctgggatggttttccttcagataaatgattgtttcattttagaggttttagtgacatgatgtttgattctcccagttgtgtatttccaattttgtccagttacatagacaaatatgggcagatgtcattggccatacctgatagttttttggtccctcacatgtccagagttccttcaatacatgggacccaggcactgttgtagacactttatcacccttggcatcaaaacaaccaaagctttaactcctagtgcacgggctgcttctatatttaggttctgtctagagcactgatgtacattccacaattggggaaatacgcagaaagcattctggaaaatggcagcagcagtggcaggaaacttgccaaacttcagagaattgcacgccaggccgttgccgcactgtgtgcacttggaggcttcaaagagacaatcaagataggatccgaggttcaggtaccaaccaccatgttccccaaatcattgcttcccccatatatataagcatccattaattaattgatcatctgtaagacaagtattatccaaccagctgtacaaaaaaacctgtttcttcaagctaaataaggaatctgagaaattcttgaattcaaatccacactgtgccacacattattcagatattaatgcaatactgtcttaggttaactacaatacttgtgtcctgtagtgtgatcagtatcagtcttagaattgatgatggaattagaatggaaggaaaacagtgttttcctgcaaatatttatttaccattaaacagcagtaacaagtttgtttgtttgtttgtttgtttgtttgtttgttttgagacagagtcttgctctgttccccaggctgaagtgcaatggtgcaatctcagctcactgcaacctctgtctcccgggttcaaatgattctcctgcctcagcctcccaagtagctgggattacaggtgcccaccaccttgcctggctagtttttgtatttttaatagagatgggatttcatcaggctggccaggctggtctcgaactcctgacctcaagtgatccacctgcctcaacctcccaaaatgctgtgattacaggcatgagccaccacacctggcctagcagtaacgagtttctatttgagatgacagcatgttgtgatcaccttgcagttaggttttagggcctattataagtcatgtctagggcttggtatctgctaccctagtagtataaactattactgtaacgccaacaatgacaactataaatttactttttcctcttgtctcgtaagacagctgcccacacgtcagagctggttggtagtgctaatctatgtctgtctccaggttttaggtagaggaatttcaggaagcattggagtagtggcttctatcaatgaacaggaaggtatagctacagtcagattcccacccatagactgtagaaagacttcgcaagcgtcagacacattgactattccattgtctagactttgtgttccaagatcagaggtaaggtgatttttaaatgctttgtaaaatgtctgccaatggtaactgtactgtaatgagtctatgcacatgctcagtgcagaagcacaaatgcttgattatcttaaattgtacttgtgatgtatatttatgtattggttatagttatttaatagtaatgcttatgtgaaaattttcatctagatgaccaaattcatttctttgttggttagggctcttctacaatgtatttttaattgttttgatgtggtttgtagttttctgtatggtgattttatttttttaactgaaaatttaagaattaactccagataataataacaccctcatttcttataaactaactacttgaatttaactttttgccatgcccccccaccgccatcaggcattgcctcttcataaactgtccattactgagaaggtagtacaggcagtccagtccatgttgcttcctcaggagggaagtctctctattcacacctcacttcctgcaacaggagatgggtcagctcctgtgatggcagtcgttcggctccttgctgaaataaggacaaggtgagtaccctccccacattgccttatgtgctgacatggtgcaagctgacagaagaagggatccttggtgggcccctccactcccaacttagtgaatccacagcttgaagctcacactaaactgagcaacagtaaccattcttttacagtttttaccatagttcgttgcattccttaatttcttcaatttttgttgcgttccccaatgtctacacttcaaaataaagtttagcatacaaatgaaatgtgatgtatgaaacacatacataaggctccactgatttgctttgttaaaagaactctgttccatcacaggaataactctactaccttgaggcaggagaatcgcttgaactcgggaggcagaggttgcagtgagccgagatggtgccactacactccagcctgggcaacaagagcgaaactccatctcaaataaataattaaataaataaaatggttcaggccacattgatacatatctggcctatcactttccaaactgatgatgggaaaactaggacatgcacacaggggttggtgttggtcttttcctgcaaatacatttatttagcgttaaacagcagtaacaggtgtctctttttgacaatgaaacttctttttttttggacacagagtcttgctgtgtcacccaggctggagtgcagtggcatgatctcagctcactgcaacctctgcctccctagttcaagcgattctcctgcctcagcctcctgagtagctgggattacaggcgcataccaccactcctggctaatttttatatttttagtagagatggggtctcgccatgttggccaggctggtctgaaactcctgacctctggtgatccacctgcgttggtctcccaaattgctgggattacaggcgtgagccaccatgcccggccaacaatgacacttcttagaaacgtctagtgtgtattttgaatcaggtgagagcgatcgccatacagattttcccactttttgaatccctcttgcttccctagggcaaagttaggaaaagcttttaagagacagtgctgatttctcacctggcactttgtatctccatttagtggtgatggcaaccatttttctcttttccaattcttcatgcagtgtcagcagttactgtgtggcaaaagagaagttatttatatatttccaagacagtccagctcagaaaaaaaaagcaagatgagtggggtgtttgaaccttgttgtaaactggggggcaaaattgattgaaatgtttttcacagttgacttttttagacaatgaacactgatgactttgaaatattgtaaatcttttaacattaagagcatgcctggtcatggcccagcttttagaagacagcttattttgtgaagaattcatacaacaatgtccagcagctgttgaagttcttaacctagtagcccaggaatgtagtgctggtgagtacctgaacttgccttaccaccctgttttattgaattttctcagcacatttgcaatttgataatggtatgttaagtgtcttcatacacacacatcaaaacagccgagctgtaaggacaacacctgtcacaactcacgtgcatcacagacctagaaatgtaaataaaaagcttttaatctacaccagttaggaaatcagcatttttcaattaactttaggaccatgtcagagtgttttcttttcttcattcctattgatttgttgcctttatttacctattagaactataatatttaggagctgtccttagggctggcatgtacattttgactgttgtcattggctacatttgaattcccagtcaagagtttgcactaacatccatccttgcatgtgtgtgtgtgagtgtgtgtgtgagtgtgtgtgtgagtgtgtgtgtgtgtgtatggaaaagtccaaataccaaaattgagagactagtataatgaaccttcaggattccattatccagtttcaacagttgtctactcataactgatcctgttttatctgtgctgcaacccctggaattatttttaatcctagatattattttattcataagtattttagtttacgtctctgaaaaataaagaatcttaaataactacaacaccattatcacctatctaaattattaacagtaatttttaaatattattaagtatctaagctgggcatggcagcatgtgcctgtaatcccagctacttgggaagctgaggcaggaggatcgcttgagcccaggcgtttgaatgcagcctgggcaacatagtgagaccctgtctctaaaaatatgtgtatatacatatctagtcagtgtttaacttcctaattttcccataaagatcatccttgtttttatatttatttatttgaatgaggatccaaataaagtttacaaattgttactttgttgctgtgtctttttaatctattttaaaatatagattcctcttagtctttttttttttttttttgccttacaatttgtttgtggaaggtttcccagtctggattttgatgactgtatccctgtggtgtcatttaccatgttcatttgccgttttgtttcctgtaaattggtagttggcctggttaaatgaaaatttatcttttgtccccaaggatataactggaccctaagtgaaattgttcacaattcaattaacattcctccaatgctaacattttcacaaactacatgttagaaatggacggctttaaatcccttagtgcttgtaggttcatcctcttttttttttttttttttggtcttttaaaaagtctgtattactttttctcatgccgtttattttgtcagtaactctctaataccttttctgtttgtagtttttgttactctttcacattgtggtcatttctgttgttttctttttatttttaaatttgtctgtatccgttttacttctcacatctctttcttttgataagggtagtgccttggattcagcagaagctccagctgggagatccaggaaccattaataaacctcagagagatgctaagaatagagaacaagaacagaagcaaggggtgtgctaggcgtcaagggtgaaattacttgtgacttcgttttgtactcttagtaggtccttagttcactgcctctgactttttttatattgttggcttagattgcattcgaagacatattttgactgattatagcagcatataacatgctgaattaatcacttgcttttctatgggactgtttctgggtatcctcttatatattttatagaataaagaggtcttaattgtgaaatttacattgatacttaatgcataaggtaggatttgtaataatttagagcagtggtctcacatgattttgatcatagtccacctaacctatttttcctagtggaaaaccactttgtggtaacaaagagttgcaaagaaatgtatgggaagtgcttgttaattactacaaaagagaagactatgagcttatgcgtattgatttgtattctaaatagtatcctatgtaaagttgaagaatccttgggccgggcgcggtggctcatgcctgtaatcctagcactttgggaggccgaggcaggcagatcatgaggtcaggagatggagaccatcctggctaacacggtgaaaccccgtctccactaaaaatacaaaaaattagccaggcgtggtggcgggcacctgtagtcccagctactcgggaggctgaggcaggagaatggcgtgaaccccgggaggtggagcttgcagtgagccgagatcatgccactgcactccagcctgggcaacagagcgagactccatctcaaaaaaaaaaaaaaagaa

SEQ ID NO: 2800 - DNA, 322 bp, Homo sapiens
cctggcttctacactgagcaatccctcagctgagatccaggcttagcagctacttctttaaaaatatccccctccccagcctcatgaatgcaccaaattgataaccaaagtcattccttactctggaatcagctctccttcccgagttccctgttttacttaatattcagactaattttgtttttgcttttgtttttgttttttgagacagggtttcgctctgtcacccaggctggagtgcagtgttgcgatcaaggctcactgcagccacaaccttctgggctcaggcaatcctcttgcttcagcctcctgagtagctggg

SEQ ID NO: 2801 - DNA, 487 bp, Homo sapiens
gggaagtcacccaacgctagtgtttaaaatggagaagactgggggcctctgcgtttagatccacctcctacatcccttccatgtcctcatcacagatgtagcctctccctttatgcctcatacacactgcactccaagtgtgcctttcaaaggcatccttgatatttgttatgcaaatatgctggcagtgggcagcatccagagccccgtcccttagggaaggtgctggatgccccaacccgccagggtcagtcctgtttgacctgagctttcaacctaaaatcttcacgagctgcaaagattaaaaatagcaacaataacaacaaaaccttgtggtgatataggattcgttttcctcccagtctatggaatttgtccttttgaccatgttagcatggggggcatttttaaaatacaaaagacagctgctgctcgaatcaaaggaatcacacactgttgatggttgcacaaaggaaggttgaatgtt

SEQ ID NO: 2802 - DNA, 7023 bp, Homo sapiens
atttggtttggccgtgcatgagaagtttgtacctcaagatatgagaccccttcacaaaaagctggttgaccaattctttgtgatgaagtcgagcttagggatacaggtatgtatacttaggtgtccatggcggggcagcctgatcactgccgtttgcttgttaaagggatgatgatgtatccaatagtgacatcttgtggtttttctaccaaactgcactgttttaccagggagccctcaaatacaattgccttgtctgctatttgcgaggctttccttttgggaaaacacaaatgtaagtgagggaaagccaaataatactggaacttgctttaatagctccctatgtgaagacttgatggcaattaggatgtgtgcctagtatgctaacctgtctcataagttattttgcccaaatcattactgtaatgagatatttcctttactacatctttaggagttctctgcttgtatgcaagccagtcctgtccattttcctaatggaagccctcgtgtgtgtagaaactcagcacctgcttctgtgagcccagatggtaccagggtaattcctagacgcaggtaagtcatattccaaattatcttacaatttggcctcacccgcaagctgatctggaatggttctctcattctttatggcacaatttgtcaaatacgctatttcttaatgaaataactaacccgcgaggcagctgcagacctctgccaccagtaaaacagcaacagcatgagaaataaataaactcaaacatttgattatattgaggcaaacaggagaaaacaaaacggaatgtattttcccccctttggtttcatagcattctagcacatgataaagtacaatttggagactgagttaatgaccttttttttccccctgaaacagcccgttaagttacccagctgtcaaccgatattcttcctcctcactgtcctcacaagcttctgctgaagtaagcaatattacagggcaatcagaaagctctgatgaagtctttaacatgcaggtacttaattagctttttgtctggttgtgtttattccttttctgtctcaatcatgagtgtttctgttcattctgctgtgctgatgaacagaccaacaagcaagaacttggcttaaggacaaacctttaaacactcttcttgctttatgggtctctagagtctacaaagacgtttctcttaaaactgccccatcgctttaagacgacatcagcaagcgatggaaaagcctaggcacgctgcacaaggttcagctctgagacctgccccaagttccttctgcagtccaggactctcagagtgtgttgccactcactagctgcctcttagcttgcctttttttttttttttttttttttttttttttagcgagtctcactctgtctcccagtctggagtgcagtggtgcgatcttggctcactgcaacctccgcctcccgggctcaggcagttttcgtgcctcagcctcgtgagtagctgggattacaggtgtgtaccaccacgcccgactaatttttgtatttttagtagagacggggtttcactatgttggccaggttggtctcgaactcctgacctcaagtgatctgcccaatttggcctcccaaagtgctgggattacaggcatgagctactgcgcccggcccctcttagcattccaaaatggctttttttttctttaagaagacatgatttggctaggtgcagtggctcatgcctgtaatcccaacactttgggaggccgaggtgagcgaatcaccttgagatctggagttcgagaccatcctggccagcatggtgaaaccccgtctctatcaaaaatacaaaaattagccgggcatggtggcgcatgcctgtaatcccagctactcgggaggctgaggcaggagaatcgcttgaacctgggaggaggaggttgcagtgagccgagagcatgtcactgcactccagcctgggcaacaaagcgagactgtgtctcaaagaaaaaagaaaaaaagacatgatttgagggtctgttttaaaattatctttacttatgtacatatcagaaagtttccaaaggtattttttttatacaagaaaaatgtagtttttagggattttagagccagtataactcctgcaagcaaacattttatttaaacactactaatatggcatttatgatagttcagtaagactaagctgaaattttcctcaccactatctttggaaaggagacataacacttatttccaaattcatgctttgaacatacttgtacagataacaagaaggcatattttatgccttttagacgcactcgcctgtttttgggccctaggctggaagtcattctacttatacctcaatgaaggaatgcactgctaactggtacgaagtcacagtgtatagctgaatctaacacgaaggcattcctttggcaggagtcaaaatctcagacttttcattaattcatgcagacttctttgtcaatctaagttattaagattttctatattgttaaacggactttttgttgctaatttgaaaaaaagttgatgattttgtttcaaatacgtcagtgtcgtgggaagcctttaatcagggtatgataatagctccctgtgtgtttccagccaagtccatctacctcaagcttgagttctactcactcggcttcacctaatgtgacaagttctgctccatcgagtgccagaggtcagtgccagagtgtggggaagactgagggtgcccagagaaccttctagtcctgggaactgtggccagctgccacacgttcaggctctcgcctccaaacaggtgcagcaccactaccatgctgatgatcctctctctccttctcttcccagcttctcctttgttgtctgacaaacacaaacattcccgagaaaactcttgcctgtcaccaagagagagaccatgcagtgccatctatccaacacctgtggagccttcgcaggtactccttgtagggtagagaaactagaaaacaaggacaattctggaattgcttacctatctctgcagaaacacgcggtagctgccaaaagcaagcagctgggcagtgtcagaccaatccagctggtgaagattgcacctctgttttctgcccatggttagaaatttctgcctgagccatctttttttttttttctttgagacaggatctcgctgtcacccaggctagagtgcagtggcacaatcctggctcactgcaacctccacctcctgggttcaagcaattctcctgtctcagcctcccgagtagttgggattataggtgcccaccaccacacatggctaatttttgtatttataatagaaatggggttttgccatgttggccaggctggtctcgaactcctgacctcaggtgatccacctgccttggcctcccaaagtgctgggattacaggcatgagccaccactcccggccctgagccatatttctgatagggacacatggtagttgcttggcagtgatgctaaaagggaaatgggaagtttaccctccttgatctatttcattgctgcttcttaaacattatgcaaagtagttgggtgaataaagtgcctgtgtttgcatgccctgtgtatgtaacagaagtctgggggaacctcttaaactaggaaaatacccttgaagagaagcattctcctgcccagcagtctttgcctttgcctagacctatttaaaagagctgcaatcgattcctatctgggtacccatgagtataggagcaatttgtttgcctttgccattcttgaatgcatgagaaaagagcggttcagtcctcagcctttccctgtcaactgctcatgcgagtaagggagcttggccctcaccccctgcctgaacttggttttgaagtgatccctgtttttctgagagcagaggcttgggctcagcccttgggcacttcaggagccttgaagggtggtttcaaagttgaagattcatgggtagccctgagttttaaagatttgggaatagtttaggagcagagaaaaatagttatttctactccagctaatttctgtttttctacaccatcctggcagaagtctgtagccacatccggaagtggatgagagagagtgggatttggcttcattggtttgtctttgctgattgtgtgatcctcccgaaagtcccagggtaccgcctctgcacaacgctgatgtcttgcagaaattatatctgagtgcatttggctggactagctatttccctttgtcacttgatgatgctgcaagggaatttctcagtttgttctgctccaggagaacttcttgtcagcatgggcaactctgaaagccttctctgattagcctcccaagttttctggttttagtaaaattggaagcagtatatatgttgctaaatttcaatagtgtgcactgccgtagtacatctacttttaaggacttggtaccttctatttaatatattaggtaaaaccatgtaaaactggcatttttataagttaaaaattgtagactatcaattatttcatatattttttacctaataaatgatttttaacatgcaggggttaaatttcactcactagtgattttttgaactaatatttctcctttaattcttatttctgttttatatcaccactgtagcatttgtatttacaaagaactccacacaggccaggtgtggtggctcatgcctgtaatcccagcgctttgggattggccaaggttggaaggactgcttgagcccaggcattcaagaccagcctgggcaatatagtgagattccatctctaaaaagaaaagaaaaaaaaagaacttcatagcacaactgctatttactatttattttttacattttattatgaacatttaccatttatatttaaaatataatacaaacttttccaacactcttttctttctcaaaacctaaggctcttcccacccccttttacttaaatataattaaattatttgttcctaggctcatcatatcacacaaaaattattttgaacaaaaagttttactgaggagataatcgtctcattttctgaaaggtttcacatgcccgtatatcacatcataaaaatcaacccttgtaactttgcagaggatgctgtttaatcatattggagacggggccttgccacgcagtgacccaaatctctctgcacctgaaaaaggtaaggccagccccatggtcagtcctggaatgtgtaagggcttgttttatcctcatgttctccagtcttctgtgtgtctgtgtggaaagcagtgctctagctctttaatgatcaggactagtatgctctttaagggattaatgaaagacagttattcatgatcattcttcaaaagctgttttcctataagattttaacagcagaatctgagcaagataggaacgcctatgtttaatggctttttgttatcatccagtgagtcacccaggcaatgcctcctcttcctgaagcaaagttgccaattaggctccttgttcagcacaatgaaaatagcttcacccggatcgattcggtggtcccatccttcgtctcccttacaaagctcattcagccaactcatgtgttgtttgttgtgactcagatacggctcttgtacaattaaataccatttaagaattgcaatccagtgcataatggagtgtgccctgcctcaaggtcacacaaaatgagaaccaaacacatggacagcagtaaatagccaattaggatcagtctgcaacacggcagaagatgaagagcagattaaacacgatttcctcagctacggggtcggggcttgcagcaagtcacccattcacctctctcagggtcaagcctcaaaaataagagcagttccccaggccaataaatcaagagtcgttaatgaaatagtctgggaaagtgccttttaattgccctcattaagaagtaaactattgtcatttgggtacactgctacattagaactttccttgggagatggaaattagtgaagtcttaggcaaaattattttaaaacacaaatttagctttaatgttacaagtcacatgttcatctttgtcagtagaactaaggaatgtggtatttttctcaccccttctactaaagaaaaccacgatgcaaatttaaaagaatagagaaaaagaattttaagagtggtaactccatcccattaagtgaaaatggtcgagtggtaaaatgttgaaattctcaacatgcccaccagatggcagtgtctgtacagggagtgagtcactggaacccagatttgctgttgtaaacctcattgcatagtggctatttacaaccagcgtgtcctgcccttattcctgccaggattgccccatattcctgcatcttatcgaagcacagagcagacaaattacaaaataagaatgacactgtccatattccaaatcattttttaaggacatatttcagtgtaattcattgatttcagaaagagttatcaatgagataatattgcatggctgttctttcccaagaattctgccaaatagttaaaatattagtatgtcattgccttctccatttttaggtgtcacttgtccagaaatgtctactaaaagccaagttttaaaatagcccagtgactacatcttccatctgttatccagcatctaaacacatttgtaattctcagcaagttttacaccccagtgtaaagatttgtagttccctttgacagcattaagggaaataaagagacttgttagcgcccagttaaatggtaactataactgttaggcagccaattaaataaaggtttagtattcaagaagtttcctgttttgtttttcatccagttaagtttttcattctggataattctgactttcttctaagatctcaagcattggaagggcaaagctggaccgtgtgtttttagctgtgttattcccttccagctgtgaaccccacccctagcagctggagcctggacagtgggaaggaagccaagaacatgtcggatagtggga

SEQ ID NO: 2803 - DNA, 317 bp, Homo sapiens
ccaactttttttttttttttttttttttttttaagacggagtctccctctgtcacccaggctggagtgcagtggcatgatctctgctcactgcaagctccgcctcctgggttcacgccattctcctgcctcagcctcccaagtagctgggaccacaagtgcccgccaccacacctggctaattttttttgcatttttagtagagacggggtttcactgtgttagccaggatggtctcgatctcctgaccttgtgatccacccgcctcagcctcccaaagtgctgggattacaggcgtgagccaccgcgcctggccga

SEQ ID NO: 2804 - DNA, 9732 bp, Homo sapiens
gcggccgcgggcctccgtgcctgcctggccgaggctggcggcaggtcctgaggtctgaagcacgcctgccccttgccgctgcagttctccgggacgtgcgccgagggagggacctggagcagattctgacgcagtacaccaccttcgtgaagccggccttcgaggagttctgcctgccggtacctgtgctcgctgcttcagagcccattttcccctttcacaaggacacatgggacccagtactgtgagagggcttagtgctgggtgacagtgatctgattgaaaaaaaggagaagaatttggctcattatggccacataccctgggagtagttctcagctgtaaaaacattctctgtgcctgctcctccctctgcctaaaaaagccccatatctcccccacattcacactggccgcttcctccctgcctcaggcccttgcccagcgtccccattcaacactgaaaaccctctgcacccagcgccagcctctctgcctgcttcctttttccggggcacttaccatcatctgacacgtcctgggtgcttattccccgcagagtggggaagcccaggagcactttagtctgttcactgccaaggccgggatctggccctcagaaggtgcttcagagctgctcctccagggtctgtgaccccaggctgctctgggccagtgctctgaaatcttggagtgagcgctgtgcccagatcccagctggctcgcagagagcaggaactccccgctgcacacccacctgtcttttctccatttctccatcttgtgtttctggcttggtgggactcgtggctctactcaaatgggagtgttttgcacgggaacattttgcctgttaaggtaaaaatacagcacaaaggaactgaaaccaagattcctgcctttgataatgtaggacaagtaagttctatctgctgctttttttttttttgagatagggtctctttttgtcgtctagggtggagtgcaatggcacgatctcggctcactccaaactccacctcccaagtttaagcaattctcctgtctcacccttccgagtagctgggattacaggcgtacgccaccacacccagctaatttttgtatttttagtggagatggggttttgccatgttggctgggctggtctcgaactcctggactcaagtgacccacccactttggcctcccaaaatgctgggattgagccactgtgcctggcctttttttaaattttatttttaatgaggcagagtcttgctctgttgcccaggctggagtacagtggtgcaatcacagctcactgcagtcttgacctcctaagctcaagcgatccttccacctcagcaacccgagtagctgggcccacaggcgtgcaccaccatgctcggttaatttttaaattttttgtagagatggggtctccctgtgttgcccaggctggtctccatctcctgggatctagtggtcctcccacctcagcttcccaaagtgctgagattacaggtgtgagccactatgcctggcctattggctgctatataaagaaaacttttgtttttttttgcattcatgctgtctgaaatttctaaaatataattttaaaagtaaagttaacttgttttagtctctcattcacagaaagatatttggcaaaaagtaggtgattcgcagtaaaactctggatatcaaatctgcctcagcgacctgagtagaggaagtgctgtcacctgctatgttctgggcccaggccccagagatgtttttggttggtttgtttgcttgcttgttttttgagacagggtctccctctgccacccaggcccaagtgcagtggtgagatcttgcttcactgcagcctccaccttccactctcaagtgatcctcccacctcaggctcctgagtagccagagactacaggcacgcaccaccacgcctggctaatttttccttttttttttttttttgcacagacggggttttgccatgttggctgggctggtctcaaactcctggcctcaagcagtccacccacctcagcctcccaaagtgctgggatcaccggcgtgagccaccgcacccggccccagccccacccagagccgttcttgagcctccttttccttcaccttcatgttgagtggcttgtgcagtcctctgcctggaccccgtaggtatttcccaactgtattcaggcccatccctgctggcggttaagacccctgtcagctctcccggactcctccagcccgtcagactatcagactagaatagaaagcagccctcgcccttgcgctcgtgctttcatgagatggggtcccaccaactgcagacacagctgtccccaggacttggtccctgtctgcctcttgcagcttgtctcttctgccgccttcttgacccaaatccacacgccagcagcacgcaccgttccaagttccgtccttcggcccagaccctgccctccctcttccctcagctttgtctgattcagccatgttctccaggctgcttccccttccctaaagccaccccccaacccccaccatctggctgcggaccctccccagcagccctgcatttcctgatatatctccatccttgtccttcctcagcagcagagcatctgacagggaatgagagtcagcattgagccaatgagtggttggatgagggagtaagttaccatcagcgtctctgcctgcagtaattatgcacggcggcggctgtcctgttgctgtgccagggtatttgcagaagcttcatgattccagaggaacaatgtcacactttgtagaagtgccacacttagcttggcccagtgaattgagtcgttagcgtagccagctgtctcctgtaatggagtgggaacactggaagggggctgtcttctgtgatggaatggggacactggaagaggcactttcttttggctgcctcagctgcactttctgcctcacttcttggatcatggcctctcacacctggctgatgactgagtctgtgtcccccatttgccgatgacaccagcacctctgagcaccccagggccgcccctcctgctgttgcatctgtttctgagcatcttaaaatcacctttgaaggaaaagtcctcacaggaacacccccccttgtgccttacagacaaagaagtatgccgatgtgatcatcccgcgaggagtggacaatatgggtaagaagctggcctgctgggctgtccccccgcccctcccagagcttgaggcagggacagttccaccagtgtgcagttactgagcactcccctgcgcacgcggcctgccagtgttgatctgcggcacagggttaaaatatgcttaaaaatgtatgtagctgggcgcggtgcctcacactggtaatcccagcactttgggaggctgaggcagggggatcactggagcccaggagttcaacagcctggggaacatagcaaaaccccatctctacaaaaaataaaattatttgggcatggtggcatgtgcctctggtcccagctactcaggaggctgaggtgggaggattgcttgagcctgggaggttgaggctgcagtgagctgtgattgggccactgcactccagcctaggcagtaaagtaagaacctgtttcttaaaacatatatatatgtatattcaaatctgttagcagaaagtactttaagcagactctaacataaattcctggaagaccaagctaagaagtcttattttgctgtgtcctgatgcatgtttctgtctgctgagatttgactcgatgcccctcgccgcaggctgtgcctcagggcagaggttgggcgctcactcctggccgagtgctgcggggaggggcggtctccacggaggatggatgcggctaacccgctgcttgtctgtctcttggcgcagttgccatcaacctgatcgtgcagcacatccaggacattctgaatggtgacatctgcaaatggcaccgaggagggtccaatgggcggagctacaagcggaccttttctgagccaggggaccaccctgggatgctgacctctggcaaacggtcacatttggagtccagcagcagaccccactgaggggctgccgagcctcagggcaggtctcccgcccggcatgtgtgttcagggactgagcctggggacgcccacccacacccactgcttcctctcggcgcaccccaggggagtgttagcagcgaggccttcctcactcaggagtggaaactcagatgtgtcactcagactcaacttgctgggacactgacaggcgttcctgaggttttcagccacttaggctcgttgcggtttaaagatccctctaggtcactgagaaatgccacagaatgtgcaggaagcctgggaggcttctgtgaggaatgtgaggcacattattggggaaattgaggagacagcctagacactggctggcctgatgttttgttgacagtgaacccacagtgggagagagttttttccagtctgatctggttcttacacactcacacacataactcaaaagttttgtgaacaagtactttccttttttacatgttacatgtcctcatgttttctgttttctgtttcataacacaaggctggttgtggcctacaaacctaatttcatgacccagtggtttgcagtccagcgtggcctacacggatatggggagccactgagggatgttttccccccttgcttgtgccttaaaggcagagaagcgaggcggatgccctggaagcacccagcatcacacccaggcttgtgcggggccaggctgggagcccatgcagtagggcagaaggcagcggaggccaggtctgtcccggctggagaacagcgtccacgcagtcctgcctggggtcaggccctcactgaccctcaggggagcccccaaggtgctgtctgtctagacaggctgtcccaccccagggtggctagtggccatatgcagggaatggtgcttctggctgtggcacgcactggatcacccaggtcccagcagacatggccgcccaaagtcagcaagcctcctttgtgctatgtggagctcacagcctcacatgtgaacacccgtgtctgggttgcctggggtgatcctccctcctgcgtggtggctgtctctggaaagcatcccttgccgctgccatgggcagccccagcccccgtccgtccaggctcacccacagtagtgatgcagacgtgacgtgggggaagggggctgagccctgtggctgggttctgacaactgtaacggttttgtcgagcttaggcccctttggagggagaatcaataaataacaaacaccaactacaaacgccagttggttccttttttaattacatttaaaaaagacaaaggcatggagctgtatggatgacacaccttgaccactgacgaggaagatttcactcagccacgtctcagtggagtctcagaggggagggtttccacacagcacggtgccaagggccagtcttgacgctgtcatagacaatgacatgcaagccccagccctggctcgtggttcaggtggccctccaacactgagctgtcccaggacgcctgccgggctcgctgagggcagggccgggacttgctcaggttgctgggtgttcatgaaggaggatcgggtctgccagatcaaactccaccctgcagcagttagcaaggaccaggccctggtctgctgaggctccactgctggccctgggttctcggctttttgttgtcaatgactcctacgctggcctctgaaatactccctgtgtcttagttcaggggtaaagacacggaatatctttattgtcgagaaaaaattaactttgcacaaaaggaggtgctcatcagagagcttttcaatgagacccccatgtgttccactagaggccctgctcagcccagcccgtgtcctcccagcgtggggcccaccctgctcattacgtacattgaccaagacccttcaacctcatcccgaccccagcacgggtgttctttgccacactcttgttctagtgttttcggatcaagatgtcccagctgtctttccagcgaagggccttgagttcatgtggcgagagtgacttgtccccgtaggtgagtgggcgcagcgtgttggacacgtggcacgcggaggagtaccaggccaccaccagggcgctgaagatgctcctctggagctgggacctgcagaggtcagagcagcgtgggggagggtggctgaccactgcggcttccctgcccggcaccctcttggcatctgctgtccacacggtcaccccccgaggcctggggttctgccttcaggtttctgtgtcttgtctcctgccacccatgaccatctcccacctggatgcactgagaggggccccctgatgactcctcaggcctccacagtggctgggccacctccacacagatgccagaggactggtcccaaacccacggtcctcccttgtgtggcttcctgaaaccgggaggccctcgccctctgctccaacctccaaacacactctggtttagaagctttcttgggttctctccaccacaccacacaacccgaccataaccagctgccgtttctgacaccccaggctcctgggccttgctccctgctcccgaatcctccaggccacccacatctcttcatcccctccccgtctccccacccactccgctttcatctctgtcagccgcgacttctccctctgggttcctgcagtgcctcatctgggcatctcttctgaacctcacccattccccggagggacccggaggatgtcagtgtaacgtgaaatgggtgaggttcgctgcaccccatgtgtttgctgcgcatgggcttcccagcagagggctgctgcccggtccagccactgtctccgcagcccccgtacctgcacaggtggtcgctgatgtgctgcaggaccacagggagcagaaggatttggaaggtgagtgcgggcaggtagtggtagaggaagagtgtcttctccatcaggaagaacgggaggtagttcactgcccagccaccggcacacagcgccccagccagcacccagcgcagccaggcatctataggaaagggctcgagctacaccgactctgctgctcccacaggccgggtcttctctctcttttgcttttttagagagagggttcttactatgttgcccaggctggttttgaactcctggcctcaggtgactccctcactttggcctcccaaagtgctgggattacaggtgtaagccaccgcgcccggcctggctgcctgtgttacccagccatttccagcgcatacgggcaacatgggaccaagagggcaattcctgcccaatacgctgcactcgactggagacacctctaacgcaacatgggaacttaacattttgtctcttgggagacaaacataatttaagattccacaatacagaaacaaagaggccgcgttaaggggtaggttcctatgaagtcggtttgtcacttgaggcggtgaatgctcagcgcacacctgtaatcctagcactatgggaggccgaggcaggaggatcgcttaagcccaggagttcaagaacaccctggacaacacagcaagaccccatgtctatattaaaaagaaagaaagccatgtgggagaggtactaaccctgagggaggtcatggacatttcttcgccgtcggagcaggtaccacaaggacagcagggcgtagatggccagagcgaggctgcccgaaacccagatcactatgtttccaagtaggtggatctgagcctaagggaacatgggagatgctgttagccacctgccctctgctcagggagggaagagaagagaacacaggaaaggaattcagatgcacgcactactttagcagagtgaaaaaacgccaggcacagcctagcatccactaggccttactactactgtggacaggtctgctcctactcagacctttcattaaaagcactgatgccagccgggtgtggtggcacatgcctgtaatcccagcactttgggaagctgaggtgggcagatcacctgaagtcaggagtttgagaccagcctgcccaacgtggcgaaaccccgtctctattaaaaagtacaaaaattagctgggcattgcggtgggcacctgtaataccagctacttggaggctgaggcaggagaactgcttgaacctgggaggtggaggttgcagtgagccaagatcacgccactgtactccagcctggatgacagagcaagactccgtctctctctttctctctcacatacacacacacacacagcactgatgctctcaattttgtaattggaaactgaaaattgggagcagatgactccactttgtaacagcagcgctgtccacggaggagaatgcaaagtgcgctcagagctcggggtggggcggcctctgggcctgagcctctgccttcagtgcacatgctgagccgacctacccgcctctgagggaggaggaaaaaggtgggcatttccagcgtctgcccattcagtgaatatttatggggcgctgactgtgcgcccggcctaccaatgctttcactctgccgggtggagagacggcacgcacatcagcaaagcaccggtaagctccaccaccaggtgccacacggaaaattgaatgggaatatcttaaaaccactttcgccaggaaaaggggaacaatgtgtctccacaaaagcaatcaagccgggtttccttcaacaggcacacatgccacacccctactcctggctccaggttgccaaagcgtttagagaaaaccaagtcacaggcctttgtcaggaaaagcttgggagaaacccagcactttctagggtgcagcggctgctcttaatgcaaggaattctcaagaaacaggatgaatctatgactgtcagctgtcagcatcgctcgcttacgctggtcctggggtgcagccagtaggcaatattggtgtccagggtgacccactccagtgggctggagctgtacttgtgttccgagtcatcacttctcagcgccagcatcctccactggaacaaagcagaggcctctgagattgaggatgggggatgcctcccgctgtgcgtggatttggtcaaaggagtacactgctgccccttgcacgtggactggcccagctcaagttcattcggatcatgcatcggaggcagcatgatgagaacctggattccagccctgaatgtggccttgggagggtcgccccaccctatgtgctccagttacctcctctgtagacgaagtgattgggctgaatgctctctaaggtcacgttcagatttgtgaccgtgagtttctgattgtgacttctcttgggctctgttgagtgtggcccatttcgctgcctgggggccttaagacaccctggcgatgttgcagaacctcctgggtccctattattcctgaccacagggccacaaggtgtgggccaggggtgtcacacacagtcccttacactggagagaggagacactcattctgttgtgagcctgtagctccagcgtcaaagcctgactctggtttgagtcctgtgcagcccccaggcctccctgctgaggagtcaatgctcagcgagctaggccagcttcccctggccgctcctcacctgcagctccgagaatctcgccatgaagctgaggttcctgctgacgtccacctgcgcaggtgagtgcagcttccgttcccgcttcctctgctcctg

SEQ ID NO: 2805 - DNA, 19125 bp, Homo sapiens
ggcgggcgcggggacccgatgcgcgggagcggaggccgagatggcttcggcgggaggcgaagactgcgagagccccgcgccggaggccgaccgtccgcaccagcggcccttcctgataggggtgagcggcggcactgccagcgggaaggtaaggggccgagcgggccggggtctcgcctctcgccggtgcctacgggcggcccggtccagagaggagaccccagccccggccgaggggccccctgccaggcaggggcagggcgcgggagcgaaggggctgcaggccgcgatgggccggggcgggctggggcgggcgaggggttggggcgctgggcctcggggctcccccacagcctctccgccggccgggctcctcggagccccaagtccgtgctaaccccgttgggcccccgcggcccttccgctgagaccatccacacctgttggtgtcctcccgccttccgagcataccccccagggggcgggtgggtcagtgtctccagaagccggccccgtgcctgtcacaggacgagcggttccaggcgggaatcccgcttctgtgtctccagtcgaccgtgtgtgacaagatcatggagttgctgggacagaacgaggtggaacagcggcagcggaaggtggtcatcctgagccaggacaggttctacaaggtcctgacggcagagcagaaggccaaggccttgaaaggacagtacaattttgaccatccaggtaaatcgcgagcccaacgatgtggggagggcagaccccattctgggcggccgctaaccagctgcgcttgggcccaaggttggatggatgcagacccgcttggggctgttcccccaactcgcccacgcagcctgcagtggagttggctgcacagtgaagtcaggggaactttgctgagttctctgggccctgagtgtccccccaggagcgtggttggagccagtcaggaagcctgttgcactgtggggagccctgccctgccctgccacaactgtgatcctggagaaatcctcccatcttcccttcccacgttggggcctttagggccctccacacacacctctgcccactgtgccctcccgtgctttggggcaaagtcctcagagaggccagtgtgggaggcggtaggtaaactagtgctggtggcttgaagctccgggccaggtaaacgggcagatgcggcagggagacacctgccactgctagaagattccaccctggctggctggcatggtcagccttttcccaaggacttgtgggaagaaggcctgcaaagccgcagtctaaccagttagtcccagaaagagagagaagcagaggcccagcctacccacctcccaggaagagctgatcagaaaacccctgtgttccggcatctcaggggcacagagcttgggcagtggcacagcccgagaacagcaaggacagggtcatcctgtggtctgcagggctgcagagggcactgttgctaccaaacatacactgccgtagtcctagtctacctgtgctagggttctcggtgtccccagcacccagctgtgctgaccccagagcagagagggttccctgctgtccgctgcacgagggcatctgcctgtcttgcctttgtctccaaccctgcagatgcctttgataatgatttgatgcacaggactctgaagaccatcgtggagggcaaaacgggtggaggtgccgacctatgattttgtgacacactcaaggtaagcaggtggttctagggagggcccgaggagaggggccagctaggacgtcccctcgggctcacacagacctgcctggcggcaggcctcccccggttggtttctgtgggtcccccaccccttcccacagtcagtgtccctgcaatggaagctgactgtgtgtgtggcctggagaccctgtgtctgcagcagagcccctttccccgtgcgcccctcaggttaccagagaccacggtggtctaccctgcggacgtggttctgtttgagggcatcttggtgttctacagccaggagatccgggacatgttccacctgcgcctcttcgtggacaccgactccgacgtcaggctgtctcgaagaggtaaggcggccgcgggcctccgtgcctgcctggccgaggctggcggcaggtcctgaggtctgaagcacgcctgccccttgccgctgcagttctccgggacgtgcgccgagggagggacctggagcagattctgacgcagtacaccaccttcgtgaagccggccttcgaggagttctgcctgccggtacctgtgctcgctgcttcagagcccattttcccctttcacaaggacacatgggacccagtactgtgagagggcttagtgctgggtgacagtgatctgattgaaaaaaaggagaagaatttggctcattatggccacataccctgggagtagttctcagctgtaaaaacattctctgtgcctgctcctccctctgcctaaaaaagccccatatctcccccacattcacactggccgcttcctccctgcctcaggcccttgcccagcgtccccattcaacactgaaaaccctctgcacccagcgccagcctctctgcctgcttcctttttccggggcacttaccatcatctgacacgtcctgggtgcttattccccgcagagtggggaagcccaggagcactttagtctgttcactgccaaggccgggatctggccctcagaaggtgctttagagctgctccttcagggtctgtgaccccaggctgctctgggccagtgctctgaaatcttggagtgagcgctgtgcccagatcccagctggctggcagagagcaggaactccccgctgcacacccacctgtcttttctccatttctccatcttgggttcttggcttggtgggactcgtggctctactcaaatgggagtgttttgcacgggaacattttgcctgttaaggtaaaaatacagcacaaaggaactgaaaccaagattcctgcctttgataatgtaggacaagtaagttctatctgctgctttttttttttttgagatagggtctctttttgtcctctagggtggagtgcaatggcacgatctcggctcactccaaactccacctcccaagtttaagcaattctcctgtctcacccttccgagtagctgggattacaggcgtacgccaccacacccagctaatttttgtatttttagtggagatggggttttgccatgttggctgggctggtctcgaactcctggactcaagtgacccacccactttggcctcccaaaatgctgggattgagccactgtgcctggcctttttttaaattttatttttaatgaggcagagtcttgctctgttgcccaggctggagtacagtggtgcaatcacagctcactgcagtcttgacctcctaagctcaagcgatccttccacctcagcaacccgagtagctgggcccacaggcgtgcaccaccatgctcggttaatttttaaattttttgtagagatggggtctccctgtgttgcccaggctggtctccatctcctgggatctagtggtcctcccacctcagcttcccaaagtgctgagattacaggtgtgagccactatgcctggcctattggctgctatataaagaaaacttttgtttttttttgcattcatgctgtctgaaatttctaaaatataattttaaaagtaaagttaacttgttttagtctctcattcacagaaagatatttggcaaaaagtaggtgattcgcagtaaaactctggatatcaaatctgcctcagcgacctgagtagaggaagtgctgtcacctgctatgttctgggcccaggccccagagatgtttttggttggtttgtttgcttgcttgttttttgagacagggtctccctctgccacccaggcccaagtgcagtggtgagatcttgcttcactgcagcctccaccttccactctcaagtgatcctcccacctcaggctcctgagtagccagagactacaggcacgcaccaccacgcctggctaatttttccttttttttttttttttgcacagacggggttttgccatgttggctgggctggtctcaaactcctggcctcaagcagtccacccacctcagcctcccaaagtgctgggatcaccggcgtgagccaccgcacccggccccagccccacccagagccgttcttgagcctccttttccttcaccttcatgttgagtggcttgtgcagtcctctgcctggaccccgtaggtatttcccaactgtattcaggcccatccctgctggcggttaagacccctgtcagctctcccggactcctccagcccgtcagactatcagactagaatagaaagcagccctcgcccttgcgctcgtgctttcatgagatggggtcccaccaactgcagacacagctgtccccaggacttggtccctgtctgcctcttgcagcttgtctcttctgccgccttcttgacccaaatccacacgccagcagcacgcaccgttccaagttccgtccttcggcccagaccctgccctccctcttccctcagctttgtctgattcagccatgttctccaggctgcttccccttccctaaagccaccccccaacccccaccatctggctgcggaccctccccagcagccctgcatttcctgatatatctccatccttgtccttcctcagcagcagagcatctgacagggaatgagagtcagcattgagccaatgagtggttggatgagggagtaagttaccatcagcgtctctgcctgcagtaattatgcacggcggcggctgtcctgttgctgtgccagggtatttgcagaagcttcatgattccagaggaacaatgtcacactttgtagaagtgccacacttagcttggcccagtgaattgagtcgttagcgtagccagctgtctcctgtaatggagtgggaacactggaagggggctgtcttctgtgatggaatggggacactggaagaggcactttcttttggctgcctcagctgcactttctgcctcacttcttggatcatggcctctcacacctggctgatgactgagtctgtgtcccccatttgccgatgacaccagcacctctgagcaccccagggccgcccctcctgctgttgcatctgtttctgagcatcttaaaatcacctttgaaggaaaagtcctcacaggaacacccccccttgtgccttacagacaaagaagtatgccgatgtgatcatcccgcgaggagtggacaatatgggtaagaagctggcctgctgggctgtccccccgcccctcccagagcttgaggcagggacagttccaccagtgtgcagttactgagcactcccctgcgcacgcggcctgccagtgttgatctgcggcacagggttaaaatatgcttaaaaatgtatgtagctgggcgcggtgcctcacactggtaatcccagcactttgggaggctgaggcagggggatcactggagcccaggagttcaacagcctggggaacatagcaaaaccccatctctacaaaaaataaaattatttgggcatggtggcatgtgcctctggtcccagctactcaggaggctgaggtgggaggattgcttgagcctgggaggttgaggctgcagtgagctgtgattgggccactgcactccagcctaggcagtaaagtaagaacctgtttcttaaaacatatatatatgtatattcaaatctgttagcagaaagtactttaagcagactctaacataaattcctggaagaccaagctaagaagtcttattttgctgtgtcctgatgcatgtttctgtctgctgagatttgactcgatgcccctcgccgcaggctgtgcctcagggcagaggttgggcgctcactcctggccgagtgctgcggggaggggcggtctccacggaggatggatgcggctaacccgctgcttgtctgtctcttggcgcagttgccatcaacctgatcgtgcagcacatccaggacattctgaatggtgacatctgcaaatggcaccgaggagggtccaatgggcggagctacaagcggaccttttctgagccaggggaccaccctgggatgctgacctctggcaaacggtcacatttggagtccagcagcagaccccactgaggggctgccgagcctcagggcaggtctcccgcccggcatgtgtgttcagggactgagcctggggacgcccacccacacccactgcttcctctcggcgcaccccaggggagtgttagcagcgaggccttcctcactcaggagtggaaactcagatgtgtcactcagactcaacttgctgggacactgacaggcgttcctgaggttttcagccacttaggctcgttgcggtttaaagatccctctaggtcactgagaaatgccacagaatgtgcaggaagcctgggaggcttctgtgaggaatgtgaggcacattattggggaaattgaggagacagcctagacactggctggcctgatgttttgttgacagtgaacccacagtgggagagagttttttccagtctgatctggttcttacacactcacacacataactcaaaagttttgtgaacaagtactttccttttttacatgttacatgtcctcatgttttctgttttctgtttcataacacaaggctggttgtggcctacaaacctaatttcatgacccagtggtttgcagtccagcgtggcctacacggatatggggagccactgagggatgttttccccccttgcttgtgccttaaaggcagagaagcgaggcggatgccctggaagcacccagcatcacacccaggcttgtgcggggccaggctgggagcccatgcagtagggcagaaggcagcggaggccaggtctgtcccggctggagaacagcgtccacgcagtcctgcctggggtcaggccctcactgaccctcaggggagcccccaaggtgctgtctgtctagacaggctgtcccaccccagggtggctagtggccatatgcagggaatggtgcttctggctgtggcacgcactggatcacccaggtcccagcagacatggccgcccaaagtcagcaagcctcctttgtgctatgtggagctcacagtcctcacatgtgaacacccgtgtctgggttgcctggggtgatcctccctcctgcgtggtggctgtctctggaaagcatcccttgccgctgccatgggcagccccagcccccgtccgtccaggctcacccacagtagtgatgcagacgtgacgtgggggaagggggctgagccctgtggctgggttctgacaactgtaacggttttgtcgagcttaggcccctttggagggagaatcaataaataacaaacaccaactacaaacgccagttggttccttttttaattacatttaaaaaagacaaaggcatggagctgtatggatgacacaccttgaccactgacgaggaagatttcactcagccacgtctcagtggagtctcagaggggagggtttccacacagcacggtgccaagggccagtcttgacgctgtcatagacaatgacatgcaagccccagccctggctcgtggttcaggtggccctccaacactgagctgtcccaggacgcctgccgggctcgctgagggcagggccgggacttgctcaggttgctgggtgttcatgaaggaggatcgggtctgccagatcaaactccaccctgcagcagttagcaaggaccaggccctggtctgctgaggctccactgctggccctgggttctcggctttttgttgtcaatgactcctacgctggcctctgaaatactccctgtgtcttagttcaggggtaaagacacggaatatctttattgtcgagaaaaaattaactttgcacaaaaggaggtgctcatcagagagcttttcaatgagacccccatgtgttccactagaggccctgctcagcccagcccgtgtcctcccagcgtggggcccaccctgctcattacgtacattgaccaagacccttcaacctcatcccgaccccagcacgggtgttctttgccacactcttgttctagtgttttcggatcaagatgtcccagctgtctttccagcgaagggccttgagttcatgtggcgagagtgacttgtccccgtaggtgagtgggcgcagcgtgttggacacgtggcacgcggaggagtaccaggccaccaccagggcgctgaagatgctcctctggagctgggacctgcagaggtcagagcagcgtgggggagggtggctgaccactgcggcttccctgcccggcaccctcttggcatctgctgtccacacggtcaccccccgaggcctggggttctgccttcaggtttctgtgtcttgtctcctgccacccatgaccatctcccacctggatgcactgagaggggccccctgatgactcctcaggcctccacagtggctgggccacctccacacagatgccagaggactggtcccaaacccacggtcctcccttgtgtggcttcctgaaaccgggaggccctcgccctctgctccaacctccaaacacactctggtttagaagctttcttgggttctctccaccacaccacacaacccgaccataaccagctgccgtttctgacaccccaggctcctgggccttgctccctgctcccgaatcctccaggccacccacatctcttcatcccctccccgtctccccacccactccgctttcatctctgtcagccgcgacttctccctctgggttcctgcagtgcctcatctgggcatctcttctgaacctcacccattccccggagggacccggaggatgtcagtgtaacgtgaaatgggtgaggttcgctgcaccccatgtgtttgctgcgcatgggcttcccagcagagggctgctgcccggtccagccactgtctccgcagcccccgtacctgcacaggtggtcgctgatgtgctgcaggaccacagggagcagaaggatttggaaggtgagtgcgggcaggtagtggtagaggaagagtgtcttctccatcaggaagaacgggaggtagttcactgcccagccaccggcacacagcgccccagccagcacccagcgcagccaggcatctataggaaagggctcgagctacaccgactctgctgctcccacaggccgggtcttctctctcttttgcttttttagagagagggttcttactatgttgcccaggctggttttgaactcctggcctcaggtgactccctcactttggcctcccaaagtgctgggattacaggtgtaagccaccgcgcccggcctggctgcctgtgttacccagccatttccagcgcatacgggcaacatgggaccaagagggcaattcctgcccaatacgctgcactcgactggagacacctctaacgcaacatgggaacttaacattttgtctcttgggagacaaacataatttaagattccacaatacagaaacaaagaggccgcgttaaggggtaggttcctatgaagtcggtttgtcacttgaggcggtgaatgctcagcgcacacctgtaatcctagcactatgggaggccgaggcaggaggatcgcttaagcccaggagttcaagaacaccctggacaacacagcaagaccccatgtctatattaaaaagaaagaaagccatgtgggagaggtactaaccctgagggaggtcatggacatttcttcgccgtcggagcaggtaccacaaggacagcagggcgtagatggccagagcgaggctgcccgaaacccagatcactatgtttccaagtaggtggatctgagcctaagggaacatgggagatgctgttagccacctgccctctgctcagggagggaagagaagagaacacaggaaaggaattcagatgcacgcactactttagcagagtgaaaaaacgccaggcacagcctagcatccactaggccttactactactgtggacaggtctgctcctactcagacctttcattaaaagcactgatgccagccgggtgtggtggcacatgcctgtaatcccagcactttgggaagctgaggtgggcagatcacctgaagtcaggagtttgagaccagcctgcccaacgtggcgaaaccccgtctctattaaaaagtacaaaaattagctgggcattgcggtgggcacctgtaataccagctacttggaggctgaggcaggagaactgcttgaacctgggaggtggaggttgcagtgagccaagatcacgccactgtactccagcctggatgacagagcaagactccgtctctctctttctctctcacatacacacacacacacagcactgatgctctcaattttgtaattggaaactgaaaattgggagcagatgactccactttgtaacagcagcgctgtccacggaggagaatgcaaagtgcgctcagagctcggggtggggcggcctctgggcctgagcctctgccttcagtgcacatgctgagccgacctacccgcctctgagggaggaggaaaaaggtgggcatttccagcgtctgcccattcagtgaatatttatggggcgctgactgtgcgcccggcctaccaatgctttcactctgccgggtggagagacggcacgcacatcagcaaagcaccggtaagctccaccaccaggtgccacacggaaaattgaatgggaatatcttaaaaccactttcgccaggaaaaggggaacaatgtgtctccacaaaagcaatcaagccgggtttccttcaacaggcacacatgccacacccctactcctggctccaggttgccaaagcgtttagagaaaaccaagtcacaggcctttgtcaggaaaagcttgggagaaacccagcactttctagggtgcagcggctgctcttaatgcaaggaattctcaagaaacaggatgaatctatgactgtcagctgtcagcatcgctcgcttacgctggtcctggggtgcagccagtaggcaatattggtgtccagggtgacccactccagtgggctggagctgtacttgtgttccgagtcatcacttctcagcgccagcatcctccactggaacaaagcagaggcctctgagattgaggatgggggatgcctcccgctgtgcgtggatttggtcaaaggagtacactgctgccccttgcacgtggactggcccagctcaagttcattcggatcatgcatcggaggcagcatgatgagaacctggattccagccctgaatgtggccttgggagggtcgccccaccctatgtgctccagttacctcctctgtagacgaagtgattgggctgaatgctctctaaggtcacgttcagatttgtgaccgtgagtttctgattgtgacttctcttgggctctgttgagtgtggcccatttcgctgcctgggggccttaagacaccctggcgatgttgcagaacctcctgggtccctattattcctgaccacagggccacaaggtgtgggccaggggtgtcacacacagtcccttacactggagagaggagacactcattctgttgtgagcctgtagctccagcgtcaaagcctgactctggtttgagtcctgtgcagcccccaggcctccctgctgaggagtcaatgctcagcgagctaggccagcttcccctggccgctcctcacctgcagctccgagaatctcgccatgaagctgaggttcctgctgacgtccacctgcgcaggtgagtgcagctcccgtccccgctccctctgcttctggcctggcagaacagacaaggggcatacagatagaagtagcacaagggtcaagagctcagagcagaagctgtcagtgcagcaaaaagctggcttcctgcctttctaacaaagaccccttatcgaaccgcatcattccacttagctttccccaccacacccaagactgcccggtcaaatgaggtgatttcgaccctgagaaagctccacttgcacggggataaactggttgccttccagcgacacctcggaagaagcgtcttgagttattactgcagcagctgagtgcagggtgcagggagggagatgacctgccaccgagcatggagaatgtgctcagttcccttcccaccaaaatgagaactctggggtgttatcaaatattgagcagctgaaagtacattccaggagcggcggaagccacgccgcggactcactcgcgccgtatcggtgctcctccacgttccacaccgtgctcccgtggtagccccgggacagcttctccccgacgatctccagttgccgatacccccagtcagggaggtgagccccgctcagctggtgacaccgcaggagagtaaagggcgtgatgggaaggccgtggctcccgtgtccacttgggttggaaggggaacccctgcccgggtcacgctgtcagcaggtgccccttgtgggagattcacattgggattccatcctgagaagttacaaaagccgccctccctcagtgtaagaggaagccatgatgactcaaatgaagcgttccgcctgcagagaggcggtgaagcctgagggcttgggaaacagactggagcccacagctcaggacaggccaagccacggacagtgtccttacctttaagacagcggaagtgttcacgtgcacaaagcggacctctgagaggatggtcttccagacgtctgtgtcagatcctctgttcacaatttcctgcaaaaagacatctcaaggattatttcattccttttcaaatttccttcaatgtaaaaataaagacctgtcaccaaacaatgatactgacttgagcctgagacaaagggacaagtccccaagtgagggaagctataaggggctggtactggccttccttcccaatgcccacagcaccccgggctgctccgagggtcgctggggaagtgcaccctcctcctcgccaaggccgtacaagaggcctcctcacagaaaatacaaagcctgatgttcttcgtgcctctctgcaaagcctattcatagggctcagagccctggccaaaaagtgagcaagtctcagtccctatctggcaggactcgcagacagctcagatgaaggccagacactgtccctgccagacacagcttagagatttcctcgcatcgagtaataaaaaagacaactaacatctgaaaggcactttgccttgtcacagcctgacatactggagcctcacaatgaccccatgacatcacatgactgtcattttcccatactgtcacaaccagagaacccaagaagctaggcaggagcaggcatgaggaggcctggccgcggtccatgccgcaggccgggcgcgcacacctcacgcatgctccctccttccttgttctatgaacttcagacacctgaaatgtgggctcctggtgccaaaggggccatcagaaaggacagagaagggtgcccgtgagaaggggcacagcactcacgtcagggaaggactgtgggggggcggggatggaaatgcagaacgcacacagatatgcagagcacagagacggcgagtggggcagaggggcgcactctgcacaaaaatggaacagccaatctggagcagtggctcacacttgtcatcccagcgactctgggaggctgaggtaagaggacggcttgagtccaggagttcaagaccagcctggacaacatagcaagaccccatctccacaaaaaattttaaaaatcagactgtcctggaatagaaaaaatattttaaaaattaaatattcaaaattaacaggggccaggcatggtggctaacctgtaataccaagaggcagaggtgggaggatcacctaagcttgggaggccaacactgcagtaagccaagatcacgccactgcacttcagcctgggtgacagagtgagacccagtcgcaaaaaaaaaaaaagaacatcagcagatacctggctttgctgtgagggctggccatgaggacgtggtgctaactctgtcaagcgaaacagggttgagcctgcgtaggcagaaagcgctgaagccagtgggaagctagaagggggggtgtgacctcactatggaaataagcccagtgccttcactgtggtcatggggctgggctgcatttagtgtccatgtccttagattcagatggcaacatggtccagtaacagaagactttttatggaacctttcccaggagacccgattccgtaaggggagcaggtggccctggtcgctggaaggaaaggtgaccacagacccagcgcctcaggaacatcccccgcactcacggctaagcctgtccccagggaaatcctgagaaatggaatttctcctggatcatggtggcagaggggtggctggagctcgtgtcctgtgttcaggacctgctcctgaggctaaacaggttgggagaactttcacctggcagagcctcaagcgcacctggcacccaacatggagcaaacacaaagcatttagaatctcagtgaacacaggcctctgatgcaggaaaccaccaggttccccagttccaccaaggaagacgcatcggttccctgtgaaaacatctgtgactttatgtacgaataaaacttatgtaactttacatctgaatcagaattattctaaatatccaacctcaactgggtaaactgaaaaaaaggaaaaatgattattctcaacggcagtttcaaacattccatgtcaggaagtgctccgtgtgagcaagtgctccgtgtgatggagtgctccctgtgaggaagtgctccgtgtgaggaagtgttctgttagaggaagtgctccgtgtgaggaagtgctccgtgtgaggaggtgttccgtgtgaggaagtgctccgtgtgaggaagtgttccgtgtgaggaggtgttccgtgtgaggaagtgttccgtgtgaggaagtgttccgtgtgaggaagtgctccgtgtgaggaagtgctctgtgtgaggaagtgtcctgtgttagaggaagtgctccgtgtgagtgtgagagtgtcctgtgttagaggaagtgttccgtgtgaggaagtgctccctgtgaggaagtgctccatgtgaggaagtgctccgtgtgaggaagtgtcctgtgttagaggaagtgctccgtgtgaggaagtgctccgtgtgaggaagtgtcctgtgttagaggaagtgctccgtgtgagtgtgagaggaagtgtcctgtgttagaggaagtgttccgtgtgaggaagtgctccctgtgaggaagtgctccatgtgaggaagtgctccatgtgaggaagtgtcctgtgttagagaaagtgctccctgtgaggaagtgctccgtgtgaggaagtgtcctgtgttagaggaagtgctccgtgtgaggaagtgtcctgtgttacaggaagtgctccatgttagaggaagtgctccgtgtgaggaagtgtcctgttacaggaagtgctccgtgtgaggaagtgttccgtgtgaggaagtgtcctgtgttagaggaagtgctccgtgttagaggaagtgctccgtgtgatgaagtgttctgttaggaagtgctctgtgttagggagtgctccgggtgaggaagtgctccgtgtgagggagtgttcattactgacggttgtggctgctatagccgcagccttactcaccagtctccagaggttctgggcgggcatggagatgttatagtcaatgtagcaggagacctcctgtgaatgggggctcaggggggctgcaacatcatgcctggaaaaccaagaccgagatttcagaaaattccttgaactcctctggaaggcaattactaaatctttcaggcaggaaaaggttgcttttcagaaacaaagccggctcagccataaggggtggcccagtcccatgagttgctgctactgaggacggaggtcttgaggctcggcgatgggagtggacactaaacaggcaggaggccctgtgggaacatctccaaaagaaaaggacactctgctgtggaaccttccacctgttagacgagcgaaccaagtttcagaggaaggaaccgtgcgcccaggcccgatccggtactgctgcgatgccagctggcagtaccaatgctacaacttgcagggctgagctgcccgcccctgcgcccagctggcctggggacgcagcagataagctgggagaaaaggctatcaacctcaatgttaacgaacacccacttcttttttgttttgagatggagtctcactctgtcacccaggctggagtgcaaatggcgcgatctcagctcactgcaatctctgcctcctgggttcaagcgattctcctgcctcagcctcctgtctagctgggattacaggcacatgccaccatgcctggctaatttttgtatttttagtagagacggggtttcaccatgttggcccagcttgtctccaactcctgacctcaaatgatctgcccaccttggcctcccaaagtgctgggattacaggtgtgagccagcacgcccggtcaggaacacccacttcctcttaatccacacactcagtaaccatgtggtaccgcaccatgcacctggcactgtctaggagcagccacccagctgtgaacaagacaaggccctcacagccctctgggaaacagccatcatgccggtgggcagagcgtgcacctgtaggagtgccactaataaaacaaatggtgggggacagcacccaggaggcacttttggatgcagtgacatcccagcagacccctacatagaggggccatgggggagccaagtccaagaacattctcgcagagggagcaagtgtgaagcccccaaggggcccgcaggtggttgtttcagggctggggggagccagggtggcgggggtgaagtgtgtcagggtcaccagggaccttggcgggtgacgggagtcactgagcacagaggaacaacgcaagtgggttgtgcacggtccgcaggccggacaggctgctgcgaggtagagaggtcaggccccaggaggtgggagtagagggagaaggaaggacccctacccagggctggttctgaaggttgagaaacaggatctcccaatggaatcaacatgcaatgggaggggaggggaaggagtcaggtgatgcctcagctactgggccctttccagggagaaccagaaaagccagggccagagaccgcccctgtggagctgggagtcgtggagagctggaggtgagccccgggcagccgggtggaagtccaggagaggtagccccgggactgggcctgtgcagaggcagcaaggccggagggccctcagagactgagagcaacagaggaaaaggaggcggtggagagagcagtcagggaggaaggaggagggtgtgagcaactgtgcccagcaccacgggaaggcaagtcggacaaggacgaaggactgagaaggaagaagccttcacggctccactcgtgcccgagcttccaggcttcttggactcactcatactttaagcttgaccactttaaggaggtgtgcccaaactccattctctgcatagaaagcgggtcaacattcccagcctgtccttgtacactcatccacggggccctgagctctcctaggatgggctgtgctaggtgcttctgtccagtcctcacagagcccctgcttcctcttaaccccgctcccttccgcggccaggcctgggtcccctcccggcatcaaatgtaggtctaagagctgctacacatgcagatgatgggtagacagggggcagcggcccaaggcagggctcacgttttggtctgaacagagaaccacagaggaaacccacaggtgcagcagagcagacggcgggcacactcacgtgttcagggagcgggtggtcatgccgtggaccagctgcaccatgtccccgtgcctcacaggtctcggagggctgctcaccaccagctggtgcctggaagacacagtgctgtcgggaccacacagagcctggtcccctcgaactaacagctgcaccggaggggcacagctctgaattctcatggctgagactgcctcccaacccatgtgtgcctcacatgaggtgaacacaggaaaccaaagcacagacattaattgggctcttttctgaaaccaaaggtcattttccgaatgtgattctacccgcggtcatcacacctgcattgctctgaatttgtctacaaacactacagtgacaaatgtaccatgactgccaaggaatccttctgaagggcattccaccaatgaaagtgtatgagggggccgggcgtggtggctcacacctgcaatcccagcactttgggaggctgagctgggtggaccacttgatgtcaggagttcaagaccagcctggccaacatggtgaaaccccgtctctactaaaaatacaaaaattaccaggatgtggtggtgggcgcctgtaatcttatctactcgggaggctgaggcaggagaatcacttgaacccgggaagcggaggttgcagtgagccgagatcgtaccactgcactccagcctgggcaacagggtgggactctgtcccccgaaaaaataagaagaaaaaaaagaaaaagcccactcgggctgcaggtgctggagctgggcaggcagcaatgggaggacaccatcaggagacagtgaccgggacagctagagaccttgtttgggggcagaatccacaggactggatatgggaatgagagcaaggggcacctctagctgggatgtgtgcaagatgatgctacttttgcaggaggggggttcttgtttttatgaggaagggagagggacacaggtcggggcattgaggctcgcctggaaacttctcagagcagctactgagcaggctgctcactgagggtctcatgatctattcctctgaccttggactcagcactgagctggtgttcaaggccatgacggtgactagagtcagtgagggagggaaagaagggggcccaggactgcatcccagggtctcgcctggccaggccaggaggtgagctctgctctggagtcacaggacctgcactcacctcctgggatcctttacaatccaccagttattgacatctttg

SEQ ID NO: 2806 - DNA, 106 bp, Homo sapiens
tttttagtagaggcggggtttcaccgtgttcgccaggatggtctcgatctcctgacctcgtgatctacccgcctcagcctccaaaagtgttgggattacaggcgtg

SEQ ID NO: 2807 - DNA, 372 bp, Homo sapiens
gacaggaatttacagaaggccagagttggcctctaggggtgactgttcctggtgggttggtgggttgtctgtgggcagggaagagtggggagtggttccagtggtttcttgcctcagtatccttggtggagaagggtctgtttgctttcttttttttttttcgagatggagtttcactctttttgcccaagctggagtgcaatgacgtgatctcggctcagtgcaacctctgtctcctgggttcaagcgatttctccagcctcagcctcccgagtagctgggattacaggcgtgcgctaccatgcctggctgatttttgtatttttagtggaaaggggatttcaccatgttagccaggctggtctagaactc

SEQ ID NO: 2808 - DNA, 688 bp, Homo sapiens
acgtcaggacagtggttcctctggtgttggggggctctaggatccaggacttggaatgttctatttcttggtctgggggctagtcagagggatccgtacacttcttttttcttttgtgagacagtttcactagccaggcatggtggtacaaacctgtagtcccagctacctgagaggctgagataggaggctcaactgagcccggggaggttgaggctgcagtgagccgtgatcgcaccactgcactccagcctgggtgacagagtgagaccctgtttccaaaaaaaagaaaatagctgtctagccaggtgcagtggctcgtgccaataatcccagctattcaggaggccaagacaggaggatcacttgaggccaggagtttgagaccagcctgggcaacatagcaagaccccatccctttaaaaatatgtttttaaattagccaaatatggtggcctgtagtaccagctactcaggaggctgaggctgtagaatcacttgagcccaggagttggaggttacagtgagctatgattgtgtcactgcactccaacctaggcgacagagccagatcaaatccaggaaaaagataactgtctgcaaagtcacattccacagaggccatcctcaacagaggccttagacatttttcaaatttcatgcgttccgaccagaatttgctggtttt

SEQ ID NO: 2809 - DNA, 696 bp, Homo sapiens
acttgaggccaggaggtccagactagcctgtacagcatagcgtctgtcgatctctacaaaaaatacaaaaattagccaggtattggtggtgtactcctgtaatccaagctacccagggggccaaggcaggaagattgcttgagcctaggagttcattgccgccgtgagctgtgatcatgccactgaactccagcctgggtgagtgacagagtaaggccctgtctcttaaaaaacaaaaaattctagtttgatcaagtcattttctcattggacctgccatcccctcctcctccaccggttctcagccaggggcagttctgcccctaggacacactgggcaatgtctggagaactttctggttgccatactctgggttgctcctggcatctgctaggtagaggccatggatgctgcccaacaccccacagcgcacaggacagccccccaatggcaaagaattatccaaccccaagtgcaaatggcagtgaggccgaggagccctaccccagtcttttgttttttaatccatttatgctttgcgttccattattggtacaggagccccagcttctgttgagttcttggggatatgtgagcatctgctgggatatttagagaaagcccctgccagccaggcacggtggctcacgcctgtaatcccagcactttgggaggctgaggcaggtggatcgtct

SEQ ID NO: 2810 - DNA, 325 bp, Homo sapiens
tggcacctctggcccgggcgcagtggctcacgcctgtaatcccagcactttgggaggccaaggcaggtggattgcctgagctcacgagttcaaggccaggctaggcaacatggcgaaaccctgtctctactaaaaatatgaaaaattagccatgcatgatggtgcacgcctgtaatcccagctactcaggaggctgaggcacgagaatcacttaaacacagaaggcagaggctgccgtgagccgagattgcgccactgcactccagcctgggtgacagagcaagactctgtctcaaaaaaaaaaaaaaaagatggcacctctgaa

SEQ ID NO: 2811 - DNA, 5476 bp, Homo sapiens
agatggcggcgcctgaggggtcttgggggctctaggccggccacctactggtttgcagcggagacgacgcatggggcctgcgcaataggagtacgctgcctgggaggcgtgactagaagcggaagtagttgtgggcgcctttgcaaccgcctgggacgccgccgagtggtctgtgcaggttcgcgggtcgctggcgggggtcgtgagggagtgcgccgggagcggagatatggtaagtagcgggtccagggaggggttcggcggtggaggtcggtcggttggcaacagtggggtctgtcggccgactcaggggtctgtggtgagccataaccggagtctgtggactgaacggcgggagtctatgggcagaatgatgaaccatctgggagttctatggtgagccacggtggggggctccttaatagaagtttagtggggactccgtgtggcagttccgtgggaaaccatgatcgggggttcttagggcagagggataagcgggttgtaaggagtcacattgagtggtctgtagtgagccgtgacgaggagtccgtgtccgggtatccgtggacagccgcgactgggggtgggtgcgggtgccaggtgggtctatgagataaacagggaggggtgcgtggagaaccgcgatgggaagtccgcagtgagttacgcggggtctgtgaggcgccacgatggagggtcgccatgacccattagcgagtgtggacgcagggagcgggtgtcggtgggtgcgtgatgggaagtatggagcagagtaataggatgtcagaggaagggatgggggtcagtggggactgtgatggagaggttttttgggggccccgatgtgaaatctgcaggcagagtggggatccctgctgaccacggtggagttgtaatggggggatgagccgccacggtgggggctgcttaaggatccgtaatgggggtgtcctgcaggagggagatggttcagacccagagcctccagatgccggggaggacagcaagtccgagaatggggagaatgcgcccatctactgcatctgccgcaaaccggacatcaactgcttcatgatgtgagcgcgggagagatgggcggggctgacactggcagggtggggtgaggccgatgggccgcgcccctcacatctccatcgcctgccccatcctctgcagcgggtgtgacaactgcaatgagtggttccatggggactgcatccggatcactgagaagatggccaaggccatccgggagtggtactgtcgggagtgcagaggtgagggccatggatggacagggaaggcaggtggggcttcaagggaggaggaggagccacaagggggggttatggggattagtgatacacgtctgtggtgagctggaatggggctccattgtgagtaatagaagatcccacgggaagaggcagctctgccctggacaggggtgcagagtaggtgggtgggtcagtaagggagcgaagaggaagaaagaggttttgggaccattcaagccatccagtgctcactcactttggccctactctctgccccacagagaaagaccccaagctagagattcgctatcggcacaagaagtcacgggagcgggatggcaatgagcgggacagcagtgagccccgggatgagggtggagggcgcaagaggcctgtccctgatccagacctgcagcgccgggcagggtcagggacaggggttggggccatgcttgctcggggctctgcttcgccccacaaatcctctccgcagcccttggtggccacacccagccaggtgagtggctgcataaagtgaatggatgtgtaaagtggttccgtttcagccctgcctgggtccatgatttctgttctgggccccctcctgcagcatcaccagcagcagcagcagcagatcaaacggtcagcccgcatgtgtggtgagtgtgaggcatgtcggcgcactgaggactgtggtcactgtgatttctgtcgggacatgaagaagttcgggggccccaacaagatccggcagaagtgccggctgcgccagtgccagctgcgggcccgggtgagcatggacagagctgggtagggtcaggtgtgggagagctggtgggtccatgcatggttagttaagtctaggcatggataaaccaggtgggattgggcctgactgtatcctgacaggtgggaaggggcctgtcatgtccagatgaatggggcatgacctggtatgctgggctggcagaacacccccaccaaccctgggtagacagagtggggccaggtgttttcaggtggtcatgcatgttggtacagatcaggcagggctgagcattcctggcaatgaggggtagcggggaggtgtgtctggggaggtaaggccaggccaggtgggtagggctagggcaaggccgccctccatccacctggggctgacctgggccttcctcctgccggcacaggaatcgtacaagtacttcccttcctcggtgagtccagccccccagggtggggtggggcatgcgggcagggcggtcagggccagtcctgagattctgccctgcagctctcaccagtgacgccctcagagtccctgccaaggccccgccggccactgcccacccaacagcagccacagccatcacagaagttagggcgcatccgtgaagatgagggggcagtggcgtcatcaacagtcaaggagcctcctgaggctacagccacacctgagccactctcagatgaggacctacctctggatcctgacctgtatcaggacttctgtgcaggggcctttgatgaccatggcctggtgagcagacaggagcatccactggtggaagggtggaggttacagaagcagagagtatccctaatgaggagacagagggtatggaaggctgatatgggacatgagtaggtggtggggttgtcacgagcggggcaggtgggtcagtgcatgccctgcttgcagccctggatgagcgacacagaagagtccccattcctggaccccgcgctgcggaagagggcagtgaaagtgaagcatgtgaagcgtcgggagaagaagtctgagaagaaggtgatggagagggtaaagtggatgtggaaaggcagagggtggggttgagggagaggcagaggtcagaggctgaatggggcaagagccagaaagggctagaatggagcaagggtctggggtctggggctgactttgactccaccctgacctgacttgtcttgctcaacagaaggaggagcgatacaagcggcatcggcagaagcagaagcacaaggataaatggaaacacccagagagggctgatgccaaggaccctgcgtcactgccccagtgcctggggcccggctgtgtgcgccccgcccagcccagctccaagtattgctcagatgactgtggcatgaagctggcagccaagtgagtcattcctgagaggttcaagggagtcaggaagtgcatggtagggcctgaccacagccttctgtatgtctaccagtcaatcagctatccaccagtcaccaaacagccactacccactcacccatccacctacccacccacctgcccgtgtgtccatccagccaccattccgccagtcacctatttacttctccttttgccatttgcgtctattttgccattctcacttactgatcacctcactcattctgttgcttgctaccttccctgcagccgcatctacgagatcctcccccagcgcatccagcagtggcagcagagcccttgcattgctgaagagcacggcaagaagctgctcgaacgcattcgccgagagcagcagagtgcccgcactcgccttcaggaaatggaacgccgattccatgagcttgaggccatcattctacgtgccaagcagcaggctgtgcgcgaggatgaggaggtgagcaagcaggggcgcagcagagcagggcctgtactttgtccttcccagccttattgttccttccattccatgcagagcaacgagggtgacagtgatgacacagacctgcagatcttctgtgtttcctgtgggcaccccatcaacccacgtgttgccttgcgccacatggagcgctgctacgccaaggttggggtgtcagactgagggggcggaccatgtgggaacatcagtgggccagtgggggacagatttgttgtctgggtggtgtcttgggagggcatgcagcgcacatccacagttccctccatttgtgctcatccctccagtatgagagccagacgtcctttgggtccatgtaccccacacgcattgaagggtaagtgagggtgccacgcagtgagaggtggggggttaaggcgggggtcagaagtgggatgtgtgtggagctggggcaggatacgggcaaccagccaggacagatggacctcccttccctccctctactgccctctctactccaaatccccagggccacacgactcttctgtgatgtgtataatcctcagagcaaaacatactgtaagcggctccaggtgctgtgccccgagcactcacgggaccccaaagtaaggttttccctcagctcctcccattttgcccctcctccctgcctcgctgtcccacattcatcccttccttcctcacctcacttttccttcactttttcctctcagcttccctgctgcttcaccctccattcctccttttccatgcctcctcaccgttccctgaaccctccattcttttccttctccctccttgagcccccattcctattctcccttatcaccgctattcatccccccaacctggcctccttgcaggtgccagctgacgaggtatgcgggtgcccccttgtacgtgatgtctttgagctcacgggtgacttctgccgcctgcccaagcgccagtgcaatcgccattactgctgggagaagctgcggcgtgcggaagtggacttggagcgcgtgcgtgtggtaggtttctgtgcggttttggtgctgcatgtggtaggtttccatgtcggacgtggccggggcaggcggggctgcaggtgttcctgcttaggactcctgccgctcccttggcagtggtacaagctggacgagctgtttgagcaggagcgcaatgtgcgcacagccatgacaaaccgcgcgggattgctggccctgatgctgcaccagacgatccagcacgatcccctcactaccgacctgcgctccagtgccgaccgctgagcctcctggcccggaccccttacaccctgcattccagatgggggagccgcccggtgcccgtgtgtccgttcctccactcatctgtttctccggttctccctgtgcccatccaccggttgaccgcccatctgcctttatcagagggactgtccccgtcgacatgttcagtgcctggtggggctgcggagtccactcatccttgcctcctctccctgggttttgttaataaaattttgaagaaaccaaggaa

SEQ ID NO: 2812 - DNA, 5476 bp, Homo sapiens
agatggcggcgcctgaggggtcttgtggggctctaggccggccacctactggtttgcagcggagacgacgcatggggcctgcgcaataggagtacgctgcctgggaggcgtgactagaagcggaagtagttgtgggcgcctttgcaaccgcctgggacgccgccgagtggtctgtgcaggttcgcgggtcgctggcgggggtcgtgagggagtgcgccgggagcggagatatggtaagtagcgggtccagggaggggttcggcggtggaggtcggtcggttggcaacagtggggtctgtcggccgactcaggggtctgtggtgagccataaccggagtctgtggactgaacggcgggagtctatgggcagaatgatgaaccatctgggagttctatggtgagccacggtggggggctccttaatagaagtttagtggggactccgtgtggcagttccgtgggaaaccatgatcgggggttcttagggcagagggataagcgggttgtaaggagtcacattgagtggtctgtagtgagccgtgacgaggagtccgtgtccgggtatccgtggacagccgcgactgggggtgggtgcgggtgccaggtgggtctatgagataaacagggaggggtgcgtggagaaccgcgatgggaagtccgcagtgagttacgcggggtctgtgaggcgccacgatggagggtcgccatgacccattagcgagtgtggacgcagggagcgggtgtcggtgggtgcgtgatgggaagtatggagcagagtaataggatgtcagaggaagggatgggggtcagtggggactgtgatggagaggttttttgggggccccgatgtgaaatctgcaggcagagtggggatccctgctgaccacggtggagttgtaatggggggatgagccgccacggtgggggctgcttaaggatccgtaatgggggtgtcctgcaggagggagatggttcagacccagagcctccagatgccggggaggacagcaagtccgagaatggggagaatgcgcccatctactgcatctgccgcaaaccggacatcaactgcttcatgatgtgagcgcgggagagatgggcggggctgacactggcagggtggggtgaggccgatgggccgcgcccctcacatctccatcgcctgccccatcctctgcagcgggtgtgacaactgcaatgagtggttccatggggactgcatccggatcactgagaagatggccaaggccatccgggagtggtactgtcgggagtgcagaggtgagggccatggatggacagggaaggcaggtggggcttcaagggaggaggaggagccacaagggggggttatggggattagtgatacacgtctgtggtgagctggaatggggctccattgtgagtaatagaagatcccacgggaagaggcagctctgccctggacaggggtgcagagtaggtgggtgggtcagtaagggagcgaagaggaagaaagaggttttgggaccattcaagccatccagtgctcactcactttggccctactctctgccccacagagaaagaccccaagctagagattcgctatcggcacaagaagtcacgggagcgggatggcaatgagcgggacagcagtgagccccgggatgagggtggagggcgcaagaggcctgtccctgatccagacctgcagcgccgggcagggtcagggacaggggttggggccatgcttgctcggggctctgcttcgccccacaaatcctctccgcagcccttggtggccacacccagccaggtgagtggctgcataaagtgaatggatgtgtaaagtggttccgtttcagccctgcctgggtccatgatttctgttctgggccccctcctgcagcatcaccagcagcagcagcagcagatcaaacggtcagcccgcatgtgtggtgagtgtgaggcatgtcggcgcactgaggactgtggtcactgtgatttctgtcgggacatgaagaagttcgggggccccaacaagatccggcagaagtgccggctgcgccagtgccagctgcgggcccgggtgagcatggacagagctgggtagggtcaggtgtgggagagctggtgggtccatgcatggttagttaagtctaggcatggataaaccaggtgggattgggcctgactgtatcctgacaggtgggaaggggcctgtcatgtccagatgaatggggcatgacctggtatgctgggctggcagaacacccccaccaaccctgggtagacagagtggggccaggtgttttcaggtggtcatgcatgttggtacagatcaggcagggctgagcattcctggcaatgaggggtagcggggaggtgtgtctggggaggtaaggccaggccaggtgggtagggctagggcaaggccgccctccatccacctggggctgacctgggccttcctcctgccggcacaggaatcgtacaagtacttcccttcctcggtgagtccagccccccagggtggggtggggcatgcgggcagggcggtcagggccagtcctgagattctgccctgcagctctcaccagtgacgccctcagagtccctgccaaggccccgccggccactgcccacccaacagcagccacagccatcacagaagttagggcgcatccgtgaagatgagggggcagtggcgtcatcaacagtcaaggagcctcctgaggctacagccacacctgagccactctcagatgaggacctacctctggatcctgacctgtatcaggacttctgtgcaggggcctttgatgaccatggcctggtgagcagacaggagcatccactggtggaagggtggaggttacagaagcagagagtatccctaatgaggagacagagggtatggaaggctgatatgggacatgagtaggtggtggggttgtcacgagcggggcaggtgggtcagtgcatgccctgcttgcagccctggatgagcgacacagaagagtccccattcctggaccccgcgctgcggaagagggcagtgaaagtgaagcatgtgaagcgtcgggagaagaagtctgagaagaaggtgatggagagggtaaagtggatgtggaaaggcagagggtggggttgagggagaggcagaggtcagaggctgaatggggcaagagccagaaagggctagaatggagcaagggtctggggtctggggctgactttgactccaccctgacctgacttgtcttgctcaacagaaggaggagcgatacaagcggcatcggcagaagcagaagcacaaggataaatggaaacacccagagagggctgatgccaaggaccctgcgtcactgccccagtgcctggggcccggctgtgtgcgccccgcccagcccagctccaagtattgctcagatgactgtggcatgaagctggcagccaagtgagtcattcctgagaggttcaagggagtcaggaagtgcatggtagggcctgaccacagccttctgtatgtctaccagtcaatcagctatccaccagtcaccaaacagccactacccactcacccatccacctacccacccacctgcccgtgtgtccatccagccaccattccgccagtcacctatttacttctccttttgccatttgcgtctattttgccattctcacttactgatcacctcactcattctgttgcttgctaccttccctgcagccgcatctacgagatcctcccccagcgcatccagcagtggcagcagagcccttgcattgctgaagagcacggcaagaagctgctcgaacgcattcgccgagagcagcagagtgcccgcactcgccttcaggaaatggaacgccgattccatgagcttgaggccatcattctacgtgccaagcagcaggctgtgcgcgaggatgaggaggtgagcaagcaggggcgcagcagagcagggcctgtactttgtccttcccagccttattgttccttccattccatgcagagcaacgagggtgacagtgatgacacagacctgcagatcttctgtgtttcctgtgggcaccccatcaacccacgtgttgccttgcgccacatggagcgctgctacgccaaggttggggtgtcagactgagggggcggaccatgtgggaacatcagtgggccagtgggggacagatttgttgtctgggtggtgtcttgggagggcatgcagcgcacatccacagttccctccatttgtgctcatccctccagtatgagagccagacgtcctttgggtccatgtaccccacacgcattgaagggtaagtgagggtgccacgcagtgagaggtggggggttaaggcgggggtcagaagtgggatgtgtgtggagctggggcaggatacgggcaaccagccaggacagatggacctcccttccctccctctactgccctctctactccaaatccccagggccacacgactcttctgtgatgtgtataatcctcagagcaaaacatactgtaagcggctccaggtgctgtgcccgagcactcacgggaccccaaagtaaggttttccctcagctcctcccattttgcccctcctccctgcctcgctgtcccacattcatcccttccttcctcacctcacttttccttcactttttcctctcagcttccctgctgcttcaccctccattcctccttttccatgcctcctcaccgttccctgaaccctccattcttttccttctccctccttgagcccccattcctattctcccttatcaccgctattcatccccccaacctggcctccttgcaggtgccagctgacgaggtatgcgggtgcccccttgtacgtgatgtctttgagctcacgggtgacttctgccgcctgcccaagcgccagtgcaatcgccattactgctgggagaagctgcggcgtgcggaagtggacttggagcgcgtgcgtgtggtaggtttctgtgcggttttggtgctgcatgtggtaggtttccatgtcggacgtggccggggcaggcggggctgcaggtgttcctgcttaggactcctgccgctcccttggcagtggtacaagctggacgagctgtttgagcaggagcgcaatgtgcgcacagccatgacaaaccgcgcgggattgctggccctgatgctgcaccagacgatccagcacgatcccctcactaccgacctgcgctccagtgccgaccgctgagcctcctggcccggaccccttacaccctgcattccagatgggggagccgcccggtgcccgtgtgtccgttcctccactcatctgtttctccggttctccctgtgcccatccaccggttgaccgcccatctgcctttatcagagggactgtccccgtcgacatgttcagtgcctggtggggctgcggagtccactcatccttgcctcctctccctgggttttgttaataaaattttgaagaaaccaaggaa

SEQ ID NO: 2813 - DNA, 128 bp, Homo sapiens
cccagctactcggaaggctgaggcaggataatcgcttgaacccgggaggcggaggttgcagtgagctgagatcgcgccattgcactccagcctgggcaacaagagtgaaactccgtctcaaaaaataa

SEQ ID NO: 2814 - DNA, 1179 bp, Homo sapiens
ttataaaagtaactcagtatccctttgcctacaagagttttagaataatttcagatagggaagctatgcactgattacccctaaacaagtgggatcacagcatgggcaaaaaggagcccaagaagtttggcattgagctggggtagtagtatcccagacccagaccatgagccaaatgaggtatagacaggccaactagagccagaatattccacaaagatattttcaggcctgtggtgcgtagacttttggcatgccgaagtgccagtttattatgggaatcacaggcattgccatcccatatcctgcaatagtctcccattcaatacctctgtaataaggtggttccagaactggcttcctgtctaagaatgttggtactaggaactaacttaagatttttctttcctctttggaagaaccatacagttgtgtatgtcaacccaggcagagagactaagaccttcatttcctatgaagagggatctccagttagcagtcctttaaaaccatcatattaggaaaggactttggcagagaccttctgcatagtcttagagggtgagggccctcaattttctgtgggtcccatcctgttacctactttcaacctaggctcctgtccaccgtggatcgcaccaatatcaaatgaggaggtgtcgttaagtgagggggattctgtttgggtattatagactcatagatggaaagtatctcattttgaggctagaaaggggacaaaggaagcactaattgtgttttttcagatgtcatacaactaaggcaatcggcaaaagagagatcaatttaagagaccattgtccatttagtaagtttaagagagcattgaacaagccattatgcctctattaggcctgctttctgtgaacagtacaacagatgggccaggcactggctcacacctgtaatcccagcattttgggatgctgagacaggcagattgcttgagccttgagcccaggagtttgagaccagcctgggcaacatggtgaaatcctgtctctacaacaaataaaaatgtttgcagggcatgctggtgcgctactcaggaagctgaggtgggaggatcacttaagtactggaggttgaggctgtagtgagctataattgcacccctgcactctagcctggggaacagagtgagaccttgtctcaaaa

SEQ ID NO: 2815 - DNA, 1179 bp, Homo sapiens
ttataaaagtaactcagtatccctttgcctacaagagttttagaataatttcagatagggaagctatgcactgattacccctaaacaagtgggatcacagcatgggcaaaaaggagcccaagaagtttggcattgagctggggtagtagtatcccagacccagaccatgagccaaatgaggtatagacaggccaactagagccagaatattccacaaagatattttcaggcctgtggtgcgtagacttttggcatgccgaagtgccagtttattatgggaatcacaggcattgccatcccatatcctgcaatagtctcccattcaatacctctgtaataaggtggttccagaactggcttcctgtctaagaatgttggtactaggaactaacttaagatttttctttcctctttggaagaaccatacagttgtgtatgtcaacccaggcagagagactaagaccttcatttcctatgaagagggatctccagttagcagtcctttaaaaccatcatattaggaaaggactttggcagagaccttctgcatagtcttagagggtgagggccctcaattttctgtgggtcccatcctgttacctactttcaacctaggctcctgtccaccgtggatcgcaccaatatcaaatgaggaggtgtcgttaagtgagggggattctgtttgggtattatagactcatagatggaaagtatctcattttgaggctagaaaggggacaaaggaagcactaattgtgttttttcagatgtcatacaactaaggcaatcggcaaaagagagatccatttaagagaccattgtccatttagtaagtttaagagagcattgaacaagccattatgcctctattaggcctgctttctgtgaacagtacaacagatgggccaggcactggctcacacctgtaatcccagcattttgggatgctgagacaggcagattgcttgagccttgagcccaggagtttgagaccagcctgggcaacatggtgaaatcctgtctctacaacaaataaaaatgtttgcagggcatgctggtgcgctactcaggaagctgaggtgggaggatcacttaagtactggaggttgaggctgtagtgagctataattgcacccctgcactctagcctggggaacagagtgagaccttgtctcaaaa

SEQ ID NO: 2816 - DNA, 357 bp, Homo sapiens
agaacactaattttagtttttaaatactcaattttagtaactctatagaattcatacatttctacaaatgtaagtcaatcgaggggagtgtcataccaataggaaccccaaaaaggacttaaatttttcagaagtttatagcccatgaggaatcccaaaggccattgaaaactgttggtccccggtaactgctatatatctgccattcccctagcatttgggataaaggagagatgctgtattcaccatcttgaatagaaaatcctctggtttcttttagatcttaggcatcaccataaacaagtttgttctgtatacatggtttatgggtgttgtatgtatattcctcttcatcag

SEQ ID NO: 2817 - DNA, 454 bp, Homo sapiens
gtaaatatttcgtgaacgcctgttatgcaccaggcaccatgcttggggatacagtgataaacaagactgtatggtccctgccccagtagaatttatagttttgtggggaagacattaatcaaataataactcaaattattacaggttatgacacatggaggaaacagggtgagagagagaagagactttagaaccattgttagggaaggcctttctcaggaagttgcatttaaactgagcactcagcatgaagtggagctacccatgtaaaagggtgagggggagttctattccgtaagaggagaaataatatgcaaaggccgtgaggcagataaaagtttacagtgttaactgaaagagtggttggagcctgattggattgtaattggagcctggtgaatgaggagagtggcatgagctgggcaggtccacagcattcaagatttggtaggcc

SEQ ID NO: 2818 - DNA, 452 bp, Homo sapiens
gtaaatatttcgtgaacgcctgttatgcaccaggcaccatgcttggggatacagtgataaacaagactgtatggtccctgccccagtagaatttatagttttgtggggaagacattaatcaaataataactcaaattattacgttatgacacatggaggaaacagggtgagagagagaagagactttagaaccattgttagggaaggcctttctcaggaagttgcatttaaactgagcactcagcatgaagtggagctacccatgtaaaagggtgagggggagttctattccgtaagaggagaaataatatgcaaaggccgtgaggcagataaaagtttacagtgttaactgaaagagtggttggagcctgattggattgtaattggagcctggtgaatgaggagagtggcatgagctgggcaggtccacagcattcaagatttggtaggcc

SEQ ID NO: 2819 - DNA, 2573 bp, Homo sapiens
gcagtgcctctccgaccaagtattggatgattcatacgtaatggactatgatcattttctgtccatgttttctattactatatgctggtttttttggagcaataagattactttttttctgttctattttgagcgaatcctttacagtttttgataagaactgtgacatttgttctttgttgataaaactcctgaaaataactcacaaggccagtgctgcactctggcacatgtaggttgttttgagggtttgttggttggttggttggctggttgattggttggttggtttagaacactaatgtacttgttatgaaccaaactctggtcttacagtcttaaattccacctcatggggctgttttctctgttagcaatgaaacctgggccaggtgtagtggctcacacctataatcctggcactttgggaggctgaggtgggaggattactggatcccaggagtttgagaccagcctgggcaacatagtgagaccctggtttctataaataaataagataatcaaaccagaaagcaggcattttagtaacagcctgttgaattttaaggtgaatcaaggtaattttgcagaatgcgttcttgcaccgaaatgtccctgaccacatatcagtggtatagactgaacagtgtgcttcagggtcatgtgctgagtgcactgatcactctgctgtggcccagggcatctgtacctgttggacaagattatgataattcagaagtgaagtaaaatgcctccctctgatggcaaaaagccaacctgtttgcaaaatcacccttattgaagggtggcatggctgtggtccctccctcctgttacttgcatcaccaaccaaactaaaccaaaccatacctgggcctgttcagctggacttgaaatcagtttcctttttctctcccctttgcagcacttttcagtttccagctttgtcattctgtggcctttgctgtgacaatgctgggaagggttagaaatcctgtcacctccatccacaaaggcacagttccacgccctgtgataagatatcccctcttctctcccagactgtctccttaagcctttcaaactgagccccttgctgttggggtaatcacccttaaggccgccttgatgcccctctctccaatcaagtccaatagtagcattaactgagaagcactacacctgactggcttcactgaagcttaagtggttgaggatgaatcttcggtgtaaaatcttttactataaggatatattttaaatatttcatatcccatcaagttggaggttaattttatccatcacaatgagtcatgatttgttgcacccaaaaggagcagaaacacaggtgatgagatatgggaggtggcaccatggtgctttggaggcgttggtaagatgtgaccctctgttgcctatgcccataaaccagtggtgggagtggccatggagtagatggcaggggcttgttgaagggattgaaagctctcctaggctaggcatggtggctcacacctgtaatcctagcactttgggaggctgagatgggaggatcacttgaggttgggccagcctagccaacatgataaaaccccgtctcgactaaaaatacaaaaattagccaggtgtggtggtacacgcctgtaatcccagctactcgggaggctggggcaggagaatcgcttgaacccaggaggcagaggttgcagtgagctaggatcacgccactgcactccagcctgagcgacagagtgagactctgtctcaaaaaaaaaaaaggctctccaaagtgtcatgttcagcaccaaaagggaataggcacagggtgaccccagaagttcatttgtgacacttaaatctccagatatttatcccacgtgggtctgatgcgggctcagcactaaattaactgtatgtggaaagtgtcaattgcagagccttctgtatcgatgaggcttccgccacttgtccatgcttagcccccttgcctcttccttgggagcatgctttctattcctatgtgaaacagcctgacataagtgaaaggatttgggctcaagcaaacatgagatgtgggttcatatcttggcaccactcctgatagctgtgtgatcatggcaaacctcgttttcatcgtctgtcaggtggagatgaagagaaatggtgcatgtaaagtgctcagcatctgtgcttagcaggccatagtctccctgcctcctttttcttgagtaagcctttagaactttctgactcctctagagaaggcagagaaacgaatatattttgggtgccatttggagtctgggtcttttgttaaaattgtcctgtattatgttgaaaagtgtcggttacccccaggctctgggggcatctgtgatcatagaatactgccatgcttattttgcctttctatgttgagattaattcactgacgcctcattttccacgtgcatctgtcatagtctgggtaccagattgtatttagagaatggctcttgccactgttatgtacacacagatcgtgtgtgtaaacaagcaaattaaagtaaactgagataatgaaatcccatatt

SEQ ID NO: 2820 - DNA, 956 bp, Homo sapiens
acctttatctggaacactccttttgtccctagagtggggacctaaggctcagcaaaagggcagaatcaggaaagcctttatggtgtggctaaaggagtggccagagccttgggactcctttgctgccttctccctggttccagttgtctttagattttcacggctcttactgctgttacttaacagtattttccagccaggcatggtggttcacacctctaatccctgcactttgggaggccgaggcaggcggatcacctgagattgggagttcgagaccagcctgtccaacatggcgaacctcgtctcttctaaaaatacaaaaattagctgggtgtggtggcacatgcctgtaatcccagctactcaggaggctgaggcaggagaattgcttggacctaggaggtggaggttgcagtgagctgagatcgcaccactgcactccagcctgggtgacagagcagactccacctcaaaaaagaaaaaacaaaacaaaacagtatttcccactggtcagttttgcataggcatctatttcaggcagggtttttttcttttttttgagatggagttttgctcttgttgcccaggctggggtgcaatggcccgatctcggctcaccgcaacctccacctcccaggttcaagcgattctcctgcctcagcctcccgagtagctgggattacaggcatgcgtcaccacaccaggctaattttgtatttttagtagagatggggtttctccatgttggtcaggctggtctcaaactcctgaccgcaggtgatccacctgcctcggcctcccaaagtgctgggattacaggcatgagccaccgcgcccggctcaggcagggttctttataaaaacagcctgatgcctgaaggacactctctggttgtaatatttgtttcatccatgaagtgtttaaatattgcaactgacttgcgattagccac

SEQ ID NO: 2821 - DNA, 1868 bp, Homo sapiens
tgcaggatgaaaaagatttgcttttttactttctacttacagtcatattgtagctcatttgtaaaaatcattccacttgtaaagttaaccatccattagtcagtaagagctgttcccactaattggtggactcctggggaaagcaacatagttagaggttagagtaatggaccaggtgcccttgacttctatttctggttccttcacttacttgctgtgtggccttaggcagttttccttaatttctctgggccttgtttcacccaagaagtaaatttcccacttgatcttcttgagggatgccaaaagatcaaaggaacgatgtttgcagggctttttaaagatgcttaagtgacgtgcactagaaaccccttgatttaataggtatgaattaatacattctttgattattggtagaactaagtattttagctttttaattagctccttggatataattggccataggcgttacacaaatccctaagggaaccggcccagtcatcctgatgatcattatgggtgcctgctgtgtttttatgcggagaggcagagtgtgttggcagctttacatggtggtgggttatgacggctgcactgagccagcgcaagctcgggaggctcccctgaggtggcgcagaccatcggggctgccccgaaaccagctcagtcagagcccaccttaccctgtttacaaaggggaggcaaggtggagcatctcctgtttgttgatttgattgttgtgtttgctctgccagcctcagagtgaggtatttaacaggcaggacttctaagcctcaagggcccatgggcagaaatgccccagaccccatgaagaaaatgatgcttttccagcaagctgcaccccggccctgggcaaggggcagctgcttccaccctcctggtccctactgccttcatattcctgctccctagctcaccccctccctcctaagtgaagagaagtcagatcaggctactgttctgacatgcacaccttctcttctgttcctgggacccttttgtttttgtgtttgttttaagaaggagccttgctgtgtcgcccaggctggagtacagtggcatgatcctggctcactgcaacctctgcctcccgggttctagtgattctcttgtctcagcctcccaagtagctgggactacaggtgcccaccactacacccagctaaattttgtatttttcgcagagacggagttttgctatgttggcccaggctggtctcaagctcctgacctcaagtgatctgcccacctcagcctcccaaagtgctgggattccaggcatgagccaccatacccagcccattcctgggcccttctaatgtctcaacgcaacaatctgatcctgaaaaccacccatcccttcactttactcttacccttccttcccaggattgcatttgcaaaacaaaaattcatgcttaaagcaagcatcagggggaatccattgttctgcaccctgccacaaaaatgtctagtgcatcatcccggggataggcctgggagccgggactccatggttcgcagccaagggcagaagctggaggcagggccttcccacgggcagctacagcagccacagacggggccatgcagcagagtccagatggttttgttcgggctctttggcagacgcgcagttctccacgctgaactgcatcagggagcacttaaagcaaagcttggtttgtgttttattttgcatggaatgggggagacaggagttgccagggaaacaacccctcggagcattctgctctggggttcttcatcgggtggggaggggggcttcccatgaaaggcacaggggttttctcaagcgtgctcacacctggttctgctttctt

SEQ ID NO: 2822 - DNA, 265 bp, Homo sapiens
gagcctgccagcaccagtacatgccaggacctaaggccaggatcaagtccacaatgagcagggcccagtgcaaaatggaaatgcagggccccttgatcaaacccattaggtgggttcagtgtacactgctcaggggatgggcacaccaaaatctcataaatcaccactaaggaactaattaaccaaataccgcctgttccccaaaaacctatggaaattaattttttaaaaagcgtatagcaacaagacaaaaaaaaagaataaa

SEQ ID NO: 2823 - DNA, 342 bp, Homo sapiens
ttgcctgcggcccagagagagcccatttctcaatacaggggaattgcaatagagacagagattaattcatgcagaaccagccgaacaggaggccggagctttattcttacatcaatcaccccaaaaattcggaggctagactttttcaaggatactttggcaggccaggggattcgcttctggctggggccatggggtggggtggggtgaggtggtggggcggcaggggtggggaggtcatcggatccaggtggagctactgatggtcagaaatgcaaaaacctgggccaggcacggtggctcacgcctgtaatcccagcactttgggaggccgaggcgagc

SEQ ID NO: 2824 - DNA, 4369 bp, Homo sapiens
gcatccaacagctgaatctggtggaaaacgaaaagtgattaaatttttaaaggaaaaatttcattttaagaaaataatcatgattggagatggtgccacagatatggaagcctgtcctcctgctgtatgtattaagggtgctaattttttttcaggttgtacttttgttttatttatttatttattatttctttattttttttgagacggagtttcactcttgttgcccaggttggagtgcagtggcgtgatctcagcttactgcaatatccgcctcctgggttcaaaccattcttgtgtctcagcctcccaagtagctgggattacaggcacacgccaccatgccagctaagttttgtatttttagtagagacaatgtttcgccacgttggccatgctggtctcgaactcctgacctcaggtgatctgcctgcttcagcctcccaaagtgctgggattacaggcatgagccaccgtgcccggccgtacttttgttttagacagctgatgcatcctatattcccaacactttgggaggtcgaggcaggaagatggcttgagcacaggagtttgagaccagcctggtcaacatagtgagaccccatctctacaaaataaataaataaaataaaataaaaacagctgatttcgaactacataagatttaaaacaggagttaacaaaaacaactctcattacaagataaaaatgaagtaataaaaacacattcaatcttgttttgtcaactttgtgcaaacccaagaaaagttgtgaataaggaactaaaaaccttttaaaacttttaacaatgccttatccccgtaggatgggcaccaccttttagcctaggtgtgtgctcaataagttgatttcatttccccaaataataccatcaacaactcataaccaagattttaatgtcattttatgctttatatactagctcctcatacattacctcatttaatcttcataacagccctgtgaagtcaaatattatgttttgttttgtttttcttagatagagtctcactctgtcacccaggctggagtgcagtggtgtgctctcagctcactgcaacctccgccctctgggctcaagtgattctcccaccttagcctcccaagtagctgggaccacagacgcattccaccacacccagctaagattttgtgtttttggtagaggcagagttatgctatatttcccaggctggtctcaaattcctgagctcaagcgatctcccctgctttggcctcccaaagtgctggtatcacaggtatgaaccaccatgcctggccaaatgttgtgttcttcttactgataggggaactgaggcttgcagagattatatgatttacctgtaacatatcagagcattttgtttttatttatttatttatttttattttttggagacagggtcttgctatgttgcccaggctggagtgcagtgttgcgatcatagcttatcacagccctgaacttctgggctcaaatgatcctcccgcctcagcctccttggtagctgggattacaggtgtgtgccactgcatcccacaccacaacagcattttattcctctgaattaatgtcattttctgagactagcagaggttttattttttgagacaggttcttgctctgtcacctaggccggagtgcagtggtgcaatctcagctcattgcagcctcaacgtcccagaccaagcgatcttcccatctcagcctcctgagtagctgggactgcaggcgcatgccaccacacctatctaattttgtttatgttttgtagagatgaggtctcactatgttgcccaggctaatcttgaactcctggcttaagtgatcttcctgccttggcctgccagagtgctggggattacaggtgtgagccaacatgcccggccagggattttatttctaagcattttaaaatcaatgctatatatatgtgtgtgtgtgtgtgtgtgtgtgtgtgtgtgtgtgtatacacatacacatatacgtatatatatgtgtgtgtatataaatatatacacacatatgtatatatatgtgtgtatataaatatatacatacacatatacatatatgtgtgtatatatatacatatatagtatatgtgtgtatatatataatcaaatgctatatagcaagtgtcataaatatcaaatgtgtccatttcacatagggctttgcttttgccatgtcattctaacgtaagaaaaactacaccaaaaatatagtgtggccaggagcggtggctcacgcctgtgatcccagcactttgggaggctgaggcgggaggattgcttaagcacagaggttcaagaccagctgagcaacgtggcaaaactctgtctctaaaaatttattcagggattgtggtgtgcacctgtcatcccggctactcaggaggctgaggcaggatgatcacttgagcccagaagttcaaggctgcagtgagccatgacggtgccactgcactccagcctgggtgacagggtgagactctgtctcaagaaacaaaaaaggaatgacaaaattagatgggtgcagtggagcatacctgtaatcccagcactttggaagctgacgcaggaggaggttgagagcagcctggcaacatagcaagaccctacaaaaaataaaaaaaagtagccaggcgaggtggggcatacctggagtcacagctactcaggaggctgaggcatgagaatcacttgaacccaggaggcagaggttgcagtgagtggagattgtgtcactgcactccagcctgggtgacagagcgagactccaaaaaataaataaataaataaaaataaaaatcatttctctctcttttcttccttcttaggatgctttcattggatttggaggaaatgtgatcaggcaacaagtcaaggataacgccaaatggtatatcactgattttgtagagctgctgggagaactggaagaataacatccattgtcgtacagctccaaacaacttcagatgaatttttacaagttatacagattgatactgtttgcttacagttgcctattacaacttgctatagaaagttggtacaaatgatctgtactttaaactacagttaggaatcctagaagattgctttttttttttttttaactgtagttccagtattatatgatgactattgatttcctggagaggttttttttttttttgagacagaatcttgctctgttgcccaggctggagtgcagtggcgcggtctcggctcactgcaagctctgcctcccaggttcacgccattctcctgcctcagcctcccgagtagctgggactacaggcacccgccaccacatccggctaattttttgtatttttagtagagacggggtttgaccgtgttagccaggatggtcttgatctcctgaccttgtgatccgcctgcctcagcctcccaaagtgctgggattacaggcttgggccaccgcgcccagccaatgtcctagagagttttgtgatctgaattctttatgtatatttgtagctatatttcatacaaagtgctttaagtgtggagagtcaattaaacacctttactcttagaaatacggattcggcagccttcagtgaatattggtttctctttggtatgtcaataaaagtttatccgtatgtcagaacggatttgtggaattttcagttctgcctcttgcatattggaatacccaatatttcaggtaccgtgttgaagcataaatagcccccaggcaagaaacaggcttaagactctactttgcttagtgctgggtacaatgtcctcaccccatgagcccactcccacttcctgaagccctgggacctggaaagtccttttttttacttcttgggatttgtcatatatgaaatgttacaaaagttttttgttttttgttttcctccaatataacaatagagtcttaaacaaaagtactgattaaaaatggatatttgggctcaggcctgtaatctcagcactgtgggaggacaagttaagaggatcacttgaggacaggaattcgagaccagcctggacaacagagcaagaccctgtctctacaaaaaataaaaacattagctggatgtggcggcacgcacctgtagtcccagctacttggtgggctgagatgggaggatcccttgaactcagtagttcaaggctgcagtgagctgtgactctgccattgtactccagcctgggtgacagtgagaccccgtctcttaaaaaaaaaaaaaaaaaaaagatattcgaaaatcacataaagtaaaagaaataaaaacaagttttactaatcacaaaggccagcattttcccctaaatgaattaaatattaataactcct

SEQ ID NO: 2825 - DNA, 474 bp, Homo sapiens
agcttgtaggtgctcctgcgggcgcctgggctgctggcagaggacagtgcccgggttcgtctcgcagccagaggccagaggcaggccaggtgaggccatgctcttccctgtctgcacaccacactgctggcaagtaacacaaaacagagactggctaccccaaggggcaggaggcagcggaaacctgaggctcagacactagtgaggcgttccagctcagggccaaaatcagagccagggcagctgtggactctggctatggcgtctgtcgtacaagtgagaaacgaaaagaatgactgtcccgtgtcattcagcaaaacacatggtgtctttggaggtgaagagaggtgccaagcaccactcggttttcccagatttcctgtaggaggaaaaccacttggttctatgctgtggctttcacgccaggagctcctaggattgaggacgtctactgattgtatcacagtcgaaggg

SEQ ID NO: 2826 - DNA, 474 bp, Homo sapiens
agcttgtaggtgctcctgcgggcgcctgggctgctggcaggggacagtgcccgggttcgtctcgcagccagaggccagaggcaggccaggtgaggccatgctcttccctgtctgcacaccacactgctggcaagtaacacaaaacagagactggctaccccaaggggcaggaggcagcggaaacctgaggctcagacactagtgaggcgttccagctcagggccaaaatcagagccagggcagctgtggactctggctatggcgtctgtcgtacaagtgagaaacgaaaagaatgactgtcccgtgtcattcagcaaaacacatggtgtctttggaggtgaagagaggtgccaagcaccactcggttttcccagatttcctgtaggaggaaaaccacttggttctatgctgtggctttcacgccaggagctcctaggattgaggacgtctactgattgtatcacagtcgaaggg

SEQ ID NO: 2827 - DNA, 474 bp, Homo sapiens; identical to SEQ ID NO: 2826

SEQ ID NO: 2828 - DNA, 342 bp, Homo sapiens
gctcccccaggcctgcttgcaccccccagtggggaatcctgaactccacaaagggatggatcactgcatgcctccttttccagatttgtactttggggcacagaattcacatggttcccagctttgcccacaggaggctacagaattaaatgttggcttagcctatactgtccctccatgccttcaagaaagttgaatccttctggtaattggggagaaaaaattccctctgcaattcgtaggtatagccagtgttttcatgacttctatttgtataaatgatttccatgtttattatatcatgtaatctctaaaacaaccctgtgagcccaccaatactga

SEQ ID NO: 2829 - DNA, 87 bp, Homo sapiens
ctcacacctgtaatcccagaactttgggaggccgaagcgggcggatcacgaggtcaggagttctagacaagcctggccaacatggtg

SEQ ID NO: 2830 - DNA, 364 bp, Homo sapiens
ctgcttcctgtgctgtgcagagctcccccaggcctgcttgcaccccccacgtggggaatcctgaactccacaaagggatggatcactgcatgcctccttttccagatttgtactttggggcacagaattcacatggttcccagctttgcccacaggaggctacagaattaaatgttggcttagactatactgtccctccatgccttcaagaaagttgaatccttctggtaattggggagaaaaaattccctctgcaattcgtaggtatagccagtgttttcatgacttctatttgtataaatgatttccatgtttattatatcatgtaatctctaaaacaaccctgtgagcccaccaatactga

SEQ ID NO: 2831 - DNA, 87 bp, Homo sapiens; identical to SEQ ID NO: 2829

SEQ ID NO: 2832 - DNA, 87 bp, Homo sapiens; identical to SEQ ID NO: 2829

SEQ ID NO: 2833 - DNA, 364 bp, Homo sapiens; identical to SEQ ID NO: 2830

SEQ ID NO: 2834 - DNA, 158 bp, Homo sapiens
aaaacttgaaatattctagaaagtagagcaaaaatccagagagaaggaaaatagaagaagaaagacgcaagtaatagagcacccatttagaaggtctgacatccaactaacgggttctacagagaacagagaatgtaaaaggaaggaaatcatcagtg

SEQ ID NO: 2835 - DNA, 21423 bp, Homo sapiens
agaacccgtgaagactctgagaagcctggtcaatatccgaaaggacacactgaggctcgtcaagtaagttcccagaggctggggccaggtcccaggcaccttcctttggggaggctgggggctgggggacagacttcccaaggaactcatacagcagtttccggcagccccagagcttgcttctctgggcctcagacaggagtgcgggcgctactttctgctgagatcaggccgtccacacccatgttgttcagcactggatgcaatcgtctgtgtttgtgaaaaactttcgcttgcctagaaatgcttagtatccttattttatggatattttttaaaagggaagaagaattattaagggaaaatgggaatttttgcagctactccaacaagccaatgtaaaaatgggaaatttgaacttagaatatcaaatcctttattttattgctatattttctttttcttttctttttttttttgagacggagtctcgctctgtcacccaggctggagtgcagtggcgcaatctcggctcactgcacgctccatctccagggttcacgccattctcctgcctcagcctcccgagtagctgggactacaggcgcccgccaccacgtccggctaattttttgtatttttaatagagacggggtttcaccatgttagccaggatggtctcgatctcctgacctcgtgatccacctgccttggcctcccaaagtgctgggattacaggcgtgagccaccgcgcccagccttctttttcttttttattccctatatcatgtgtctgttctctaaggaactcatagtgcactgggttggttgcttaatcctcatcatcaatgttaattatcgtcatttgccttcttggtgccatccttgagacagtgtaatttttagtctgatacattcccactgcccgccacccctagatgatatgtctaccaaggctgtctgattctctggtgaaaaaatttggttagggcaaatcaaggtcccagatttttctgaataggcaaggaagatgactcagagaccatctcatgcttgtatagaacagccttattagcattacaatgtttctgtctgatatatatatatatatatttgagacagagtctcgccttttttttttttttttttttttttttgagatggagttttgctcttgttgcccaggctggagtgcaatggcacgatctcggctcactgcgatctcggctcactgcaacctccacctcccaggttcaagggattcttctgccttatcctcctaagtagctgtgattacaggcatgcatcaccacgcccggttaattttgtgtttttagtagagacagagtttctccatgttggtcaggctggtcttgaactcccaacctcaggtgatctgcccgtctcagcctcccaaagtgctgggattacaggcgtgagccaccgcacctggcccagagtctcactttgtcacccaggctgcagtacagtggcacgatctcagctcactgcagccttaacttcccgggctcaagcagtcctcccagccctaagtaaccactaatctattttctgtttctctctcttaattttttatattttatttgtccctgaagtttctgctggttccccagctatgcttctctccaccccagggtcaactctggggaggagagattcaaggaggtacctgtctgctgcagaacagtcccccgacctgacccaggggagttcatccagcagcagagcagactaacgaggcctctggggcctgccattgccagctactctgtccacttggtttctctcatcacatatggcacattcacacatttgatggagaccattcaagggcctgagctgctgtgaggtcatagcctctgccgtggcagcctggctgcagctctagaataggatgaagcagctgtcatgcgctagaagaaccagacttggaagcagcagagcagtttgcctcccaggtccacagatgcttgcttgaatgagtgtctgagcttcaggttcttttatctgtaaaatggtgataatcaactttacctttcatggtggttgtcaaaattaaggtaacagaagggaaaacacctggtgttcaataaatgttaacttgaagggtgttctttgttttgtttttctgtgattatgggaataaattctgattctcggatttccaggtaaagatggaggattgaacacctacttttgcttcctctgaaaaccccattaagtaattataaacatgtatttaaaaggcataaatctggccgggcatgatggctcatgcatgtaatcccagcactttgggagaccaaggcgggcggatcaccgaggtcaggagttcaagaccagcctggccaacatggtaaaaacccgtctctactaaaaatacaaaaattagccagacatggtggcacgcatctgtaatcctagctgctccggaggctgaagcaggagaattgcttgaacccaggagacagaggttgcagtgagccgagattgtaccactgcactccactctgggtgacagagtgagactccaactaaaaaataaaaaataaggcccggtgcagtggctcatgcctgtaatcccagcactttgggaggccaaggcgggcggatcacgaggtcaggagatcgagaccatcctggctaacacagtgaaaccccgtctccactaaaaatacaaaaaattagccgggcatggtggcaggcacctgtaatcccagctatttgggaggctgaggcaggagaatgatgtgaacccgggagacagaggttgcagtgaggcgagattgtgccactgcacttcagcctgggcgacagagtgagactccatctcaataaaataaataaataaaaaattttaaaaatttctttaaaaaggcataaatctgtaaatatttggagaatgggaagagagcaacagcaacaacattttagaagctggaaacacatagtgaacgttaaatgacttagtagacccaggaaatcagaatcctgaactagcagaaagaaaagctgagaatcacccaatttatactgtgatattatcccccaaagggttcagaaattagcagtgccaggtccctctagaagttgaggtgggaggctaaaatgaagaggattggtagaaagtctgccttcaaggtaggcagatcctctcccttgtaccacacagccagaactacattcctacaccttggccaaaggcaggcagatgactctccctggaaaggtcaaaacagagaatctctggacaagagagacccaggcacagctaatggccagtactaaaaacaggctaaccagcctgggcaatatggtaaagccctgtctctacaagaaatacaaaaattagccaagcatggtagtgcacacctgtagtcccagctacttgggaggctgaagtgggaggatcacctgggcctagggaggtcaaggctgcaatgagtcacgatcacagcactgcactccagcctgggcaagagtgagaccctgtctcaaaacaaaacagcaggtgagtggatcctggcatactggatgttgagccctccagctgcctctccattctgcccctagaatgctggcagccaggcctttgtcaagagagaggaaaactgttttctggaaattggacctgcctggataggaaaacctaagagactagagttagaggttcctcaacagatccaggtcagcccacagtgaagcccaggatccccaagtcctgctgtgcactcagagctctaatcagcagtttaaatatcttaaatacaagcagacagccacagattcttagatgtgtaaggaatgcctataataggaaagacagtagcaaaacaaaccaacattttaaaacaacctaactaggccaggtgcggtggctcacgcctataatcccagcactttgggaaggtgaggcgggtggatcacttgaggtcaggagttcgagaccagcctggccaacatggagaaaccccatctctacaaaaatacaaaaaaattagctgggcctggtggcacacgcctataatcccagctacttgggaggctgagacgggagaatcacttgaatccaggaggcagaggttgcaatgagccaagatcgtgccattgcactccagcctgggtgacagatcaagacttcatctcaaaaaaaaaaaaaaaaaacctaactaggccgggtgtggtggctcacacctctaatcccagacctttgggaggccaaaacaggaggatcacttaagcccaggagtttgagaccagcctgggcaacatagtgagaccccatctctatataaaataataataaagtaaaaaaaatctaattggaaacaaaagctatgcaggaagaagaaaacttcattaatagtctcaaagacatgagagaagttatctttttctttcatggacacaatgacacaaagtgtttatgaaaccaaaaaaatagcttttagaaattaaaaacagggagcagaaatgaaaatttcaatagaatgataggaagaaaacttgaaatattctagaaagtagagcaaaaatccagagagaaggaaaatagaagaagaaagacgcaagtaatagagcacccatttagaaggtctgacatccaactaacgggttctacagagaacagagaatgtaaaaggaaggaaatcatcagtgacatagaatttaagaaaacttctcagaaccagagggtacaagtttctaaatggaaaggaccaccaagtgcccacacagtggctgagaaagaggaccgtctgtaagctttcagaagaagaaggatcaacagttggaacgacttcagacttcttgggagcaacgctgggaggtgaaaaataaggcagtgaaaaggctttcagtgtcttttagaaattatttataatctagaatactttgctcagccaaactttcagtgaagtgtgaatgttgaataatagctctcaaaagtttatttcccaacacaccctttttcaggaagctggcaggacacgtgctccaccgatatgaaagaataacccaagacagaggaagacttgaggtgcaggaaacatgagcttctacaggaggacagaggcaaaagggacccaccaggatgttggagggggagagagattccagggtggcgactgggagccaggtgcagagggccaagtacagatgggagcaagtccaagggacctcctcaataagatgaaatgaatagaccgcttggtgcatctgaacgtcttgagagatttagacagccccagagagcttgggttggaatttgtgatgagtacataggaaactacgcaactggaagaaaaaaaaaaaaataggatgagcactaagaaaaagttatgcaggaaaagaaaaataatcatagattataagtttgtgtaatcacagtaatacagacacaaatgtactggactattataataaaatcatgatgcagctacactggggggatggcggagttcctacatggagcacagtgaggaaagagaaagaaatccttgtttccatagtaggaaacccatagatagcgcctgaaactgaaaaatcaagaagtagtaacccaagtatattttttagaaacgtgggtaaatgccaaaatgatcactaaaaggggtgtcctctgaagacgaggaaagggaagaagtaaggcctgctgttttttgccttgaggaaactatttaaactatgtgattaataacttttattaaaataaaaacaaaagtgccaaatgcacaatggtgtagtggtagcactatgagataccagaagtaacctgaatgcccagcaacatgggtcatgaagcactctgtgatcattcagaatgaagaggtagacctatgcttatgatcattcagagaagcccacaatatattgctaatttttttaaaggtaaattttaaaatattgatatgctactctgcaaatgctgagtctctggttttctagatgtgctgaggaagtgaagagccctggagaagaggccagtaaagctaaagtccactacaatgttgagttcacctttgacacagatgctcgggtagccatcaccatctattaccaggccacggaagagttccagaatggtattgccaggtaagatcaggagaccaggagagccacttccttcccagattattaccaggccacggaagagttccagaatggtattaccaggtaagatcaggagaccaggcgagccacttccttcccagatagggagagtccatgtcttatccactcagcaagggcggaaaacattctttttctgcagccagatgagatctggttcctgaatttagactttcttctacaaagccctaccctttaccttttcccttcaaattgtgccatcttggtatagtgacaaatggtggtatagtccttcaggtccttaacatgctgttaaaaatctagtaagctacctttctttggatgtgtgggttgaatagaaaagtttaacgttgccaagcaagagcaaaggaaatggattataaaggaccctttcttctcttcgctagaccctgttgataattgagaacaggcatgagcagaggaagttgtcagacccatctgtgccggatactgacttttgctttgcctcccacttgtatcaatagctacattcccaaagacaacagcctccagtcggagactgtgcagtacaagcgaggagtgtgtcagcagttctgcctgccctcccacaccgtggatccctccgagtgggccgaagaggaggtgagctgcctctggggagggtttcccacatccactcagaagggcctaggggctacttaggactcggtctgacagcaaaggggctgctcggatgcttgaaggccatgcttacctttcagccttgtgacttcatcatgtccttttaaagctctgcttattttgcatcaaggatatacctaactttgttaatttttccattccctaggaatggaaatagcccattagcctaggatactttgagaaagccatgctcaaagaaaaaaaaaatctataggttagaggttcttatttacatctatgacatttttaaaaagcagctgatggccctcagttaacaaacttgggtaattaacaaggctaaagaatgaggagcagagatgagattaatgcttcttgacagtatcgccctttctgagattagctgtgccatgtaaatgtgttaagtcctctttttttttcctttccttttctttcccttcagcttggctttgatttagaccgagaagtttaccctctagtggtacatgccgtggtggatgaaggagacggtaggggcgatttctgtcctctttggctgtgcacactgctcttttgtggcatattcctggcagcagctgtggccccagaacaacatgccttctttgtgggtgtttgtgactgtgagtcaggcagtctctgcatcctctcacatctgtgactccaagctcctgggctgatgtgaaaagtgtgggtttggctgggcacagtggctcacacgtataatcccagcagtttgggaggccgaggtgggtggatcacctgaggtcaggagttcgagaccagcctaggcaacatggggaaaccctgtctctactaaaaatacaaaaatcagctgggtatggcagtgtgcacctctaatctcaactacttgggaggctgaggcagcagaatcgtttgaacctgggaggcggaggttgcagtgagccgagattgtgccactgcactccagcctgggtgacagagtgaggctcagtctcaaaaaaatgtggtttagctgggcgtagtggctcatccctgtaatcctagcactttgggaggctgaggcgggcagatcacctgaagtcaagagtttgagaccagcctgaccaacatagtgaaaccccgtctctactaaaaatacagaaaagtaaccgggcatggtggctcatgcgtataatcccagatacttgggaggctgaggcaggagaattgctggaaccgggaggcggaggccacagtgagccaagatcatgccaccgcactccagcccaggcaacagagccagactctgtctcaaaaaaaaaaaagtatgggttatataacgtgccccttctagagacagactggcacatttggtttgccagattgcagggaactggagaaagtcatgggcatcaagatgtgctgtttgggcttcttcactcacgtgcctttgtttctttcagagtattttggccattgccatgtactgctgggtacttttgagaaggtgagtgactttagagggcctcgctttattgcctttagccctttctttcgtgtgagacacatgtaacccgtttgctgggtgcctgagctcagcagaatgggtctggctttagaggctataatggtgaaagaggttgcagtgagctgagatggcaccaccgcactccagcctgggcgatagagtgaggctctgtctcaaaaaaaataaataaataaaagaaagaaaggctagactggataattataagacctttaaagaattaggattgtataattctgctctgagagtgtccaggaacatgtgtacagtagtccccccttatcctcaggagataagttccaagacccccagtggatgcctgaaactgcagatcgtacagaaccctcatatacactgtggtttttcccatactacatccacacctatgataaagtttaattcataagttaggcacagtaagagactaagaataatagtaaactaaaacaattataactataaggtaatagaagtctgaatgtgatctttctctctcaaaatattgtatgtaatattttcagacagtggttgatggcgggtaattgaaaccatggaaaatgaaactgcagatcagggagggcgactgtaactgggagatgtaacagaagaatacctggtgctttattaccctcccttccttgtcataactttcatattttcattccagcacacagatggaactttctgtgtcaagcccctcaaacagaaacaagtagtaagtatttgaagaccacagactgttagtattagggtccttccttccttttattctttcctttcttcttctctctccctctttttttatttttgttttactttttgctctctccttttcctctttttttttttttaatcaaagaagaaaagaaaaaaagggagtgcttttgaatgttacaagctattacaaacgacttgggtggcctgaaaggaatgctgatttttgaggtcttcattgttccagaagtgttggtgttgagggagcctttatctgagcaaaggacttgagaaatgaaagaacaagatttatttcccaacattgggtttagggagaactctttttatttaaaatgccagagtgagaaacatttcaagcgaaaggataaagcattagggtccaatttagtgtaattagagtcattggcttaatttatccattccttttctaaaattcaaagttagccatccattctccctcttccagaatgatcagcaccttgtgcatatgtctgctagaaagtcccagcccctaccatgtgccagcacttttctttccactcttgtagaggtaggaggagacatcactgggaggagagagagtggtgccagtggcattggcaagggagggtgggtgaggggcaggtcatctcacggagggtgtagagcagctgggtaggaggcagggttgggcttcctcgagatgcaaagaaaagccttcctgtagatgggtgatagatacctgaaattctacactgttcgttcttttaggttaattactcgcctctcttttaatgaggtcaataataagaatatcttaggataaattagttttccaatataatcactgcatgaaaacaagttttaagagcagcagaggaggaaacagatcctgggctcaggcccagggcactacctgggcaggccaggccttggtgagttgcctcatgggggaaggcctggttctccaggaggcctggatgggatggaaaggctcgtgtagctagaggaagatggtttgtccattttcctcttgttagattggcattagcaacagactgttaaaacggagagtgggatataaaatcagcgacaggctatgtcttaggggaagggatggctaagaaacagaggtgaggcagaagagtgtgctcctaaaagtaaatggggcagggccaacttagacactgacatggcccaggttaatgggagtgggattgggccttggtagttggggttttaagaaacagggctggccgggcttgatggctcatctctgttatcctagcagttcgggagcctgaggcaggtggatcacttgaggtcaggagtttgagaccagcctggtcaacatggtgaaaccccgtctctaccacaaaatacaaaaattagccaggcatggtggtgcacaccctgtaatcgcagctactcaggaggctgagacaggagaatcgcttgaacccaggaggtggaggttgcagcgagccaagatggtgccactgcactccagcctggatgacagagcaagaccctatctcaaaaaaaaaaaaaaaaaaaaggaaacagggccaagaggtgtaattttgctgcatgttggggatggggtggcttcatggtgtggggtacacaccattagcctctccctcaaggtcttgctatcgccctttgcatccatattttcccttcccatctttttccttgccaacttcttcttctttttctttctcttttccattcctttatttgtataatgtctgaactcaaattggattatatagcaaatgcctagattttaatgcatgcccttccatcctttttctagtctgtgccttcttaattgtccataatagtatgctgcagtgcaagtattattattgtatttgtgaaattttatgttccctgttgtatataatgatgggtgaattaaatatttgattttctttcttctctcaaagagaaaacataagtaaataaaagcatcttttacttatccaggcctttgattttttttctcattatgaatcggtagtccttggttaccaaaagaggtaagattggagggagttcccactcttgtctctcagtagagacagcctgtccttgaacctttctgtttgctgttcaggtagacggggtcagctacctccttcaggagatctatggaattgaaaacaagtacaacacacaagattctaaggtaagttttacccaaaattctgaatgtactctttccaggaggccaagtgagaaatcgtaagccagcgtccagaaatttagcgtgccaaactctgaaatcagttaggtcttagaagggtattttcttgttcctcatttcagatcattacgcttttaccactttggaaatgagaaaagtaggctggtttggctttgttctgccacagagctctgtccaactcggtttccaccagggccctttctttgctccttttcctttatctgtgtgatcccctaagtcccttcagctgagatttgagaggcccagctctgggccttataggaggagctcgagtggttagtctcgtcctctcaattttagataaacacttcccagaagaagtgaagctaagtgtgtggacgcactgggaaaatgacaaagtccaatgtcaatgcagattttgttcgtaattattacttatcttagctcttcagccacgctgccttgtcagtaaagtatgggacaggaagggctttgtgccattggctacatttctttctccttggccaggtggctgaagacgaagtgagtgataacagtgccgagtgtgtggtgtgtctctcggatgtccgggacaccttgattctgccctgtcgccacctctgcctctgtaacacctgtgcagacacgctgcgctaccaggccaacaactgccccatctgccgactgcgtaagccccagagcggcagggggactggtgggtgggagaggggacaagaggacatttacaaaacactgaagcatgtgctgctgctggatctgacaaacggatgcgcgctgggagggatcatggtttctgtctgggctcttgttcattcttaatcctgtatcaggatgtcctgattgcctgttttctccttcacagccttccgggcactgcttcagatccgagccatgaggaaaaaattgggccccttgtccccaaccagctttaaccccatcatctcatcccagacatctgactctgaagagcatccagtaagttgggctcggaaccacggcccctctgaagcaaatgcctcattggcttttttaaacttttcatgcttctctacgtggcattgcagcaaggaattagaccagggcatgctgcagtatttagcaagccggctgagagcatgcgttaaaaccaacttattactgtggaaaattgaatactgaaaacctcccttttcctccttgggaacttggtgtccagttaatgtttaccattcctagagccatctgcttgcagtttcactccagtgaggttcaacttgaactcccccaggcagaaacaatgggacgattattttggatttaaatacaatttattatctttatttgaatcctcgaagaaagtaactgtttttctttatcctgttttgtggcctcagtgcctgagataaagtaactgacttcagtttcctagtgtaagtgctgatattagggtgaaacctcaaagctttgcagttagagagcagcagatactgtctttctttagactaacgcactgctgggagagattattatttagtgaatggtattgggataattagttagctatttcaggaggaaaaattagtttagcactttactccttaccaaataaattccagctggagtaactagttaactatattaagagcatcaaaccaaacaaacattacagcaaaccaagcaaaacattcaaaatctagaataaattatagatgattatttagttgactttggattggaaaggattctctaagcttgaaagcaagaaccatacattttaccacctaaaaagtttagcacttcagaggtctaaaaggtaaccaaaattaaaagttagacaacaaatagtgtttttttaaaaactatttacaatgtgtgtatcagaggaaaagctaatgtctttgccatagttcatattgaataaaacagtagataaaagggcaaagggcataaacaaaacacactcaacatagaattttttaaaaagttcaaccacattaaaaatcaatgatatgcaaatatgagaataccattttccaactttcaaattttaaaaacttttctttttagcgattctccctgctttcggggaagcagtcagaataggtcttctgtattacttataggagtgtaactagaaaaggcactgaaaaaaaaaacagcagaaaacagcagtatatatcaaggccttaaaaacatttatacctcatcatctaagagctaataatttaataacaagaacataatttgaaaaaaaggcattcaaggatgttcatcaaaacttgtttacaataggatgtgttagacacaactagattcccagcactaggagaatagttagaaaacttaggggatctatgagaaggggacatatataaagaggcttcagaaacaaaggaaaatatttatgttctggccaggcatggtggcttacatctgtaatcctagcactttgggaggccatggtgggaggatcaattgagaccaggagctcaagaccagcctgggcaacatagtgagatcccatctctatttttttaaagaggaaagtataataaaataagcagaatataaaattgttatttacagattgatcaaaactgtgtaaatagtacacagaaaaaaaatgggaagaagagacaccagaatgctaacaaaagtaactttgggtgatttgattactggtgattttttttccttacttttacttttatgtattttccaaatttccattataatcagaaaaaaaatagagattattaagaaaaagcttaccaataagcaggatctacagtgtgtgattctttgatattttatctctgcctctagtacagttgttcttaccagacccccccaagaacagatataaaacatttttttcagtgtagagaagtagcatgatcacgtcataaaacaaaaaggacctaattaatttttcaacctgtctctgattcccctagtcctcagagaatattccaccaggctatgaagtagtatctcttctggaggccctcaacgggcccctcaccccgtccccagcagttcctccacttcacgtgcttggagatggccacctctcaggaatgctcccttcatatggcagtgatggccacctgccccccgtcaggacgatctcgcctcttgaccgcctgtctgacagcagcagtcagggactcaaactcaaaaagagtctctccaagtgagtagccagtgctccacactgttgcccccggaatccttgatgaaatgcttcatccctccttggtgctggcccacatcctggggacttagggcagagtaaccctctgggctgttcccagagctgcttgcgtgaaggttatcccatccattaagagatgaaaataagatggtatgtaggtacttaagaaaactctgatgagacaaatctcttatgtattctttttttctttcaaggataggggatgggatatagggaagaggatgttgaacactgtggatagggccttctaggcccctgggagcattgcttagtccgaagactgaaggaaccttgtgatccgtatctcttaaacatctaaatccagctaggcacaaatcatgacaaggtttctgtggcagagtaaaggggagggtattttacagatgaaaatattgagaccctgtaaatggcagtggtttttcccaagtttagatagcaagtcatcagaggagctaaaagtaaaacttagcgcttctgacacccaaaagaggtctccatccctctctggttctatttccctagtcctacttaagatttgggtttcgagccaggcaagttagcccagacctactcggctactcaggaggctgtactcctcctctgttaaagcgtcaacaagaggatcgctgaagcccaggagtcccagcccagcctgggaaacataatgagatgctgtctcaaaaaataaacaagcaaaaaatatttgggttttcccctcagctccccttgcagtaagttctgttctttaaatggacgttggatatagctgcttttccactggactcctacagatccacttcccaaaactcttccgtgctgcatgaagaggaagatgagcattcctgcagcgagtcggagacacagctctctcagagaccgtcggttcagcatctcggagaggtaattgacattcctctcctcttcttgggtgttgtactccagggacttccctcctacctgcatgcctcatcaggtccctctgctctcattcactcatcaaacaccttgtcagcaccctctgaggcagtggcaaaggtttcactggattcatgcattcaacagtgtatgcagcctgtattatttgccaggcactgtgctatatgctgaggatagtagctgggacactacaaaagtccctgcccttgtagcatttatattcttgctatctggggtggggggcacaaaagacaataggtaaaaaaatacatgtgtgcctgatggtgctgtggatcagcatgtgtgacatgtgggaagggagtgtcacggctggaagtgggggctgccattcttaaaaagcggtccaggagccaagaccaagggaagtggtagagctagctatgcagatatacgaggagagagggccctaggtctgggaacagcaaggagaaagtcctgggggtaagtggggggtgtcgggaggcccatgtggaagaatggaagagaaggctggaattttctactctgtgcgtcccacagagacctcacttaacaaaggtttatgcagcttctctctgtagggcactgagctagatacagcagggcacaggaaggtaaataaagtggtccctgcccttaggtgctcaggtctggctgggacaggacatatacatgggaatagcatgtgcctggcacgttgttgttgctcagtaagtatttgttcaatgactaagtaaattttataaaaaagaagtatgcccaaaacagagacgataaattgctgtgtcagagatggaaaagatcattgtaagtggaggaaatcagaaaatgtgttatggaggaatagcattttagctaaacctggaagttttttagacatggagaaagaggtgagagaaacatccatgtggagaagacgatgcatgcaaaggcacagagcaggaagtcggggctcggagcaagccaggggcacagtgagtgcttcacaccccaaaggcccacccgaccgcagtgtgcagcctggactagacgggagacagacccagccaggagagggtttcagtagcccaggcaagaaggactgtgtgactggccgggcgcggaggctcacgcctggaatcccggcactttgggaggccgaggcgggcggatcacgaggtcaggagatcgagaccatcctggctaacatggtgaaaccccgtctctactaaaaatacaaaaaattagccaggtgtggtggcatgcacctgtagtcccagctactcgggaggctgaggcaggagaatcgcttgaacccaggaggcaggggttgcagtgagccaagaccgcaccactgcactccagcctgggctgggcaacagagcgagactccatctcaaaaaaaaaaagtgaaaaaaaaaagaaggactgcgtgaactaagacaaaagaggagcgcctggagggaagggaagggattatggagatacagttcgtagaactttgcatccatcttggacgggtgaggctgtgcacccagatgcctgacaggtcggggctgggatcggaggtgggggtgtgggaggagcagcaggctggggagcaaggtggtgtttgtatcagaaagcagctgggcaggaattaactggggtccacgtggagataccctgcaggcaggaagtcctctgctggctttgtatgcttttgccgcagaaggaaagctgatcataatcctggggaaacctggggtgtccccatgtcacagctgcagggtgacctgtgtcacccgagctgcagtctttgtatggccgcagcagatgctgtgccctgggcaggaggtgttgactgaagtgtgcgcctcccctgggaggcagtcattccaggcttgggctgaagtgaggacggaagagagaagctgcggcctctgcatgccactcagtccctcccagtgtcgcctttcctcctcatctctacccagacctccgccctgaccccttcctccagcacaggtgactggcgcttgctccatgtcctgttgtgtccccccacaacccccaggaatgtggtgtgactccagaaagtgagaatctcaccctgtcgtcatctggagctattgaccagtcgtcttgcacagggacgcctctgtcatccactatttcctccccagaaggtacataaggagcggggagtggctgcatgtccttcccccttacccagcccacagtgtcctggtgcttcttccgggaagggacatgggagtggcaagctaatacctgtactgcatgacaagtaggccctggcttgagagggaagaggacttgctttcctaccatgggatagcaggcttgcctgtagctagtggggtgttaattctctcagccccagtcctcctgtaatgaggtttcctttagcattatgacagggaaaagcaaatgtcttgtccccaaggctgagttctgagctctaaaatataaaggagcagaattttggaaaaccataaacctaaaaccacttttaggggagggcaagatacggccacttcactcctcaatgcctgaatgcagggagagggctctgctccccagaaagcttgcagaagccctgcctgacctccaggctcctttccccatcccctgtctccaaaggccctgccagcagcagcttggcccagtctgtcatgtccatggcatcctcccagatcagcactgacaccgtctcctccatgtctggctcctacatcgcccctggcactgaagaggagggagaggctctctcttccccccagcctgccagcagggccccctcagaagaaggagaggtaagggaagggacgggaaccgccctggcttctctgttctttgtgcacatgtccaaagtagcataaccaaaggtctgccatgcatggctgcaaagcccccaaaatgccaggagtgctgcagaaaacaaggcattcccttaggtctgaccctcctatttgacaccaattttgttctgaagaaggtttaggtttgctgtcacgagacctttatggaagagcctgtaaaaactgtgctcttctgcaggggctgccagcggagtctccagacagcaactttgctggcctcccagctggagagcaggatgcagaggtaaccccaacagcacggagtggtgcccccttcccacaaccagaggagtgctggccttggctggggatgccagtaaggaccagggccaggaggctgcgctgacgaagccttcctaggggacatgcctagatcagtgagaagtggaatgtgggtagagatgagagcagctgctcccgggcctgtggactgtccagtgagtggggccactggttcccagggtcactggtgtggagtgagttcaagagggaacttttctggccagcccctggccttgagaatatattgtccttcattccactagtatttacatggaggactgtgtcacaggtgctctactggtgctagggcacatatagacctatacagacctgtgtggtgaggtttctgcctacccccagcccactgcacccatctaggagcccagtctagcaggcagacaggaccacagttcagtgtgagacgtgccctgaccatggtgtgctgtggaacgccagctcacagtgagagccctagaactcttcttgagccaactcctgtcaatggaggatctggatggggtttgggatcttaagggatttctgaaagtcttatgatctcacaatttgctctttcatttagtaatttttacttccaccttagagaaacagtatcagctaaactattaacaagggtgttcctgacagaccattctgagcatatatgggtaatgtggctcggatctaatccctgtaggcagatggtgcctctccaagcaagatctgcctctactcagcctctgaggcatattaaacacagatggaaatatatgctattaacgtaggccctggagttagataccagtaggatgattagttctgtcttcagccaatcagtttactcattttgccgcttcatagactcacagggccttccttctgtcctagggaaatgatgttatagaggaagaggatggatcacccacgcaggaaggtggtaaaagatctggtcctttacttcctttagttatctttctttcctgggtattctttaaggggtaaagaaaagggtaccggtatgacgtggtggcgctgctcagttgtatggggctgttagaggaaagatcgtcttcttaatggtacatcaaagcaagcagagcattgatgatctctatgacctcctcagctctttctgggcctcagagccatagatgtcaggtgcgggtgctgcaggagatacatacgggtccatatttacctgaagtagattcggaagctctctaagcagctcccatcatcagcctccctgctgcaggttttcagtggagccccacagagctgttctggcattctcagtgttgaatagcagtagccatttcttccactggagggagggggaggactatttggcagctggtcaggtcttgctttagttaggaatatggtcaacattactgtaaaagaggactctcgggccggcagacgtactaaaggcgtggtcaaggagacaggtccaagtttcttcaggagctcagcttaggcaagtattttaaaggctgttgtaataatcttcctttaccataattcaggcctcagttacatcttcagttggaagaatgttgtttccagtaaggctagaagagaaggaatggcccacagagcaaggacataggaggaagaaggagggcaggaaagtctcccccaagcagggaacactatgtgttccaggagccagactcttccccctgctgctctgaggcccctccctcaggggcacctccagagcacacgtatgcccggcctggatacagacgcaccagcagatgtcatcctgttgcttctgctttagcgctggccatcgcttgggaagtgttggaggtgtgcatgtggacctgacggctcccacctggccaaggagcttgaaggagaaggtggccgccaaggctgcgtccgtcagctcttgcaccccagcccaagggggtttggagtgtcaccaactcagttgatgacttcagtgcttgaggctctagagttaccccttgtgattgtttctcccacagaatatttgcttctaagaagtgcggtgtggccaggttgtttcaccgacattccctagcccgtggaatggatttgttttcttctctctgtttcaggagaaaaaaagaggggagcttgataaaaaacaacttttaaaacttttcccttcccttcttacatgtctgtagatttctggttagccacttaaaacacactgaaaataacaactcaggtctcataaggaaggaaatcataattttgtgaatgtagtcattctgatttgatatgcaaaattatggaccctaagacctttagttgttgtttcatgtacttattttgcagagccatgtggtcctaaacacacccagctcacacccaaggcagatgcaggcatgagcaggatgacctccccactggcgctccctagcttctgctggttggtcgcagcctcaccagcctggcctctgcccagctctgctcgctctagtattctctgttgagcctgtgtcccacagccctcctcagtgatctgacttgttagggagcagcagacagaaacggctctagggaaacagcaggaaagcgcgagaacacagacatgcccacacaacgtgattcctttcttgtccactctttatccgcttaattattgtcttttttttaacatatgatttgattttttttgtctccatccttaagatttttattttaaggacagcaacgcagagaaaaacacagccagcccctctctaactgcattaactccgttacaggccagaggacgtgcgcatttctaggtatggagtgtgacaataacaatgactttgacatcgcaagcgtgaaagcactggacaataagctgtgctctgaggtctgcttacctggtgagtgtcagtct

SEQ ID NO: 2836 - DNA, 130 bp, Homo sapiens
cccggtgcagtggctcatgcctgtaatcccagcactttgggaggccaaggcgggcggatcacgaggtcaggagatcgagaccatcctggctaacacagtgaaaccccgtctccactaaaaatacaaaaaa

SEQ ID NO: 2837 - DNA, 417 bp, Homo sapiens
tggccccacacaagcttgtggcaggggaagctggaattctctagagatactttctccagcccttcaaagggctttcttgagtcattttctatttagtttgttctaaagacactgcccaggcctcttcattttcagtgagaccaaaagaggcagtatcagttcccctgcttctcctgcgcaggcccagggaagacccccttcctgcctgagcgtggaggagggagcgttgaccacggggccagcctcctgccagttaggcctggactggagctgctggggcccaggggctgcttcactccctgccttcccgctcctggcctggcttccatctgtccatttgtgtttcacatcattttgccaaatgtaaatctgtctgtctggtttgtttattttctaaactcatgtatgttctctaga

SEQ ID NO: 2838 - DNA, 781 bp, Homo sapiens
tttaaaatttggtttttattacctttgtgaccatcaggagattgcatactggttctcaggcattgcttttaattaccagttatctttctttaacacattgattttacttacgtatctggccgaatttttgtttgacaataggcattttacattttaggctctctaagcacacagtgtgatagttacggcagatgcagctgtaagccaggagtgatgggggacaaatgtgaccgttgccagcctggattccattctctcactgaagcaggatgcaggtaaaatattttcaaagccagaagaagggggcagaatctatatatagtcaacacatattaatagatcttatggcttattggcagcagggtaaacatttttcctgtaataattgtcaacaagactgaggactagctgtaatggtgagccacaaggggtttggcttgtacagagagtaagcagagttttaatgggatgactatcttaaactgaaaccaaatataaaaatgactttaggctcacacctgtaatcccaacactttgggaggccaaggtggctggatcacgaggtcaggagatcaagaccatggtgaaaccccgtctatactaaaaatacaaaaaaaattagccaggcgtggtggcgggcagcagtagtcccagctactcgggaggctgaggcaggagaatggcgtgaacctgggaggtggagcttgcagtgagccgagatcgcgccactgcactccagcgtgggtgacagagcgagactctgtctcaaaaaaaaaaaaaa

SEQ ID NO: 2839 - DNA, 4837 bp, Homo sapiens
tttaaaatttggtttttattacctttgtgaccatcaggagattgcatactggttctcaggcattgcttttaattaccagttatctttctttaacacattgattttacttacgtatctggccgaatttttgtttgacaataggcattttacattttaggctctctaagcacacagtgtgatagttacggcagatgcagctgtaagccaggagtgatgggggacaaatgtgaccgttgccagcctggattccattctctcactgaagcaggatgcaggtaaaatattttcaaagccagaagaagggggcagaatctatatatagtcaacacatattaatagatcttatggcttattggcagcagggtaaacatttttcctgtaataattgtcaacaagactgaggactagctgtaatggtgagccacaaggggtttggcttgtacagagagtaagcagagttttaatgggatgactatcttaaactgaaaccaaatataaaaatgactttaggctcacacctgtaatcccaacactttgggaggccaaggtggctggatcacgaggtcaggagatcaagaccatggtgaaaccccgtctatactaaaaatacaaaaaaaattagccaggcgtggtggcgggcagcagtagtcccagctactcgggaggctgaggcaggagaatggcgtgaacctgggaggtggagcttgcagtgagccgagatcgcgccactgcactccagcgtgggtgacagagcgagactctgtctcaaaaaaaaaaaaaatgactttagggtccattttgttctatgtgtatttcttttaaaaaagtctgttggctgggcgcctgtggctcacgcctgtaatcccagcactttgggaagccgaggcaggcggatcacaaggtcaagagatcaagaccatcctggccaacattttgaaaccctgtctctactaaaaatacaaaaattagctgggtgtggtggcgtgcgcctgtagtcccagctactcaggaggctgaggcaggagaatctcttgaaccctggaggcggaggttgcagtgagctgagatggcgccactgcactccatcctgggcgacagtgtgagactctgtctcaaaaaaaaaaaaatctgttaacatgtaaaacaaagggctgacttgaagagtggaagttttctcccttctctgattgttttatccatttttcattgaataggccatgctcttgtgatccctctggcagcatagatgaatgtaatattgaaacaggaagatgtgtttgcaaagacaatgtcgaaggcttcaattgtgaaaggtagtgcattctttctctagctgcattgtgttttctgttaccatatttcaagtaaaaaaaaagtaactgattgtgtcttaatctttttcagatgcaaacctggattttttaatctggaatcatctaatcctcggggttgcacaccctgcttctgctttgggcattcttctgtctgtacaaacgctgttggctacagtgtttattctatctcctctacctttcagattggtaatttagacctcatcccccaacctgttagaactgtgagattacacttaaaatatttttaaaaataaaatcagtgactctttgagggctttttgatggttggcaacactttgtattatttagcatgcatagtttttgtagtttggccttttaatttaatgaaaatgtacttttggctttagaatttatctcaatgaatggtgattacaaatgttatataaatagtaataaagtaaaatatagtttgagtggtatagcatatattggtactgttgtaggatccatttattcaaaaaggtttattgatgcctttctgtatacaaggtgtggtcttacacatttttatgatacatagaggacctgaattcaggatgtttacagtgtaaagtgcttgtgttttccttctctacctgcagatgaggatgggtggcgtgcggaacagagagatggctctgaagcatctctcgagtggtcctctgagaggcaagatatcgccgtgatctcagacagctactttcctcggtacttcattgctcctggtaagtaaggctagaaagcagtctgacctgctgtgtgcctctgtttagtctcagtctcacattcttgcccaccattgtgtctgtattccagcaaagttcttgggcaagcaggtgttgagttatggtcagaacctctccttctcctttcgagtggacaggcgagatactcgcctctctgcagaagaccttgtgcttgagggagctggcttaagagtatctgtacccttgatcgctcagggcaattcctatccaagtgagaccactgtgaagtatgtcttcaggtaagatagccttctttgtaaagtgagacttgacgaacattgtgaaagtggtgtctttatttaagtttaactggcctctagatgtattttaaagaaaaacttctgggttattgtggtgattttgtaaaagggagccttcctttctttacctttatcttttccaattgtactaccaaaccaatagtcttattttttatttgatttgattgttagagcattgcattgttggggcataaatgaataagaaatatttccccaacatccagaattgtccttacagaggttaatgtggccctttctttctctccaggctccatgaagcaacagattacccttggaggcctgctcttaccccttttgaatttcagaagctcctaaacaacttgacctctatcaagatacgtgggacatacagtgagagaagtaagttatgatataatttaggagagttgtttaaaaagatgattggttagaaagattcatgataatgcaaaagtttctctttcctaataatataacactgagaagtgtataacaactcacattatacatgaattatatataaagacaatgcattttttaacggctttcaaggacctggaaaaaatttggtaaaattagtaaatagtattatttactaattgattactcaattgatcagtaggtcaattgaggttacattgtatataaatagattttctaaaaaacctaattataggctaggcgcagttgcttacacctgtaatcctagcactttgggaggctgaggcgagcagatcacttgaggccaggagtttgagaccagcctggccaacatggtggaaccccgtctctattaaaaatacaaaaattagccaggtggggtggcaaaagcctgtaatcccagctacttgggtggctgagggatgagattcgcttaaacccgggaggcagtggttgcagtgagctgagctcatgccactgcattccagcctgggcgacagaatgagaatctgtctcagaaaaaaaaaaaaaatctgattataattctactggctcaagttgcctcatcttcatttctttttatttactgttgtgtaattataatttataatttgagccattggttaaattattaaaagtcataaattattgaatgattttgttataatttttggtgaacaagagtttaagacttaaaaatttttttttttgagacggagtcttgctctgtcacccaggctgtggtgcaatagcatgatcttggctcactgcaacctccgcctcctggttcaagcgattctcctgctcagcctcccaagtagctgggattaccggcacgccccaccacacccagctaatttttgtatttttagtagagatggggttttaccatattggccaggctgatctcaaactcctgacctcaggtgatccccctgcctcggcctcccaaagtgctgggattacaggcatgagcccctgcacccggtcaaaattttttttcttaaaaaaaagttttaaacaaggacctttttctctagcaaggtacagctgtttggggaggtggagttagtgatgatgtggtattgggagaggcatctgcagcttagatgtgttgatttttgaaatgcctgcatgaatatccagataaaaatggcttataagtagttagaaatatgaatctggggcttaggaagagattaggactagcgatccagatttagaaggttgtcaacatatgggcaataatttttaaacttggaaatatgacagaaaatatagatggaaaagaaggatggaatcctggaaacagttaagtccatgctctaagacccaagggcaacatggcgaaaccacatctctactaaaaagtacaaaaattagcacagtatggtggtgcatgcctgtagtcccagcttctctggaggctgaggtgagaggatcacgtgcactcaggaggtcaaggctgcagtgagtggtaattgtgccactccactccagcctggacaatgagtgtgaccctgtctgaaaaaaaagtaaaataaataaataagagccaagggagaaaaagaattttaagaaagagaaacaattaacaagtttaggaagctagcatcgttgggttttggattggtgattccttaatcactgctgagtttttgtttttaagaagtgttaaaactgtccaggcgtggtaactcatgcctgtaattccagtactttgggaggctgaggcaggaggattgcttgaggctaggtgttcaagagcagcctgggcaacatagcaagattctgtctctataaatcaaaaaaattagctgggcatggtggcacacacctgtggtcctagctacctcggaggctgagggcaggaggatgcatgaacccaagaggtcaagctcgcagtgagctgtgatcatgccgttgcacaccagcctgagtttacagagtggatctatctcaaaaaaaaaaaaaaaaaaaaaaaggtggcggg

SEQ ID NO: 2840 - DNA, 276 bp, Homo sapiens
cacgcctgtaatcccagcactttgggaagccgaggcaggcggatcacaaggtcaagagatcaagaccatcctggccaacattttgaaaccctgtctctactaaaaatacaaaaattagctgggtgtggtggcgtgcgcctgtagtcccagctactcaggaggctgaggcaggagaatctcttgaaccctggaggcggaggttgcagtgagctgagatggcgccactgcactccatcctgggcgacagtgtgagactctgtctcaaaaaaaaaaaaa

SEQ ID NO: 2841 - DNA, 1664 bp, Homo sapiens
ggccgggcgcggtggctcacatctgtaatcccagcactttgggaggccgaggcgggtggatcacgaggtcaggagatcgagaccatcctggctaacatggtgaaaccccatctctactaaaaatacaaaaaattagccaggcgtggtggcgggagcctgtagtcccagctactcgggaggctgaggcaggagaatggcgtgaatccaggagatggaacttgcagtgagccaagatcgcgccactgcactccagcctgggcgacagagcaagattccatctcaaaagaaaaagggcaagggaaggactgtgccaaacagcttttgaagaccacagcctcacatcctagctccaacttttccccatacccctgccataccagacgtgggtacatttctacaaaatcatggataattcctgctgccatctcatacctgtgaaccctgagcagcgtttcaccaaacagcccaaggtgaactcaacaccctcctttcccagattgcttgtaatagacccattgtcttaggcatatttgtttgaaaggcagtggataaatcatagcagttggtctcagcatactccttaacctgttcaggcttcattttcccatctatgaactgataacgttagaccctaaggtccttttcagctctaatgtgaaattggtgcatttgttcattcactcgttcactcattcactcactaatacattcaaatgctgggtgcttctgctgtgtcaggcccttcaggagtgaatgagagcctcatggagctctcgtgctaacacaagagacagccgataaaacaatgaattcacaaggaattatttcatgacagttgtggttaggtgctaccagcgctaccaggtactgagtgccaaaacagcaactaacagaagccctcgcgaggtcctggggataggggtgggtggtcaaagaaggctgctttaaggaaacgacatcccatctaagaactaaagaagtaggagttaggcaaaaggtgggaactccccattaaattttccttcctctcccaggattttcaggacttagaaaatcctgtttcttgctgctctaaatgtcaagttaccagcttccaaccaccttccctgtgggtcccacaattataatcattcctgaaagggagactgagcccatagtgtgtcttcccagaagcatttactatgaaccaactgcacaagtacacagaggtaggaaagaagcaatgcagaataacatagctccttcccttggagttcacagtctgagaggagagacacagatggggacaaatcgtcacagagctgagtgataaggattattaaggagatatttagaataccgcataagggccgggtgcagtggctcacgcctgtaatcccagcactttgggaggctgaggcgggtggatcacctgaggtcaggagttcaagtccagcctggccaacatggtgaaacaccgtctctactaaaaatacaaaaaaattagccaagcatggtggcatgcgcctgtaatcccagctactcaggaggctgaggcaggagaattgcttgaacccgggaggtggaggttgcagtgagccgagatcgtaccattgcactccagcctgggcaacaagagagagactccatctcaaaaaaaaaaaaaaaaaaaaaaaaaaagtaga

SEQ ID NO: 2842 - DNA, 499 bp, Homo sapiens
cttaaatgaggcctaaaatgaggtgtgaaaagtgcttgtatctctttagaggtgacctatcaccagaagtactgagaaacatctaaacgcatagttaaccccaaacatttgctcatcaatctcttctcccaaaaaaccataagacctgtccataactagagagctgtgtttccagttctctttcatccctctgaacagtttagagcagagggagaaagcagagaaagcaccaaacaccagtttccaggtaggatgtggtggatgctcgctgtgtatgttcacaggatctttcaccatccagagcatcccactgtgcacactcccaaactttcatggacatactgtgtacttccttaagtctctccctcttctggtgttctctcggcttgctgtttattgctttataacccgagattgctaagctgcgctgaactctgctcaggactgtcttttagtcatgctgccattcaatcaggaccaagggcagtgggcccagctg

SEQ ID NO: 2843 - DNA, 125 bp, Homo sapiens
cactacgcccggctaatttttgtatttttttttttttttgagacggagtttcgctcttgttgcctagtctgggttgcaatggtgcaatatcggctcactgcatcctccggctcttgggttcaagc

SEQ ID NO: 2844 - DNA, 32190 bp, Homo sapiens
tacattataaagcttttcatattttgtactctagataagccttctattttcctatttaaattaacttgggaaattgctaaagagtgaaattactttggggtggaaaaaaaaaaggaaagatggccttgaaccagtcctattgcgggctgacaatttaatagttaaagactccctattgaaagacaaactgtacaataagctgaaagctcacacggcaatattcctttaggtggacgtggggagtgaggcctggttacaacttctccttctgttgggccttatgtatcctcagagaatggtttattgtctgttttgaataagatcacacagattacaagctgacactattgatctatgcggcttgaacagacctcttcgttttcactggagcctgtcagatctcaatgttgctggcctccttttttggtttgcaatctttatttaatatctccttaaccctgagaaaaaaatacaaagaaagtgacttagcatcagtagttgaaaaatgtgagcactgtgggggctaattaaccagagatgcgggcaggggaggggagcagattaaccgcattcctgtttaccctttgttatcattctgcagttgggagatgaatatcagaatatacttgagggtaaagtatcttgttcctatggctttgttgctcacaggcaggtaaaatggtcctacaagctggttgattacgtatgcaaatgaagcccttctccctgggcctaatacataagaatccctccacctctcccagggctctaattgtatatcttagcaaaacatgatctagaaaaaagaatttgagaaacatatggcctaaatgacttttaatcagagagtggttcgatttttaataatatatttcaaattggtatgataaatgtatgttatgtttaattttcaagtgaccaaaaatataaaaggattttaaacagtattaagctttatcaatactgcttaattaagcagtattaagcttaagcatccacctctcaaggtagtaccactacagagagtgatcctggggtccccattcagacagaaggtgccagagaaggaagagctgaatgaactctgcagcaaaactgagacccgtctcctttgggagctgactgagagtcaacccagggcctcgtgagaagctggcaattaatgagcggctctttcactacccaatatctatttggtggctgtgaaataccattttcacactctattaaattagattcatcagtatgggcaatagcgttgtaatgtctatagacccattgctaatcatcactagaaatatcagcatatctcttgaattatcccacagatttggcaatgtgccattattttccatcctctacttttttctgtagagaacctttctgcctgcatctttttatcccccaaacaataatgttttcacaaagaaaacaatctcaaaagcttaatgcaatccttgttctagttacataatttttaataaattatattttagtcctacttcaaaaagaaatggtgagttttttctttgtttttgtcaaaaaaaaagttttaagatatcagagatgttagaggttttatggatttttctaaaaggaacaatagtatcattctcatagctttagtaagtctttagctgttttttacccagggtagttatacgtatgtagtaacaataaactacccagttattcagaagttaaaattctatcagttttaatctttcatattatagtgacaaacctgaaaataaggggaaaaatgtttctcagcaaatggaaaaatgctatcagaaagtcatgacattttattctataaagtataaatggctctcataaattcagatttaaagtatacataggcacagaaagggctgcaagaaattatagctgaacaaagaaggagcagatggaacccaggagatggaacttaagaatccagctgtgtgagaccatccgctatacatgtcaccagcccaacattatagtactgtggatctttataatgctgggccgtaaagaatatattagattattatttgtatactctgcattaaacagaaatgttcaaaacaacactttgcatttgggccaattatctagaaaaggcatatggaatattgcatttcccaatcatgctgcataactgaacagctaccttaggagaagttgattgtgtcacagtgaaataaactttaatatgactttagtctactcccatatgcattttgtagttaggaggagggcattttctaggaagaaagctattatgttataagagggctccaattgtggtagaaaatggtcaaaggataggaacaatttgcaacaagagaaataagatagaggaggaatatatgaaaaatattcaacctactagttaagaaacacaaagtaaacagagaatctactttttgtattagcaaaatagtaaacttaccaaaagtaatgatcagactgggtgcagtggctgccacctgtaattccagcactctgggaggccaaggcaggcggatcacttgaggtcaggagtctaagatcagcctagacaacatggtgaaactccatctgtactaaaaatacaaaattagccaggcgtggtagcaggcacctgtaatctcagctactcgggaggctgaggttggagaatcacttgaacccaggaggaggcagaggttgcggtgagccgagatcacactagtgcactctagcctgggtgacagagtgcaactctgtctcaaaaaaaaaaaaaaaaaaaaagtaatgatcagtgttggtcagtgtgcaagttttatacctattttttaggaaaatatattgtctttcttttttaaaaaataaaaatcagaaaacaatttggtagtttgtatcaaaaactttaaaaatattcattccctttgacctagtaattctaatactgggtgtctgtcttaagaaaatcatttataagcagacaaagatttaaacataaggatattgacttcagcaatatatattgtggcagctataataatagatcccatttaccaaaccccagttatgtgccaggccccgtgccagtacttagcacacatcatgccatctaatttatatgaccaaaaaaattaaccattaaatgttcaacagtagaggaaagattaaatgatggtataatgaactatcatataaccaattaaacatgacatatgtaaataattttggcaagtggataaagtgcttataagaatatgagaatataaaactatggaataattgcaaatgtatatgtgtatccgcaatagttataaatgcatatgcataaatcattgcaaatcaatgcaattatttgtgtgtgtatatatatacatggttatataaaaatcagaacaaaaatagacctaagtgtaaccagtgttaacatggtattgttatcttagatgagtaaattttactttttgtcttaaactgttctgtgttccaaacaatgactaaatgttataggaaataactgcaagaggactccactttctgaccgctgagcagtgagagctatttgtgatgccactggtatcattgtatagagtgtgcagaacttaattaatccactttaagttctatttacttttaagtatttttctttggcaagtttcactttttaagtgtactgtgtaggcctactgctgctactcttgtatttctgattattccttttttttttttttttttcaaataaagaaaagcatgaacttcagccaaatgacttagtcatctccaaatccctcgaggcatctggtcgaatatatgtctaccggaaagacctggcggacactttggtaaggaccttcagccttgtatttgaaacaaacaggccaggcgaggtggctcatacctgtaatctgagcactttgggaggccaaggcaggaagatggcttgagctcagaagtttgagaccagcttagaagtttgcaaccctgtctctacaaaaaaacttaagaattaactgggcatagtagtacacacctgttgtccctaggtgtgtgctgaggtgggaggatctcttcagcccaggaggtcaaggctgcaatgagttgtgatctcatcattgcactccagcccaggtgatagggtaggaccttgtctcaaaaaaaaaaaaaaaaaaaaaaaggaacacacgtaccacataaagcataggttttatgtgtttataatgaatgttaaaaaaattaaattatttcttcccttatccaatgatacaattcccaagtaacagtacttttacaaatcaaaaaatcaaaaaggggttgagcaattcagttcaatccaacttgaggaattctaaaccctgcctaagtgaaaccctttctaagcccctgaaataagggatttgagataggtgactccttctcccatcgaattttaatttcatttcttctttttcggtgagtatatgaagatgaggctgagaaatgcatcctaggtggatttaaggagaaagagtcccttgtttcagtacatttggtacacttcgttccattcccttgaagaaaagcatggatgacctgccttctctgtgtagaacggggtcatggtgatgggacgtcagctgccactgaagataaagagtctggagaaatgtagaacccacactttaagttactttcagtccaaaatttaagaacacctatgcctaagtgggtgatttcattgctgctgtggttcctaaagacctcagtcctgggattggcttctgaataggagtaccagacttcagatctgtcatctagaaaaagtgggctctagcagattgcgattgtgtctggaactcagagtccccatctcttcatggagccatcgctggggcgggtctttctcactggctcctgttgtatgtataattgagaaacctgcataccacgtaggttaacccaaactactgataatagttttatgtccagatatatgtctactggaaagacattttatgtaacgttgtctgcaggatattaagctatcataataatgttaatcacttattaccagatctgtatgtgctgagtaatttacatacggtatctcgtttaacacttccagtaaccccacgagagaggctgagtaaccactgtagcttcatacagccaagtcagggagagtgcttcgatttttaaatgcaattatatgtttgactctgaagcccctgcacatttctttcatttgtacatgccttacttggacctttcctgtgctgtccttcagcaggccacagtcctgtgtaattctgtcagtgaaacataaccaactgggtgctgcacagcatttttgagtaaataatgagattgattttaccgctccccatgaaggaggacgatctgacatgtagctactgtggggcttgttgcggtagaggaaacccccactctgaatatcctctatgcctcctctgccacccatacgtggccttctcaggtagctccctcctgtgcatccccacggctcaatctaccactgtccaaggccaccttcagaaaagaaggcaggcctgggcaatgccttgatggaataaataggtgctgtgaaatatgttccaagagaagccagactccatcctaccctcaaaagcctcccctgccaactcttgacaccacctaaaattgtcctactggaatcatagatttagatatttcatcaccaaaagatgtcagttaaaatctaacattgtaagggaagaataatacctgaaaacaccagtacctactatcactttcacatagattaatcttcttagaaaacaggaattagagcactgaaggaatgagatagaaaaatttaatgttccttggcaagggcaatggacaaccttgaataaatagagttatttaaccttgaataaatagagttaataactcgagttgggtaagggacccaattagggagaaaatggggacaaagagccaagtagaagtatcctgacacctccaaattattaagcaggtatgtgtgttacttcctcactctgggtctttcttagaaagtcagcagtagagcctgtctggtcttagcctggccagaccaatccctgagaaacctcagcttttcctccacctcaacacctctacatttgttagctggttcgtttggtcattgctttccgagcaccacactgtgccctacactggggatacagagacaaagtggaccttgacatgctgctgagaggactgagtctgtgggaaagctctgtgaagatcttcagtcattaggttttttaaaaaaaataggaaacgttttcatcaatgtaaaacttctaaaatgcaaataacttatttttcagtttagaaatgttgattaatatttggcacctggaatattccctttatcctactatgtcatttatttttgcaaggttccttctgtttgttttaaagttattattcaaatctaacgcttcaaatgggagaatttatattttcattagaaaacatcaactattttggaaagatgccaaataatctttttaataactttagtggtgaaatagattgaaagttgtgatggcatctaatacttttatgccatatcttaaggaaatactgttaccagcctcatagttgttaggccctatttacgtagggaaagcagttgatacttaaaataataatctaccatgggatataaatgaaataatttctattttttatttcatgttaaaacttttttactttctatgggcattttaataaaatgtgtaaatgtgtgtctgggatgagacttgctaaacgtatttcctgtaaacgccatgtctgtctttattgaagtgcaccatgacatttcttctgtttgtttttatgctaaccctgccggcacattaattcttaccagaagccaaagtgatttcggggctttcactttcattatgctgtctgccagggcagtgttttataatcagatttgtgcgtgcatgtgtgcacgtgggggtaggggagagagatgggggaggagcgggcgaactcactgaagtatcattgatcacattctactgttcccaagaccgtttcctaaattggctgtaactcactgaaggtgaacagaccagggaaaatattaagtgcactcagaaaagattactttgctaatctgagcttctagtgcctttctacagccagccaatgcagtgcaaaacatttgggaattactgaggatctttttgcttctgttggtttagaacccatttgcagaaaatgaggaatcacagcaaaggtcgatgaggattttgggaatgaacacttgggatcttgctctggaattaatgaattttgattggagtctattcaattcaattcacgaggtaaatgaggagtgacaagataaaatacaaatgctgttttaactgtgaattctttgtgaagaatatcaatgcgtgcggtgatgaaattatgctagaataacgtggtccaaaagatatttggggacttgaaatatattgaaagactgactcaattctaaaaaaatcagaatatgtgagcatgcttttatttgcccctagtgtgagcatatgcttgtgtaatgtataaatatgctgtatttcatgcatataaatatatatatgtatttggagatgaggctctaatggggttgatgaaccattttatctttgatattgataggtttattttttccatgaagcttatgatagttgtacaagaatcatattcatatttatgtatgtacacacatatccatctttttacttaagaacattctacaaatttagactgcattgtaagacttcaagtaatttattgaaaattttggatatatttcaagtttttatgtccatcagtttttcacttgaggacagattataacatttttaaaacaatagattgggaaatagcaaaatgctactgacgattcatgaatacatttgtccagagaaaaccctcacaggaatcaagagatgaaaaatgttagagccctctgtaaccatatgttgcatttgcttcgccatgtagtgaaatttttcattctgaagtggcctttccttctgaagaaggaacctcatgcccaatttagagacccaaatgtcctcatattttctcattaaacagatttcaatattatgatcagaatgtgagcaagtactgaattccttcagactaaatgacttgtgtctttggaagtgttagtagactgggatatatccctgcttatgcagtggaagaatgtagattacctctataaaacacacacacacacacacacacacacacacacgcacacaaacacatttaaaaacaaatctcttctattgctttgcacatggtccatctatataaatagttactggtcttgtttgatttcgtaaattatcagaccttgccctaatctcattctctttgcattttatggtttgacaatgttttatattggtggtttttaaagagcaggtactcagaccagcatcatcagcgggacttgggcacttgttagaaatgcagatttccggcccctccacacccctacaggatcagaagttctaggggtgggatccagcaatctgtgcttcagcagtcctccaggtgatcctgattcacactaaaatttgaggaccactgtcttagagaacagacctgtgagggtctgatgtgcaccttaacaaatactagtactactagcgttcattttcacttgaatttttcaacatgacaagtttgggaaatttggggattccttttatcctatgatttaaacttcaggatatcttagatttgtatataaagatgtcttccttacattctgaaaaatcacttatataaggattctaggtgaacattattgaatgaggcacctctaaaactaactcattttgaatttaatgtattactattcaccatgttctctgttagtgtattaataatatgggaggaactacctgaagtagctcttaaaatttgaccgagttttgtatcaaccatactttgctataaataaaccctggcatgaatacattttctttcagcaagagctgatctacttcacgttcagcagacagggaagtggggaacacactgcaaatctcagccttctgctccagagatgcaatgaggtccagctttgggtggccacggagattctgctctgcagccagctgggcaagcgagtgcagctggtgaaaaaattcatcaaaattgcggctcagtaagtttctagtgtgagaagtgccattcctctagtcttcttgagagagtacattgttcttctttctttctttcttatgatgataagggttgggatataaacgtgtaatatggagttaaatgactaaatggctgaaaatgtccaattttgaatatttatgtctttgcatttcaagtatttataccttaaagtaaatgtcaaaatatcagacagaagcactgtgctctctgcctcagcactaataagcaggcagtacacacatccttcatcctgcagctgaactacagtgtgtctgggtgagctacaggaggcaagaaaaaaggggatgatgatgtgcacaagtgggaatcattacacgtcaggtgcattgtaggacctgctcattgctccttgaggcccaccgtatgaacttttgcgaactcgttcattagaaggccctgcactggctggccccaccccctgagcctcatccctgggtgcaccccatgctctagtcactctaaatgtctgtccctcccatgagcaccatcttccaaccctgaacacttgttggctttgccaggaatggccacttgcacccagcaaattgctaccattcttcaagacctcagtcaaatattccttccttcctgaagttacccgattttcaaatgcaggggtactacttctgctactgcctctacttcccctctgcacagatatactttttaccttccgaaaacttattatatttattaaatttatctgtttatataggatttcttcactaggctgtgttcgctttcaaagaacaggggctatttcttatcaatcattatacctgggtgcgtggtacagaccttggtaaatagcaatgactcagttaatgttgaatgaaattttagtaacttgctaggagcatctcttaaaatatcagattcatatcaagggtctgttctttggacagctccccagcagaagcagggagcatgaatcaaaatcttccccagctccttttacttcctgcgcttccagttttatttctcctttgtcttccaaagtagtttttatatcaaacagttttcaagtacatgtcagtgcagcatattcagaaactatatattgatcacttacatgtacagatgtgtacaaggtagtgtggggaaatcagactgagtctacaccagttcctgcctttgtgaggcgtgcagtgtgtcagtgggtaattctatacctcagctggctcctgtgcaaaacagaatgggagaatgccctagaagaagatctaagtctgttgaggctttagaggagcgagagctcataccccaagggtgtgggaagcaggatcaggaaaacgttggtgaaggaagttgcctttgaatctatttgaattctgggtgggatgtgacaggtaggaattcaaaagagtacactctctgtgggaggccaactcagtggagacaatgaagcagagcctgtggttagacagtaatctgttctgatttagagtggagggggatttgtaaggaagttgtgggagaatgatctgcaaagacagatgggaccaaattgtaaaagatcttgaatttcagattgaagggtttgaactgaattgagaagggagaagggattttttgaaagtttttgggcaggagacatgatcagagttatccttcaggaaggttggtctgaaactagcacgttgaactgtagcaaagagaccccaagagtaggataatttttcttaggcaagaagagaccatggaggttcctgacctggtatttggtgtgactgggcatggaaggatagataacaagatctgcctaaatcttattgattacttttatggtgaatgcttttttaaaaaaatttggccattgtgttccaaaatggcttgtaaaattcctaaaggtgaggctcttttgggtaaaaagctttcttataaatgctaattatgtggataagtgggaaattaatgttccaaggagtaagatgataccacccagctcagttcccactataagattatatctatcctcagggaaatgaaatatattcacatcttctccatatggccccatgctcttgaatgctttatggtagtggtctctatccctaacccatggaatagaatgccaacagaaacataaagttaaattccctgtaatcatgctagtaggaataaccaagggaaaatagtaatttccacaatcatgaagcgtttttcctgcctgaggcatcctatttgcatattcatgtttcccctccttctcaccatccccatcccccacctctgtggattgagtggattttatttcctcacacaaagacaaaaggagtgtttgctgaactggaatgtttagtgtcagacagtctgttcttatcgtggaatgaatgaccctcgttaacagaggattccagcctggaatggcatctaatatttgcactgtatcaatttgtcttctccagaaagtgtgtctgtattaattccttttttttcttaacagatttagatgttagttatatgtgtgtttttatgggtttttttccttaaaatatgactaaaaaagaaagctatatggaccaggaaaattgttcatgaggagctaaaagataaaaagataggaattctaagatttcacatagataaattaagctcaataaaacgtagaataatagacatctttataatgaataatgataaaatcatttccccagaagttcttgttttctacttcagcaaatgctgtttaaaaggcttcttgtgtactaggaacctgggtgatgggcagaatgtaaaaatgattagacgtatactctagccttaaggaacctactatctagcagagattgcataagcagtggggcctccatcatatcctaaggtgaagggacccaggggtaagagagacttcgaactggagcttccagcagggggatggaacagttcttactgaccacaagagcctctacagaggaggctggtatttcaaaacatcaactcaggaggagatggcactaactcaagtctgttctagctggtgggaacgttcagggttgtgaagagtcagaaaaagtaaaatgaggcaagtgaacagcaggatgaaggggagtcaccatgtgaaaggcagtgattctcaaatgcaggtaggtttcccagtcacagactgggaggtatcttattggagtttattcatggaatataccaagtggggtcgacccaggagaaagttggcaaaaaaccacgtaaggggtcacttggatgaaggtacagggcctcacaattaccaaggaactgctggcagagccaaaagctggacaggaggaccatgagagggacagaccatgcccagtggaggctcagcagcaaggtgcctgcaagatgtgtgtccaccccagatacctttggcatgaggtgtggaggcaacacggcctttctaggttccactgttctggggatggaacttctagaatgcccccaggcctgagccttccttgcttggagccatgtgtagctggactcaggcagtacctaacctgtggggccggctctgggcatgccagtgtaggcagggcctgccagagcacagctgctatgggtctccctacttactccacagctcagcttattctcctgattctgaactaggtcatctcatacactatgtatgcagctgggaatcggtatagctttaggagacagcggtttgtattatgtatcgagaacctttaatgtcttcacagcttttgaccaatcatggaatgactggaagtccaatgtaatgggaaaaaaatcacaaatacagtaaaaagtttattccagcattctgtgtaactgggaaaattgaaaatcatccacaatagaggaataaattatgtaatatgctcttttgataaaatattacatagctgttaatgatagtaaataatccatagtatataatataacatggtatttaactgaagaagcaggcaagttctacactattcccagattccatgtgagacattggtggagaggtcagaagggatggcatctgagggaagctaaacaaacatcacaaggcccctgatacacgctctgcttactgctaagtacttcatatttttacatagtaaacgatcaagggagggtaatttttttttattattttaaagccctatctcagagaggttgttttctaatgctctccagataaaggagtgcctggaattcacagctattctggctgccgtgaaatcccgagctccccctgccattccaagccctcttagctggctttggaaattagtggaatgttgaccagttaagtctctgggcatgattgatgttatgcagagtggatagcctcaagaagtgaatggagctcaacatgatcttattttgcatttcatttccttgtttaactgagaaatgtggaacagtattcccattaatatatgccgtatttaaaatatatacatattatagtagctattttgttggtagcaaagaaaatgtgcctaaatgtaatgggagggggagcttagacctgtggggtgagaagggcttgtctgtcaaaaaatgaaaaaacatgttttgatgaaggagtcaggactagtgaactgttaaaaggagagtggggcgtatataaagaaacatgaatttaaaagagtgctcagttgaaattgtaaatgcacacaacataggtaaaaaaggaggaatcttgtgaaatatgaggagggtgtcaagagcacggatcttttcctttaggtaagagtgagctgaggcgtttggaatcatttctttggcattagagacagctgaagggcagtaaggggtacgtaggctgtagagcagaattcctgagctctgtggcctaggagggtcttttcagctttatcttttgtgattatctggggaaagaatgtttcctcaaagtgtcctctactctcttttattttatagctgcaaagcccagagaaacctgaattctttctttgccattgtgatgggtctcaacactgcttctgtcagtcgactgtcgcagacctgggaggtgagccttggagtcccatggtgaggggcacataaaatggaaataaagtaatttacatggattaaatgagataagtactactaaactaaaaatgtttgaaagtcatatgtcaaggtggtagggatctttttgatcaaatggtctttaaacggttgtataatgtgtctgaactagataaaaatggtaacgtgctccccagctagaattagtcttcccctctgtcctgcctgatagtgcagtgctcgttccaggctggtccccacagtctccccgcatgatgatgcgtgctcagaagtgcgtttgctgtgatgctaatgagtttaagcttcgaggcctctcacttgcagggcccctggcaatgtgttcacatggatgatgtatatttttgtaaaatttgcgaaagcaaagtaattttaatattctttttcttaaagaggatccacaaaacgttctaaagtttcagacctcccacttcctggctctgcacgccgaaggctgtttgggttctgagatgcagaggcccactcaagttcgcacaaggtctgacgtgtggactgcgacattcatgtgggaagacctgaaactggggatacccctaaacttagccagacacaggcgcaggactctgcctcactcatggtcccctcaccgtccttccttgggcttttgtttccttcgctctcctttccttcctgactggctacctccctatgtaccacttctcccctcatcattgctctttaagcatcatgcctctgcctctagcctgcgtgtggctcactgtggtctcctcagcctccctcacagtcctctcagatttagttcctatcactgactgtgccattctcttcatggttcccaactcaaactcctacaagagaaaagctgataggccagctatctttttctcggaataggtctctgggcaacctgtggattcgctttctttcagtcaggggtcataccctgaaggaatgcactgtgctgacccaagggtcagagtcagtcctccttaaaggggcccaaaagaaaagaaatgaaagccccgcctgctctgcttaagcaaacaagaccttcacacacaaagcaagatgaaagacatgggtgacagatgccacgattcattagagtaggaggaaaacaaatggcttggcaagggtcagtggggagcgaatttgaattaaaccttgaatgaaactgatttggaaaaattgagaggagaaataactcaattagattcaaccagcttatgtttaatctgcgcattgactgcctgctatgtgcagagcactgcgtcactgccatagcagacaggagatggctacatgagaactgagcatgcctgtgatgacagaagtcttggaccagggcagagcaagtggagggactcattctgcctctgggtagctgagaaaactcgaatgagaagcctcaagctgcagggccttcgaggtccagctgagagttactggagtgtggggatgggcatctcaggtagaggtgaccacaggatctccaggtctggtgactggatgaatggaaagtgatcacacttcccaaatagataatacaggaaaagaaacagatcagaggtcagcaaactgctttggtaaagggccagcgaggaaaaatgtttaggttgtgcaggccacatggtctctgttgcagctgctcaactctgccattggagtgaaagagcagctgtagtacgtgcctgaatgaaggggcgtggcagcaatccaataaaacttgacctcctaaaagtagctcatggctagatttgttccatggctgatctctggagtagatcacttagttcgacttcggacatgttgggtttgaggtgccactgggacatttgtgagggatgtcccacagactaaggtaggcagcttaaaagaaagattggaatcagttgcaaatatctccattttgtgtcttctcatttaattggtcctctgtttgttggggtgtgtgtgtgcgtgcgtgcgtgcgtgtgtgtgtgtgtgtgtgtgtgtagtttccaaacagattaaactacctgtttgctgtgataaactgagtccatattcaaaattaccacatcgaaaaaaatctatctctaaataatgtaaaagtctaattattgtaggagttgcctcattgttttgattccttttagaaacaaaaaatcccagaaatatcttcttatactttgttgttagtgttaatagctggcatttgttaagtaccagccaaggaccgtgtacttttcatgagtggtctctacatcctcagctgaagaaacagatccgagagcttgctgacacaccaaaccacatagctagaaagggcagagtcagagttcaaactcaggctgcctttaaatatgtgctgtttaccacaaaagattactgagtcaatattgaaaggcacccaattttttacttagccatgttaaaagcaggctggaacattccaggcccttcttccttaggcctgaatttttatttgggaggatggcctatgtttccatcccctgtcactttgcatggtacctgttatggttgagctcttcaattcattgattccactcattaaagtgcaggcttcgtcacttaaggtcttcctggcccttcactatttagcccaatgctgtgaaataaaatttcatcatctatgctaaaaatgtcagccaacataattgtttcccactcaggaagactattaagaagatgagagcatttgtcaaaggtagggtatggaactgaaatctaagtttttattaaatgaccaccagtatgtggaatgtctaaccaactagattcctgaatcatgtggctgttattttaagctgttttaagcagcattcctaaggaagatcacattaaagggatgatgaaaattgcataatgagaagcaatcaggattgaacagatgatagaggtatttatgttcagaaatgtgacacagataaacaacgtaatgaaaactcccttcgatgcctctgaaaataaccaacttctgtgaccttctgttttttgtttgtgtttgttttttagaaaatccctgggaagtttaagaaacttttctctgaacttgaaagtttaacagtaagtagttgagccaaaggggacttattcttcaaaataattgctagggtctagtttctttctacattatagtgggtggtatttgtactctaccgtgtcaggtagcctagactagtttacttgtatatgaaactgtagctttgcttcttatggagggaagcaagttgacagttaatgcttcttcctctccttctaaaaacgtagtgaaaataatccttttagtgtgattttttcagaaggcaggcttttaagtatagtccatttcaaagcctgcaaaattaatcagtataaatttagcatgcaattagtgtctcatgcattttctttttcccttttctcctttttacaatttcttagattgagatttttaaaaattatagtttctttttagaatacaaaaaaacagtatcctcttgttttctctgcattttctgtgcgttacaaggacagcttttcttggtggtgtatctaacaagagactttgggttaattcatgatataaattatgcagaggaaactgtacttaaaggacctctttgaggaaaataataggacaatcaaaagatgtctctcatttgcggtcatttccctttattgtaaaccaataacttgaatttcattcattgcctagatttcctgccctaatttagtgagtttattctcctaggaaacctttatctactttgttcttaggaggaatctctctatatctaagttatgttcaaattgtgtagcaaaggtggatttagaattgtttctatagcacattgatttttctttctctttgtaatctgcttggttcggcaggatccttccctaaatcacaaagcctacagagatgcattcaaaaagatgaagccaccaaaaatccctttcatgcccttattgcttaaaggtaatgattttctatcttttatgccatgtaatttcatatttcagaaatttattactgtaactattgagggcaaaaaagggactctcattttgtctctttacagttattttgacattcagacctaattgtgttgccttgtgattgtttttcaaatagccgattatttttgagatacctagaatacgtaattgtgtttgagcagacaccaaagcattttcacttgactcacaaaacttggcactggaaacatttgtgtttttcttttactctacttctaagccctgtattactttctttgagccaacaatccaccgaattcaaccaagaataaggctggcataaagaacccaaatggtgatcaatcatgttctatttttgcaacctaaacttaagagacgcagcccacaatttgctgttgtatgagaagtacctttggtcaatacaagtaatatagctttcgaaaagtgttgatggagaagtgtacttcctttcttcaggagtggaattgagttgggaaaatatttgatagctgcaagttactccactgaccactccccactaagcaccaaataattcatcatgaaacatgttagttaaatttattgatgagatttcagtgatctctctttcaaaccaaggggattaataaaaggaaactctttttaatctggtgtataccgctgacattcagtgtaaatctttacctgtatgcttccagggaaagggggtttgggcattatccttggccgtattttgattccttcaagaggtttagtaggaatactctttcatccagcctcttttcttcagaggcttgtaacttctgctaagccaggccccagtggctggacccatacacatgattctagaaatgagctgtgtgggaactggattgctggttggcctggccatcctcattccccacttcctcccattgccaccacgcccctcgtctacccaataaagctggcattttctcttcagcttctctcaagaacagccagagcttggaaaattattgtgagttgccgtacatcgtgcagctactcactgagtcttccttcatcaaatatgaagcaagaatctctgtgaaacaggaatataatattaggacaatggagatagatatgcacagatgcgtcatccaagccgaaaatattctgttaaatacaaatgcgtgaaataaagagacactgtggtgcccaaataataatttaaaagtttatttgactcttcatatttatttgcttttaagagaaggtctgtgctttttatttgtggaataaaatatcttcaattagagggtgggaggtggcaggtgggaagtaacacttgggatcatttagacacaaataaagacaatagaaagtaggactgatgtaggaaaggaattgattgcaggaagaaaaaattttgaaacaacacatactttaaggtaatgagaaattagttgacaatatttctttaacttaattagatatgaacagagccttctgccatatattagtggtttcccccccaaaatatttaatgcagtcaagtgtctcacacattttagctcggatgcaattttctgctctgctgagtttatcgagacctctgttggcagcaagacaaatttccctttttttactgaaaacacatttactcatttcaaaagaataagaaataaacatttgttattttcttattagaagcttccttgaatttaaataagcacttagttttcctttgtcttaattttttgtcatgataaaatcatatagtattagtacttcattgtacttaaagttactgtttttgtctgaaataatttccaaggaaaatgtgatgaaaatataaaacatgtatattatgcctaagatgagacattttggcaaaaatatacaacattaattcttaggcttttttaatcacataatttaaagtttcaatgaactattttagaacaaccaacttagtttttaatgaaagctctttgtctccccctctcttgtgcctcccactttgagtagcttttaattagaaaaatgggaccaaattgaactccttggtgtttaagaaggattaggccccccatattgcattttttgaaagtcagttcccaataagcctgcagattatcaattaagtggattacctgaggatccttccagccctcaatcttcctctttcttatttgaatttcttgccttttgatgtactttccccttactgtggtgtggaatcttggtcagaaagggacgaatgggaaacactaagtgctggggagaagacccagctgagctaaggatctaaggagtcgtagttcatgtgctatttttggagatggagtgaatcatctagttgtttgaggataaactggggttcctgtggtgggtttcatatatgtgtcttagagtggagtttattgttgcagatttgtgcgggtctctgaagggaaggaatgttgggactcttggatgtttcttcctcctcttccacttgccatctcttcaaagtcatttcattgagcagttctatttcaggagatgtttggggtgtgttcaggtgtctccaggtgaaagaggcctggcagttgctcatttctcataccccaaaactgcttcttgtcccatgacttaaattctgacatcttcgtttttttcagcccaacctctcatttgtttctctctcataccttccgtgtcatgcacctgccattcaactgcatcgaaacctgtagccagttgaactcttccctttctcccggactgcagcaccttccagcctgtctcccctctcacctggccagcacccttgacaccttccctgccttatgcttagacagtaccagcctgacaggccctggcccctcaatagagccgccacacactctactgagagctaagagtgagagggactacctaggaagaggagagattgccggcaggagggactgcctgaagggagtgaggagggaagcactttcagtgttgcaggggcagctcatgtgttataaattgagcaggttgactgcacctgatagcaagaaaagccaagtcctttccacttgaggtgcctggagaggcgcagtggtgagggggagccagcctccctttgtttgaatcctggctctgacacatatagctgtgagcatgggttagccatagacgtccttggggccttagtttcttcatagccttacctcctagaatttaccttatgagttaatgcagctaaagctctttagagccatgtctaacactgttaataaatgtaagatgtcattattgccactgccctcctcatcatccctaggaagaggggtgaggggcaggtgagggataaacctgtaatgcaggggaaatggactaagccactctgagaagctgtgtggaatctggaattcttggagagttagtagaggccagaccttcaggtggtatttaatgtagacagagtgtgcacaggtttgcatttgctacacagaaaaggtaaaacctgtgttgacttctcttttctgaataccgtgtcacggaatgaaagcttgtaattattttctgcaagcaaaatttcaaaagataataaaataaccagagagtttgtcaggagactgtgtaattagttgtgaatcgttttcctactaggacatcagtttacaagcaaaaaaaaaaaaagagaggaaaggaaaagaagcttatgaaaacatttcagtccacattggaagctgtgtataacgccttgaggaaagggttgcatcagtgtgtgctgtaactgtgtaactattgtcacctcctggtgacagtaaaagctttgtggcccagagttttggtggcaagttttaggaccacctatctcataattaccccatagggaccagcagaataaaaatcttgattaaaagcaaatacattctttttctatttataggagtttttaagacattcttttcccctcttttctatcaggttatttttacaagatttttaaaggctgtttttatttggttggttctccatatatgtaatataacatgattatttgcacatgctttaaattatagtatatttatttttgtgatacttgtctgcgaggattccctgatgctgtcatccaccctctgatccgattatggctaagtcatccactctcagagcttcagttgctacctttatttaatgtaactaatttccaaatctatatgtcttgaggaggcactcttttgtttactgcagccaacaggagatatttaatgaatatcctcactcatttaaatgcagtgagcctcaaaccaaatttaactttatcttcctctgaaaatgcactttcattgtactttcctccttttattttcatcagtgatgcttgctttctactagtcgaatggggccagacatcttgactttttcaagcctgcctctttcctcacttattcctggtacacaatcagacatcaactttgggaaccaaaaatttaaatttaaacatctaaatctatatcttaactagttgttttaagtaaagcaagtcccatacactttgccagggatttgtaaaaagcaaacacatacttactaaaatcctgttgtttctgggtattcagtccttttctgctcagtcttctgacttaaacacataatggaataattaagttatagactagctttagtttatattaagcagattgaagtcaaacatttcattatgagtgcaaaatatatactttcagtaaggtcacactgtttttacacacacacatatacacacacacataaattatgcacttttacatcaaataacacataaatccaatttcaaattgcctctccaagtgcatggaatgatccataatgtttaggaaaaatgaataagttgcattgtacctagacctcttcagccctgactcatgatccattcctaatgatacatacatctttttgtttttaattttcagatgtaacatttattcatgaaggaaataaaacttttttggataatcttgtcaattttgaaaagctggtacgtaaatttcattacttctcccttttttacagtaacagaaatgtatgcctttctttcctgctctaggaaataaatagttttagtacttttctccattggatgcatggcgaattcaaggagcttatttgcttcattcaaggagcttatttgctgcatgttgtacgctgccaacaaaatgtattccaattaacaacaagtatgttagcaaggtttttgtgaaccaaatatgaaaatctgcgttttgtttttaaaaatggaatatgataagatgaagaactgagggtatattattgaaccagagctaaaactgtaaggctgctgtcaggaggaatccacactcaggagattatgttttactgctttataggcatctctcagtgtctcagcctgcatgctttcaaggcacagagggaaaaagttcctctcctggggatatatgtttgtctctcaggactccaagcttaaatgtgaggctggaatttgcagggtcttgtgtgaagggaagggccactcctttatcagcctatggacaaagggtgccatccctgagcaccacggccagagcggctcaggcaaagtaccctccctccttacaagcaagaggttcccagggcaatcctctctaaatgtttctgaaccactgcttcctgaatgatttccagggcattcccaggtgctttgtaatacagtgggcccctccaagcctttctgacttgcccttgagcaaaggaggggttacccataagaactgagcaactgtaaaatagaagtactccaaagagacccacttgcctgcaagaggaatggatttatctgacagatgaactttagtgtcatagagtaaactgtccttcatggttaaagacgataccagtaaccctgctccacagatcctgacctttgagtgaccttttcagtaatggtgatggatttgtgtgaactcttgcagaaactgaccctggttccctgtgagactgagtcaggcacttgagaggaggttaagtgaggcagggaccacagaccatgatcaaagaacggtaggaactgatgagtcctgctgaggcttggcacctgacctttgcctcagaagtacattgctctgcttacccagccaactccccacatgtagggtgaagcagcttgggaacagtgtagttggctcttatacaacccttatacaacccccaaaacccaagcatctggaatatagaatacagtcttggaatatcttgctttatctccattttaaccacaccgaagaccatcacttcacggctagtgcttttctaagtggctctgtcaatacattttcaagtttgtctctgcagtaagtgttttggaatcagagctcagttattttagatgctacagtcaaaccaacagagccagaaatggataaagtgttatttttttgtacgtgttttgtgttgctgtgtgatattctgaagatcacagggcacttaatgaaaggctgcaggcactagaattcttgcctctaagcaggttaatccctgtcgtttgggattaatgaaacaattgcgggaatatgaagcctttggtcaatatttacttcgcttcctggccaacacatctccctaagaacaacacatgagatttgtggagcatctgtgaagatgtgggatgaggtgtgtcacgccaagtggaattccctggaaaggcctagtaatcctttcccctgactagtccaaggggccgtgggagaacaactaaactctttatcagctggctgttgcctgttgttgagggcagacgtgaggttgacctccctaaagtgaaccagtgaatttgttaagttcattatgtcatttccccctcagatagtgccaccaaagtgacaagataataaaaaaaaaacctgaacaagtccataaagtcacaaatgggaacaagctgtggaaagcttgttcccaccttccttctgaccagcatctgtggccctcccctgctctctccagtaatccagcagaagcctcttaacgccagctctcaaatatgccaagactgccaactaaccatagggctggaaatgaaggaggtctaaatgatatgacttctattagggtcaatcatcatacccttaattctttgagaaagtttaagggaatagcatggcataaataatattttaaattcctaaagagaaattatattttataaaagaatgaagaaatgggtgcagttcagcatgcacacagcagtcacatagcgcacacgcaagcccgtcaggcaggcacgggctcttcatttcctcagagggcaggctccacacctgggactagtgagctcctggtccacagcatgcctcatgctgacccctccttacacagagtagacaggataaaactgtgtccaggacaaaaagcagttttatgtcatatatagcattgtgttacacttggatgctggagaatgagactgacctttctaggagaaacactattttcaaggaatatttcttagtaaaggactgggtttctctaaaggtaaaacaggatcatctttcacgataatgaaccaatagaacctaagtgaattaacttgtgaaaagtcaattcctcatgatggatattaacttaagccagctaacagataattcagtgtattatctttatctgactgatgcaggccagtacactgagtcagaccccatgaaaatccagaagccctcatcaggtctaatgagatttctgttctttatgctacattccttgctgcctcagctactggaaatgttttcatctcaaactgtttcataaaaagaaacaaatggtttcttttcttctctttatccctcgatgttaagagcatcatcttttaccctgtctaccccctccccctttagaaagcctaaagatgaagaccagaactcaggtttcaatgccacacccactacccagccttacatcagtttgagccttgcacaagctacgcaaatggcatatgatagaaatcaatgtgacgccagagcttaaaatgagaaaactgacctgggaaaagtggtaaaatctggggaaggaaactgaacaatacatgcacagacatgagtcaggtctcatttcctttacaaatgcagcttgagctactgcaataatcactgtcctattcaattttccactatcgaatagaagtgcattagaaatacggttatgacaacaattcaatcagtaggtcatattccaataatatttctgtatttcttctgaattttaagtaagaacatattttagtgtttaatattctttcagcaataattcattgagggtttgctgtatatggtgatcctatgctcagtgtgtatagttgggacatgaaagatgttgacccaaattggaggcccagatatgaatgatattaattcttgaataataggatgatgtttgtattgtgatatgaaacaaagtagagagctactgttgattctcaagagaactagaacatgaagacaatagtatttagagattattctggcaattaagccagctagcatagcattttggaagagaacatactgcactctagttcctcttatggcatatacgtatatgcttccaaaatgctacttccttcaacatgaaaaactaaaagtggtagagacagctcactcttgcaagtacaaaagtataagatgatgggatcttgtccaaagcagctgtacatttaagaagacttttgccggccaggtggggtggctgatgcctgtaatcccagccctttgggaggccaaggtgggtggatcctgaggtcaggagttcaagaccagcctgacttgaacatggtgaaaccctgtctttactaaaaatataaaaattagctgggtgtggtggcatgcctctgtaatcccagctactcaggaggctgaggcaggagaatcacttgaacctggggagtagagggtgcagtgagccgagatcacgccattgcacttcagcctgggtgacagagtaagactccatctcaaaaaaaaaaaaaaaagaagacttttgcctgggaatcagtgaggacttcaaggaaagaaattaaattagaatattgaagactgtacgtgaatataaactatgaacagaaaatggtctctaaagatgttgatgttggccggccacagtggctcacacctataatctcagcattctgggaggccaatttggttggattatctgaggtcaggagttcgagaccagcctagccaacatggtgaaaccccatctctactaaaaatacaaaaattagccaaaattagccaggtatgatgcatatgccagtaatcccagctactcaggaggctgaggcaggagaattgcttgaactggtgaggcagaggttgcagtgagccaagatcacaccactgcactccagcctgggtgacagagcaagactccgtctcaaaaaacaaaaaaaatgatgttaatgttttagaaaatgttcatcttttgtcagtatctcatttccagttacaatttaagatacttgaacctttgaatctacaagaattcctacctccattcagcacatatgtgtaagtcaatgtgtctgacatagtaggctctgcacatccaaagccctctggtggtacttggtctaaagaaggagaaaagttcaacagcaatgacagtgacacaaagccaataggtgctgtacgaagagcagtggggatgttgagattggagcctctgagtccaggagggacatctcagaaaggcttcatggagaggaggtgacacataccctgaagtgaaacacatgtgcaaatgtgaacaggatgactggggctgggggtgctgcacttctctacaatgtattttctcatggctcataagaacctgtgcaacccggattgggtgctactgttttttgtttgtttgtttttgagacggagtctcactctgtcacccaggctggagtgtagtgatgggatcttggctcactgcacctccgcctcccaggttcaagcgattctcctgtctcagcctcccgagtagctgggattacaagcacctgctacaacccccagctaatttttttgtatttttagtagagatggggtttcgccatattggccaggctggtctcaaactcctgacctcaagtgatccgcccacctcagcctcccaaagtgctgggattacaggtgagagccacctcacccattctggtgctactgtttttgcagataaggactaaatattctttgataatccaagctccatagaattaaagctacatccagctccaaatacagttcttctctttattacagccaagagtgctagattatccttccatcctagcaggcactgcttcttcagtaacaccctcaacgacccttccattgatgtgtttcctgttctactttacagcatatgatcgcagacactgtccgaaccctgagacactgcaggactaaccagtttggtgagtaattgaagtcaggtgcggaatgtaaattgactctacgttggtaccaactgtggtcacaagtattgggtggtaatcaatttaaacagattgaaaagtatcatatgtatatacatacgcatattgtatatatatagtagattgtctctttgtttcctcactgcatgttggggatgcagaggaagacaagatatggcagattattatcccctcatggcagcaagtttatgctgtgaagagtgactttacacactcagaaacctcctccccgcaactcccgctgactcctgtccccacagtgtcttgctttgcttgtccattggctcaaaatcactggtgagtttagcaggggtgaccttgcccctaacctctttgcgtggagccttcctggaataggactatagcttgtaaaagtgcctaaagcagccttccagaatcttttctcctctccaacaaaaacttcctgtctggagctgcctttcagctgcaaaagtgtggttctgagcacttttgtagaatccccactgagactaatgtatgtaggaatatttgttcctttttaaatctcagccataatttatactatgtttaaatggtgttagaacattgcaggaaggaaggaaatcaacttcattgagttgaaggagctttcacatgggcaatggaatcctgacatcagtcctagcaaatggggattattaaccctgtaggtgtagaacaaaaagcagagactcagagagattcacttatttagctattattcagactgagtctaccttacctcctcgccctctcttttgccctctacagatcctgtggatacaaagggtaataaaaaatagaaaattgagttcaataattataaattaatcaaaggcaaccactcagttcaacttcattttttaagtaagacatgcccattgtaaaacaattttttcaacaatatagaagtctatataaagtagaaaatcagagtcctacttctcaagaaaagtactgctaacaattgagtacacctgcttaagaatttttttctgttcagtgctggtctaggctggcaatattgtcccccaacaaagtaagttaggaactggacttctgtgtggattatgttttctctttgaaaaggagacttataaatacaggacctaattttctaaatattcacatcaattagtaccactttaatatacctatataattcttcatcaagcatacaagcgcaatgcagttacaataaaaatagtaatcataacatcatcacagagattcactgaaatgtataagcataatgctgatgagtacagcttcatattgcttttatcctcctttgcttcccaagtgtttactggggattcagctaattctaagatatcagtctcacttaaccaaggaactctagtttatatatgctccaagtatagacaggaaggtgatagttatactaacttgtgtggccttgaacctgccttgaacctcccactcatcagagagcaaccctctgtgtggcactgagcaaaggagaaatttaagtaactatcaagccagttgatgttctaatatttatatacagtatctttaaaaaattggtttgggaactgaattatccgaattcattttaacggtttatatgagcatagtaaaccaatgtcagcatttgggataaaatatgaaaatgttaatcaagtcacttatgcattataaagtgtcatgcaaatgtcagttgccatggttagaaccattcattgtgccatctttttaaggcttgaaaattaacataaaattacctttgtagcatcgtgttatccaaaccaatgtttaactttctcgacgtcttccagagaaggcattctggaataaaacagctttttgttactttcaaacaggtgggatggtataaactttaacacctagtgtgtttacttgctaaaaccaggaagccttgtttctattaaacctaagaattataagccacccatgtcatacaggtcttaaattatttcctcataaaatacatttgttatagaggagaaaaaagggggtttcaccaagagaaaaaaatgctataagaaaatgctcagcctcctgcatttcccttccctctgctcaaactgagctccagcagctcaccctgcctgtcccatgcataatctacaaagcaacaggatatgatgtcttcaccactcacctttccattgttttactgtagtgcagtttggccagtgttccccagcctcaaatggtttgcttgtgtgtgtgtgtgtttgactgtggtgcacgggcttgcctcgtggttcatgctgcttcatcctggttccttatcagcacggacgctagcagggtgtggatgtgttcacagtgcactaaagcctcctttggcccctcgattccttgactgccctagatatgtgagtggaaaagccccttgtcttgtccttctctgggtagactttagtccatacacatactttctgaagctatttcgtctgttaaccacatcttagagtctgttctgttgtatctgttcattcagttgctccattaaatttttttttccaaaaaatgagaataccaaagaattgtacaaaatctaaacaacagaaaaagagtgattgcattcatatgctaaatacattatcagcgattttcaacgcttctagactgagatataggacccagtgctggccatttaaacaggtaactgctgtgaaaggctacctaaaagggctcaggaaccatctgtcctgggtccgaatcctggctgtgacagttaacttgctgcgtgactgtgctcagtttccccatctgtggaatgagataataacgtaatttctaaataatatacaatgttaggtaataaatgctataagtatcctgccagtctgattgcctgacctgaggaatccattctgagctgaaaaagcatttctactgtaggacaaggacacctcttatgggattctgactaatgagaacccacctagtacatttactcagccttagtgtggggttttgttggtatgtagatacagcattactgctctcctgagattgtcttttttccccctctaaacaacaggtgacctgtctccaaaagagcatcaagagttaaagtcctatgttaatcacctgtatgtcattgacagccagcaggctctgtttgagctctcacacaggatcgagcctcgggtgtgagccccactgcctcacctcccctgtatctgcagcactttgagctacgggaatgtctatgccaagcacgttgctttcctgtgagaaaagaagttgctgagttttatcagtataacccaagacattcacaggaaagccagccaaagcgtgttcaggaagtgatgtcagccaccagagagggggagaggtttctccatgctactctcgggacaagaaggcagaaggagagtcagaagcattcttgagatggagaaggctggtttcttatgatcacattgttgatccagtccagttttcaatatgagatgtgccagcatcaagacaagacaacgtcttgacatgcaatgaccaaatatttcattaagagcgtgcatgaaaca

SEQ ID NO: 2845 - DNA, 2954 bp, Homo sapiens
tttttttttttttttttcaaaatctgagtcttctaaaatcttattattcccatttttaccaattgaggctcctgtagcaaataagacctcttgatattttcaaggactggttagaggatttctttcaaccttcacatgaacaaaacagcctatgggtcaaaataatgaaatccacccctgcctgctagatacttgtcaccttgctaaaatgcaagggcctggtccattcattttccaaatgcaggagtcttggtgcacttctcactcttcctgcctgttcatctctttcatgcccacacagacctgtttcctttttgtctcatcaacgcctcattcatcctcattactgaggcgtgtccaatgctttttgacatctttatagcagtgctgtttcctgggctcaggaaccacactgagcttgagatactgctggaaggaaccatgtggagagaaggtttgggagaactttgagagagacttagtttggcccagcatgtaaaacttcagtcctgaacatttatagggttttatagaagggcatcctccagggctggtccattcagagaaatgctgcatgctgccgtcatggaatgtggcccacaggacaccagagccgtgagaaccggagagcagacttccctcacggctgggctgagcaaaccctccaaagccctcctcacgcagttactaacaatagcatgggcttacagcacaagcacgtgttctcacctttttcctatgccctggactaaggtttggccagtgtaatcatataaggccatcctgacattgtttctgtgtttcaaaatttggatttttatttacattagaactacattgctcctagtagaacattacctttaggggactaattttccatggagaactatttcagcatattgcatgctgctcagaccccaagtcagatatgcccaccaagccagatgaagctacacaaatgtggtatttaaatgcattttgtacagtgacttcagagtatctcacatgacatgggtgtaaactggctggggagaaaatgatgcttgttcacctcttcctccagccgtggttaggtggtcctaggggtagcagagggaagggaggattttgtgcagtcaagatttgcttttccatccttgtcttctgaatgtctaaaatctctgcatctttctgaagtttaacaactgtctccagaggtttgccaggcagcagctctcagaagtttccaaagctttgcagaatcttagatctggaattaaagaattcaagcccgaattgtgagaaccagatattactcaacagaaagctctttctaaggaatctgagctgttcactggtggacagtggtggggcttgagtgctccttgttaataggatgggccatgcaccctctctggatattcaccaaggcctcttcagaatagggtttgttctggctagaagcgtggtctagaagatggctaagctctttgccagctctcatttggagttttattattgcataaaatcttcgctcactctgcaaatcttacgtaatctggcaccttcggcaccaggtggtgcaggggcacttctaagtgggctctttttgttacagcacaactctcagacagtcctgtgggtctttggattcgtcagcattccagcaaactagccctgcttagaagttagcacaagacagcagaatgcaggaccccgtaggcaaaatcacaaccttgctattaaaaaaaattttgttttacatacacatttgcaggtgttccctagagtgtggtgttttgaatttgctctttgtcatctgtataattgccaaatgattatagtgatacacatgacctgcattcacttttttctagtttccttaattatgtttagaataaattcatttccctagaccgagaaccacaaacaggtagtgtggagcatacaccgaatttagaagcatgtggataaggtcagtgctcacactgcctagtccacagggagaggatgctgcatgaatatatacttgcctctgagtggaggagaaatcgtggcatgaaagagagagtaccagtgatgacttcttatccctggagctgggctttcactgctacccatatcccagccctgcgagtctgttctagccagcacagacaccgcagatccggaactgaatgttcctaaatggcgcagccaatccaggcttttcagaaactgggcaaaaacattaaaatggggacgatcgggtcttccgcagtggtccaacacaggatttcttttaaatgtttcaaaaacatgtccttaaaatttcagcctgcttcttagcgagtgggccagttttgcttaaaactggtgggggggcgggggggaagtttttaaaaattgccaaaaagttagatgcaaatgtattactgtataaagcaaagctgtatatactaaacattttttagcagagtaatatttatttgcatagtctatttattgtattcgtatcacactgttattaaatactgggatgaaatcagtgacctgaagcaagaaatcttgccttttaatgtatcattaattagggctgctgtgatattgtcagcttgcattaacaattagaagatagagaacccgccatcagggtgtctacctaacttctcagggactacacttggtagttttccaccatttaaagaactggtaaatatgaaacatttgttgagttaccagaattgccattaacagtgttttctttcccatattccatgctttctgcctctgtgtatatatataatatatatgtatatgactgtgctgtgtatttatcgaagctagtaagcaataatttatatgtaaaaatggccaagcaatataaggttaaaacttatataagtaacccttaccttatcttgtattttcaatttttttttaaaactgcttttccaaatatgagactatgttaaagacactattcatgcctctta

SEQ ID NO: 2846 - DNA, 444 bp, Homo sapiens
tcagtccacgagaagaaactcctgtggagagaaggctgtacggtagaagctcctgcaaggccaggctgtgtgggcagtgctgcccatctactgtgtcctcagtcactgcttatttgcgtgaaataagaaatattaacagtggttttctccttttagataaagattgagtcaagcacagagctggaaaacacagcaaattaaaattttaatgcaattataactcacagactctctcttttgcctcatctttcttcatatgctgaaattctgagtgtgatcatttaatatttgcccaatttctggaacttgtaaaagaagtcacaaggatgcttattacattagatagtgtttgcatataatgctgctgatacatggttctgttggctcatattaagtgtcatccgtaccaagtgaaagagaaaataaaattatctaacttcctaa

SEQ ID NO: 2847 - DNA, 412 bp, Homo sapiens
ggaaaatgcccaagacttcatagctaatgggagttggtccttcaggcagaaagcctgtttccattcactggccccaaagtcctatgtccagcaggctacagaatgttctcagctgagtggtgcaattcctgttgccaaacaaacttgctttgcatttgaatggtttgggtaaaccaatttgtgaccttttgaagctcacagattatagtcacagcttttgcttccctttgaaaggaatgacttaatatggccaatacagtagccactgaccatattaagcacttgaaatgtagctggttccaattggcatgcactggaagagtatagcatatgctgtatttcaaagacttaacacacacacacaatgtcagataactccaagattttttagaattgatttcatgttgaaatg

SEQ ID NO: 2848 - DNA, 446 bp, Homo sapiens
aatatatatactataatagaaaacatactatatatgtgtgtgtatatacatatatatagagagagtatgatttttgttaccttttaaaatagttctttttgattctctattcttaaaagcctttttatatttttttccagtattgttttgggtccagaccatttgagagtgacatatagaagtcatttgttacacgcatgagagtgttagaagtgacaagaaagaggcaataaagagggttttctggatggggtcagtttttaattccttattgagattttacagtagctcaaaagagatgcctgttgcaggccagttatgatggttcacatctgtagtcttaaaactttgggagccaagatgggaggatcacttgagcctgagagtttgacaccagcctggacagcatagggagaccctacttctacaaaaaaataaaaaaaatt

SEQ ID NO: 2849 - DNA, 1506 bp, Homo sapiens
tttgtcaggtttgtcaaagactgggttgttgtagttgtgtggtattatttctgaggcctctgttctgttccattggtctatatatctgttttggtaccagtaccatgctgttttggttactgtagccttgtagtatagtttgaagtcaggtagtgtgatgcctccagctttgttctttttgctcaggattgtcttggctcttttttggttccatatgaaatttgaagtattttttttctaattttgtgaagaaagtcagtggtagcttgatgcggatagcattgaatctgtaaattactttgggcagtatggccattttcatgatattgattcttcccatccatgatgagcatggaatgtttttccattttttgtgtcctctctcatttccttgagcagtggtttgtagttctccctgaagaggtccttcacatcccttgtaagttggattcttaggtatttaattctctttgtagcaattgtgaatgtgagttcactcatggtttgcctctctgttggtctattattggtgtatagaaatgcttgtgatttttgcgcattgattttgtatcttgagactttgctgaagttgcttatcagcttaaggagattttgggttgagatgatggggttttctaaatatacaatcatgtcctctgcaaacagagacaatttgacttcctctcttcctatttgaataccctttatttctttctcttgcctgattgccctggccagaacttccagtgatgtgttgaataggagtggtgagagagggcatccttgtcttgtgccagttttcaaagggaatgcttccagcttttgcccattcagtatgatattggctgtgggtttgtcataaataactgttactattttgagatactttccatcaatacctagtttattaagagtttttagcatgaaggggtgttgaattttatcaaaggctttttctgcatcttttgatataatcatgtggttgttgtcattggctctgtatatgtgatggattatgtttatggatttacgtatgttgaaccagccttgcatcctagggatgaagtcgactttatcgtggtgaataaggtttttgatatgctgctggatttgcttcgtcagtattttattgaggattttcgcatcgacgttcatcaggcatattggcctgatattttcctttttgctgtgtctctgccaggttttggtatcaggatgatgctggccttaaaaaatgagttagggaggatttcctctttttcttttatttggaatagttccagaaggaatggtaccagctcctctttgtacttttggtagaattcaactgtgaatccatctggtcctgggctatttttggttggtaggctattaattattgcctcaatttcagaacttgttattggtctattcagggattcgacttcttcctggtttagtcttgggagggtgtgtgtgtctaggaatttatccatttattctagattttctagtttatttgcgtag

SEQ ID NO: 2850 - DNA, 470 bp, Homo sapiens
cttgcttcttctggtgtctgacttctggtgtttgaaccacaggctgggatgtggcataatcccatttctctcccttattctttatggagaagccttgagtctgtgtcttcttccaattttgttaagctgtggtgagtactacagttcacttgcccttttccctttgttcttagttgcccccaccaaactatgagaattctgttggcacactggattagatgagacagaggccagctttttgggcagtgcgtggaaaggccagagatgttaaagacatgttccgctcctccctcctctctgggggaagacgtcttggattctgtgcgtttcatcagtctcacagagctgtgcttgccaccgtaagctgtctacctcctcttctttgttcttaactacccctaggtgtttgatgtatgctagttctgtcaatgcttcatgtgaggcaaggtagaaacaggcctctaaacagt

SEQ ID NO: 2851 - DNA, 470 bp, Homo sapiens; identical to SEQ ID NO: 2850

SEQ ID NO: 2852 - DNA, 716 bp, Homo sapiens
cgggaggtgaggggcacctctgcccggccgcccctactgggaagtgaggagcccctctgcccggccagctgccccgtccgggagggaggtgggggggtcagccacccgcccggccagccgcccctactgggaagtgaggagcccctctgcccggccaccaccccgtctgggaggtgtgcccaacagctcattgagaacgggccaggatgacaatggcggctttgtggaatagaaaggggggaaaggtggggaaaagattgagaaatcggatggttgccgtgtctgtgtagaaagaagtagacatgggagacttttcattttgttctgtactaagaaaaattcttctgccttgggatcctgttgatctgtgaccttactcccaaccctgtgctcactgaaacatgtgctgtgtccactcagggttaaatggattaagggcagtgcaagatgtgctttgttaaacagatgcttgaaggcagcatgctcgttaagagtcatcaccactccctaatctcaagtacccagggacacaaacactgcggaaggccgcagggtcctctgcctaggaagaccagagacctttgttcacttgtttatctgctgaccttccctccactattgtcctatgaccctgccaaatccccctctgtgagaaacacccaagaatgatcaataaaaaataaaataaaattaaattaaattaaaaaaaaaaaaaa

SEQ ID NO: 2853 - DNA, 716 bp, Homo sapiens; identical to SEQ ID NO: 2852

SEQ ID NO: 2854 - DNA, 273 bp, Homo sapiens
agcagagaggtgacatgatctgtctcccaatttaaaagcattgtctggctgctgagttgagaaagactgtgggaagatgtgggtagaagcatgggggccaagctttggcaacatccaggcgggagatgatggtggtcctgaccagggtcgtggtggtgttgagagatggtcagaggggagaagtaggggaggaggccagggagttactgggtggggatctttagtacatgttgaagacagtcaacaggatttcctgacagactggatatgggg

SEQ ID NO: 2855 - DNA, 15535 bp, Homo sapiens
gtgctgggattacaggcatgagccattgtgcctggccaaaattaatactttttatattaaatttacatatatatacatttttttctttttgataccgggtctcacactgtcacccaggctggagtacagtggcataacctctgctcactgcagcctccacctgccaggctcaagcaattctcctgcctcagcctcccgagtagctgggattacaggtaagtgccaccacacccagctgatttttgtgttttttgtagagacgaggtttcgccatgtttcccagactgttctcaaactcctgagctcaaagcagtccacccaccttggcctcccaaagtgctgggattacaggtgtgagccaccttgctcattctagtttaaactttggagtggtttgtgtctcctgattggactcctgcaaatacagaattgatgctaggaagggtaccaggagatagacgcacacagatgggatttgggaataggtttggttatccaaggagcagtgctgagctccttgctaatgggatatgggatgctggtgatttccagtaagtgacctcaaaattactcaggctaccacatactgttgattgtgatgaaatgccagttgaagcacctgtcctgcgagcttaggggtgctacaagttgaccactgcagcagtaaagatgactctgaagaatggcatgggatggatcctttcgaatgcacttgagcagcggtctccaaccacagggccacagagctggaggtgagcagcaggcgagtgaagggaaacttcatctgtatttctagcccctcccatcgcttgcatgaccacctgagctccatgtcctgtcagatcagcagcagcattattctcatagaagcacaaactgttgtgaagtgtgcatgtgagggatctaggttgtgtactccttatgagaatctaatgcctgatattctgttactgtttcccatcaccccagatggacagtctagttgcaggaaaacaagctcagagatcccactgagtctacgttatagtgagttgtagaatcatttcattatatattactatgtagtaataatagaaataaagtgcacaatatatgtaatgcacttgaatcatcctgaaattattccctcactcccagtctgtggaaaaattgtcttccacacattcactctgttttttggtagaggcagggtcttaatatattgcccaggctgatctcaaactcttggcctcaagtaatatacctctctcagcctcccaaagtgctgagattacaggcataagccaccaccctcaaccaagactttcttaaaccaaaaaaaaattaagtgagattacttgagcccaggtggtcaaggctgcagtgagcctgattgcaccactgcactccagcctaggtgacagaatgagactgtctcaaaaaataaaataaaataaaatgcaaattaaccctttatgacattcgcagtaactttccctcctaagtctttgaattctgtttaattttcacataacatttaagatgtttaagaacttatgtctgtctgtgtcatccctttatgtcaaaagatgtctttttgtcacttccagctggatctaccatgaaagacctctgaatccaggaagagagactgactgagcaacatgttattcaggtacaaaaagatttggactgtaactcaaaaatgatcaaataatagtgcatgcatcaagtgcaatgggaagctcttctggagagtgagagaagcttccagttaaggtgacattgaagccaagtcctgaaagatgaggaagagttgtatgagagtggggagggaagggggaggtggagggatggggaatgggctgggatgggatggagcaaactgcccgggaagggaaaccagcactgtacagacctgaacaacgaagatggcatattttgttcagggaatggtgaattaagtgtggcaggaatgctttgtagagacagtaatttgcttgtgtggaattttgcctgagagacctcattgcagtttctgattttttgatgtcatcatccatcactgtccttgtcaaatagtttggaataggtataatgatcacaataaccccaagcataatatttcattaattctcacagaatcacaggtaggtgccacagttatccccattttatgaatggagtgatgaagccttaggaataatgaatgatttgcccaagctcacctggatattaagactgagtcagatgttgggtctggtctgactttaatgtttgctttgttcatgagcaccacgtattgcctctcctatgcagttaagcaggtagacaggtgacagaaaagcccatgtttgtctctactcacacacttccgactgaatgtgtgtatggagtttctacaccagattcttcagtgctctggatattaactgggtatcccatgactttattctgacactatctcgagttagcacagaccccacaagttaggggctcagtcccacgagaccatcctcacttcagatgccaatggcaagtcctaagttgtcacctgtacttttgaccgacctgttacaaatcaggggttcccataactgtcttcttgggtttaataatttgctagaacagtttacggaactcagaaaaacagtttattttctttttttctgagagagagggtcttattttgttgcccaggctggtgtgcaatggtgcagtcatagctcattgcagccttgattgtctgggctccagtggttctcccacctcagcctccctagtagctgagactacatgcctgcaccaccacatgtggctagtttcttttattttttgtatggatggggtcttgttgtgttggccaggctggccacaaattcctggtctcaagtgatcctcccacctcagcctctgaaagtgctgggattacagatgtgagccaccacatctggccagttcatttcctattactggttcattgtgaaggatacatctcagaaacagtcaatgaaagagacgtgcatgcttgatgcagcggctcatgcctgtaatttcagcactttgggaggccaaggtgggaagatcgcttaaactcaggagtttgagaccagcctgggcaacatggtgaaaacctgtctctataaaaaatttaaaaataataataataaccggtgtggtgttgtgcccctagagttccacctactagggaagctgagatgagaggatgccttgagctggggactgaggaggcttaggttacagtaagctgagattgtgccactgcactctagcttggacaaaagagcctgatcctgtctcaaaaaaaagaaagatacccagggcaagttaagttcggaggggcacagagctcccatgccctctgttgaacatgcgactctcccagcatctcctgtgtccagcaaccctgaaagctctgcaaaccccgttcagggtgttcatggaggctttattatgcaagcatgattgataaaatatttggctgttggtgattaagtcagtctccagcccctcttcctcctggagttcagtgcatgaggctgaaagttccacgcctcttaccatgtggttgcatggtaatcagccctcctcttgaagaaatttaggagcttgccacacccagtcatctcaacaacatccccaaatgcattcttaccatgctggagatcccaaagttctcagaggctcttgtgttagaaacctgggaccaagaccaaatattaaaacaaaagatgttcctgtcacatctatcactgaggtctttgtaagagctttagaagctctgtgccaggaaccagggacagagattaaatatatatttcttttcttttttttgagacagaatctccctgtgtcatccaggctggagtgcagtgatgtgatcatagctcactatagctttggccttctgagatcaagcgatcctcccatctcaacctcccaagtagctaggactacacaggcatgtcacccatgcccagctcatttttgtagagtcagagtttcaccatggtggccaggttggccatgttggccagatggggtcttcttttgttgcccaggctggccacaaattcctgggctcaagtgatcctcccacctcgtccttgtagagatgagatttagttatgtcgtccaggctgatctcaaactcctgggctaaatcgattgtcttacctcagcctctcaagtagctgggactacaggcgcataccaccatgtcgggctaatatttatttttatttttttctagaggtgggggtctcactgtgttgttcatgctagtttcaaactttgggcctcaagtattcctcctgccttgacctcccaaagtgttgggattctgggtgggagccaccatgcccagcaatcacaagggtctttataaaagaaagagagtaggagattcagaattgtagcgggagatgtggtgatgaaagcagaggtaagagagggagatttgaagatgcttcacttttggctttgaagatggagtcaggggccatgatccaaggaatgggggtggcttctagaagctggaaaagccaagggaacactttagagtctccagaaggaatgcagccctgctgacactttgactttagccttaatagacctagtttgggtttctggcccctagaactgtaagatggtagatttgtggtgttttaagccactaaatatgggaaactgcaaactatattgcagcagcaagaagaaatgaacatgaagccaggcatgatggctcatgccagtaatcccagcactttaggaatttaggcaggaggatcacttgaggccaggagtccaagaccagtctgggcaacatagtaagaccttatctctacaaaaaatgaaaaaattggccaggcgtggtggctcacacctgtaattccagcactttgggaggccgaagcgggcagattacctgaggtcaggagttcaagaccagcctggccaacattgcgaaaccccggctctactaaaaatacaaaaattagctgggcgtggtggcacacacctgtaaccccagctacttggaaggctgaggcaggagaatcacttgaatctgggaggttgcagtgagctgggatcgcaccattacactacagcctgggcaagaagagtgaaactctgtctcaaaataaaataaaataaaatactaaaaaatttagccaggcatggtggcatgaacctggagtcccagctacttgggaggctgaggtgggaggatcgcttgagcctggaaatttgaggttgcagtgagctgtgattgcgccactgcactccagccttggtgacagtgagatcttgaaaaaaagaaagaataaagtaaagaaagaagaaatgagcatggtgggcatggggacagatggcaatgttaaatagaatggtcggggatggcctcctaagtgaaaattgagtaaagacttgaaggaggggaaggagctggccgaggtgctgagggaagaggattgtaggcagaaataatagaataaagtgtctgaggtgtgtctgaggctctggaaggaggcccatggagcagacagagagagggagagaattaggggagggggccagggagttgctgggtggggatcagtacagatcacataagccctgggaggttattactggggctttggcttttactctgactcagatgggaactgcaggagggttctgagcagagaggcgacatgatctgtctcccgatttaaaagcattctctggctgctgagttgagaaagactacgggaagatgtgggtagaagcatgggggccaagctttggcaacatccaggcgggagatgatggtggtcctgaccagggtcatggtggtgttgagagatggtcagaggggagaagtaggggaggaggccagggagttgctgggtggggatctttagtacatgtcgaagacagtcaacaggatttcctgacagactggatatggggtgtgagagaaggcaggggtcaaggttgagtttgattgttactgaaattattaagtaattttaaaaaacactactgcctttcccaatcctaccaagtatgggatgctagattaaagaaatttcttcaggctcattgcagtggctcatgcctgtagtcccagctgtttggtaagcagaggtgggagtatcttttaagggcaggtgttcaagaccagcctggacaacacagcaagatctgctctttacaaaaatatttttcaaaattaaataaatgtagctaggcatggtgatgtgtacttgtagtttcagctactcaggaggctgaagtgggcagatctcttgaggtcaggagtttgaggccagcttgggcaacacagcaatacccctcactctacaaaaaaattaaaaaaataaccaggcatggtgacactcaactgtactaccagctactggggagctgaggcaggaagctggcttgagcccaggaggtcgaggctgcagcgagctgtaagtgcacagctgcactccagtctgggtgacagagcgggacctgtctcacaatacaaataaaaatacaagtgaaataatatctcaagtcagagccttttggctctgcagcccttgcaaccccttagccgtgcagtggggtttgcatcgctgggaatgaggagacccctgcccggtgttgttgcctgactaatcagtgctttaaaacatatattaatcggggtgggtgtggtggctcacacctgtaatcccagcacttagggagacccaggcgggtggatcacctgaggtcaagagttcaagaccagccttgccaacatggcgaaactccttctctactaagaaaatacaataattagctggacatggtagtgggcgcctgtaatcccagctacttgggaggctgaggtaggagaatcgcttgaacctgcggggcggaggttgcaatgagctgagattgcgccacttcactccagcctgggcaaaagaacaagactttgtctcaaagaaaaaaaaaaagtattatatcaacatgtaatggttttattattaatatgtaatgaatattaaatatttttaaaatcttgtattatatcaacatgtaatggctttaatatgtgatgaataatatttaaaaacttgtgtcttattttctagttttaatataattatctacagaaagaaatagtcttagagatcttcaataaagttaaaaaatgtaaagggatgttagaccccgaaagactgagaatttctagtttagaaatattcagagtaagccacatacaacttgctacttgaactattttttttctttgttttttattttaggagatggggtctcaccctgtcacccaggcttgactacagtagtgctatcacagctcactgcagccttgaactcctgggctaaggatcctcctacctgagcctcctgagtagctaggactgtaggtatacatgacgatacttggctaatttttaaattgttttgtagacatggggtctcactttgttggccaggctggtgtcaaactaatggcctcaagtgacccttccacccctgcctcccatcctcgaggcatgtgccaccacaaggagcacttgttcaattttctaaaaaaaaaatttctaaagtaaggctgtgggatgatggcaggaagataaaagaaaagcagaagaataagttaaaatgacttattcacacatattcttttgacagcaagaagaacttttagtatatacattccttacaaacaaacaaaaggcagataaacaatgttgtataggaacttcaacacacactgtacaatattcccactttgctgacataagttatggaaatttcatgttttacttgagtgtcgctaccagtattttgcttctctgatgatttttatcaacttcctcatctgttaacttctctccaaggtatgtcatgtcacgacatactgccgctgcacgaacatggccagtgtcttcctattcaacatgtagaatgctttcctaatttctctttttactctctgtctttgtgttctgcattttccttacttttattgtcagaaactccagaaagtcaatcgtactaatttgtcacgatttgctttattaatttatactttgcttatatggaattttgcccagcagacctcattacaatttctaacctgttttattttgttttttttctgagacagggtctccatctgttgtccaaggctggagtgtagtagtgctatcacagctgactgcagcctcaaccttccaggctgaagcgatcctcccatctcaacctcccacgtggctgagactacaggtgcttgccactatgcccaactaatatttggaattttcgtatacgtggattccagaggggtgacagtgaaacgtgagtaagcatggattttggtatatgcagagatggggggctggaactaattctgtatactgagggacgactgtatatgtttttacaattacgctgtaggatacatactgttgcatagccttgaaaataataatttttaattgagtggaataataataatattgataaaagtagcagctggccaggtgtggtggctcacactggtaatcgcaacactttgggaggctgaggcaggaggatggcttgaggccaagagtttgcgataggccttggaaacaaagggagtcaccatccctacagaaaaatacatgaattagcctagtgtggtggcatgttcctgtagtcccagctacttgggaggctgaggtgggaggatcacttgagcccagggaggctgagaccgcagtgagtcatgatcaggcctctgcactccagcctgggtgacagagtgagaccctgtctcaaaacaacaaaaaagtagcagctaatatcaactgaccttttaccaggtgcctattgataccatagtttaatttcttataactgtttcttatttcacttaccaactctgtcttcagttactcccagatttttactgtgtgtgtacagatgaccttttgtttagattgaattgtctccccagaagtaagattactgtgagtcatggtgaatggacattctcattacccttgatgtaaattgacagggttttgggtgcctcccagctataatcttagcactttgggaggctaagagaggaggattgcttgaggccaagagttggaggaggcagtatggcagtatggtgagaccctgtctccattattttaaaaaattgacaggctttaccctggaaggcttatacacaatttaaacacccctcatagtataagaaagtgcccatttcactgcacctttgccagcacagggtattataatttagtaagtcattttttgtttgattattttacatagataaaagaactcatattactttacttgtcacatttcaacatctttcctcagcttattagctctatttcttttctgtctgtaaatggttgttgttgtttggttctttgagacagggtcttgctctgtcaccaggctggactgtagtggcataatcatgccacactgcagccttgacctcccaggctcaaacttcgcattccgagtagctgggactacaagtgtgcaccaccacccccagctaacttttttcttcttttggatagagacagggtctcactgtgttgtccagaccggtctctagctcctggccttaagcaatcctcctgcattagcttctcaaattgctggaatttcaggcatgagccaccatgcctggcctgggctagtcctatattctctagagttctctttactttgtgctagccaatctctcattatgctgttcacctgttataatgaataattctccatattaaattttaccactttaaacttttgagtggtttatgcttcctgattggactctgactaatatgttaggaagggtcccaggagataaacccacacagatgggatttgggcataggtttggtttcccagggggcagtgctgagctctttgccagtgggaaatgggatgctggtgatttccagtaggtgacctcacagtgactcaagctaccacttactgttgattgtgacgaaatgccagctgaggcacatgccttgggagctaagtggttgctgcacttgaccactgtgaagactggtgtgggaagggtcgttttggatgcacttgagcaggggtccccaacccctgagccatggagccacaaggaaccacacagcaggaggtgagtggtgtcgagtgagggagtgagggaagcttcgtctgtatttacagccactcccctttgctcacattcccgcctgagctccaccttctcagatcagcagcagcattagattctcataggagaacgcaccctgttgtgaactgtgcatgtgagagatctaggttgcgctgtccttatgagaatctaatacctattgatctgtcactttctcccatcacgctcaggtgggaccatccagttgcaggaaaacaagcttaagacgcccactgattctacattatggtgagttctataattattttattatatattacagtgtaataatggaaataaagtgcctaataaatgcaaatgtgcttacatcttttggcccagctcctacctcccggcagcctctccaggcccagaactttctccaatcagcctctacagaccaagctcatgactcacaatggcctatttaggcccataccctacgtcacggcagtctccgcagatgagcctactgccccacaacagcctccacaggcacagctccatcgttacaatggcctctttagacccagctcctgcctcccagccttctctccaggccctgaactttctcaagtcgacctcaccaggcccagctcatgcttctttgcagcctctccaggcccagctcctgcatcttggtggcccctccaggcccagcctctgcctcccgtcggcctctacagtcccaacatctgcctcacagcagattcttcacgcccagcatctgcctcactgtggaccccccaagccaagctcccaacctttcagcagcttctacacacccagctcctgccacccagtggcctctttaggccaagctcatgcttcacaagggcctttccaggcccaacttttgtctcatggcaaccttccctggccagattcctgcctgtctcccagcagcctagacaggcccagggcctctctacatgcagcttatgcctcacggtggcctctccaggcccaactcctgtcccaggacgtcatctccgggcccaaaacttactcaagtcagactctgtagtcccaactgctgcctcctggtggcctatgaaggcccaaaatctcctcaagttgacctttccaggcccagctcctgcctcctgtcagcgtctacaggcccaacctctacgtcatgggggcttctccaggcccacctcttcctcttggctgggtctacaggcacaactgctgcctcacaacagccttttttggcccagttcctgtccagctcatggcggccaatgtaggcccaaaacttcctcaagtcaaactctccaggcccaccttctgcttcccagtggcatgaacaggcccagctttgacttgagaacagcctctgcaggccctgctcttgcctcccaggggctttttccaggcccagctcttgcctcatggcagctgccccaggccaaatttctgcctgcctgccagcagcctcaacaggcatagctcctccctcacagtggcccatttaggcccaactcatgactgtcgggccatttccaggcctagtgcctgcctcgtggctgactcttgaagcccaaaacttcctcaaatcagccttttgcccaacttctgtctactgtcggactctacaggccagcctctgcctcacagtggaccctccagacccagatggtgtctcactgtggcatcctcagtcgaagctcctgcctttcggcagcctctccaggcccagctcctcctgcctcccagtggcctctttcggcccagcccagctcatgcctcccggcggccttcccaagccccgcttttgactttcggtggcctctgcaggcctcgacaaggcccagcctcctgcctcccgaaggcctgcacaggcccagcctctgcctcacagcggactctccacgcccagctagctgtcgcctcattgcggcctcccgagtccaaagctcctgcctctcggccgcttcggcaggcccagctcccacctgccagtggcctcttcaggcccatggggctcgttcctcacaacggcctttccaggcccagtttttcccttccggcggcctctccgggcccagaacctcctcaagtcggcctctccagagccacttgcaccctccgggcgtcctctccgggcccagctcttcttcctggttgcgtctccaggcccgactcctgcctctcaacaacctctttggactcagtgcctacccatctcctggcggcattggtcggcccacagcttcctcaagccaagctccccaggcccaggtcaggcctcacggtggcctctccaggatgagctcctgccctccgatggcatctccaggccccaaatggtctccggtcggtgggctcctccacgccaagcttgggcctcccggcgaccgctgcaggcccaagttgtcctgaagtcggcctctcctggccctgcctcccagcaagtaagcaagctcttttggctcaactcctgcccagctcccaaccgcctttctaggccccgaactttctccagccaagctctgagggcccacctcctgcctcctggtggcctgtacaggcccagcactggttggagaacagcctctgcaggccccgcccttgcctaccaggggcctctccaggcgcagctcttgcccccacggcggcctcccggggccaagtccctgcctgcctcccagcagcccacgtgcggcccagctcctctctcacggtggcctgttgatgcccaccctcccacgcggacagaggtcagcctgagccccttgcctcacaccggcccctcccacgcggacagaggtcagcctgagccccttgcctcacaccggcccctcccacgctgagagaggtcagtgtgagcccctgcctcaacaggccaccgtgagggaggagcagggtcgcacgcgggctgctgggaggtaggcagggacttgggcctgggaggtcgcggtggggcgagagctgggcctggagactcccctgggaggcaacagcggggtctgcagacacccttctccagctggagctgggactgttcagtcactgggagaagggatgtgggtctgaagagcttggttgcagaaacttcggggtctacaaaggccggcgggagctgagccaaaagagcttgtttgctgggaggcgggagatgcagccaggaggaacagctgggccatgcgggaggcagaggccgggcctcctcaagtcggcctctcagacccacttgcagcctcccagcgtcctctccgggcccagctcttcctcccggctgcgtctccaggccggactctggcccgactccaggtcccaacaacgtctttggactcagctcctgcccagctcccagaggccctggtaggcccacaacttccctaagccaagctccccaggcccagctcaggcctcacggtggcctctccaggctcagctcctgccctccgatggcatctgcaggccccaaacggcctccggttggtgggcttctctaggcccagcttgggcctcccggtggcctctgcaggcccaaatcgtcccgaagtcggcctctccaggcccagctccggcctcccagcggcctctgcaggcccaagtcgtcctcaagtcggcctggaagtgggcctggaagagcagcaagtcggcctccccgggcccagctccgtcctctcggcggcctctccaggtgcaaaacttcctcgagtcagcctctccaggcccagctcttcctgcctcccagtggcctctttcggcccagcccagttcatggctctcggcggccttcccaggccccgcttttgacttttggcagcctcttcaggcgcagaacttgatctccagtcggcctttgcaggcccggcctcctgcctctcaaaggcctgcacgggcctggccttggccttggcctcacagtggactctccacgcccagctagctctcgcctcactgcggcctcccccgtccaaagctcctgcctttcggccacttcggcaggtccagctactgcctgccagtggcctctttaggccaagctcattcctcacaacggcctttccaggccccgtttttcccttccggcagcctcttggcctctaatttgtttatcttttgtgtataaatcccaaaatatggaattttggaatatttccaccattatatattttggtaggtaatttatttggagtgagtttctgcaccatgcccgaactttttgttttattttccttattatttggtgttaaacaggtttaatgacggtcatggcaactttttggcacaatgaaaaatatcgcccatgatcaacgtgttctgttctggggaagggggcaaaggcagggtgaatcactttcttaaaaagtatagctcaagttgggagtgcagagggaatggggagaaaacccttccgctgcctgtgtcgaagtgcaggagcccccacccccatactcacctgagtccagcccctctggggaaagaaggggtgcatgaactccccttagtccacaggcgcctccctgtggcccaaggccctcttcacactccatcttgtagccccagcaggagctattttccgaaaagtgaaaagctctgaaggtcccacaattcatggtatgtacaggggctcggaggagggaaactgcccagctttcccccggcacagctgcaggggtagggggtatagataagaggagcaggccttggccaggcgtggtggctcacgcctgtaatcccagcactttgggagggggaggcaggcagatcacgatgtcaggagatcgaaatcagcctggccaagatgatgaagccccgtctgtactaaaaatacaaaaattagccggacgtggtagcgtgcacctgtaatcctagctacccggaaggctgaggcaggagaatggcgtgaacccggtgggaagagtttgcagtgagccaagatcgcaccactgcactccagcctgggcgacagagcaagactcggtctcaaaaaaaaaaaaaaaaaaaaaaaaaggcaggccttactccgtcccaaactgaaaggattaaatggctttacctgggagaagataaccatcctgccctccattgctacccccacatactgtccatgttctcagggggtactgtgagtcctgggatctttggggttgcccacctgcctgtggtagttatggagaccccccaggtgtttaggcagggctggggtgtccccttccaaccaggctgtcaaggccccaactctggggcagaggcagtggcagggcagccagggttgcgccagagcctgagcaggttgaggtggggtcaggcagggctgggagtcagggcaggggcagcagcagtggacccgctatg

SEQ ID NO: 2856 - DNA, 15362 bp, Homo sapiens
tttgataccgggtctcacactgtcacccaggctggagtacagtggcacaacctctgctcactgcagcctccacctgccaggctcaagcaattctcctgcctcagcctcccgagtagctgggattacaggtaagtgccaccacacccagctgatttttgtgttttttgtagagacgaggtttcgccatatttcccagactgttctcaaactcctgagctcaaagcagtccacccaccttggcctcccaaagtgctgggattacagatgtgagccatcttgctcattctagtttaaacttttgagtggtttgtgtctcctgattggactcctacaaatacagaattgatgctaggaagggtaccaggagatagacgcacacagatgggatttgggaataggtttggttatccaaggagcagtgctgagctccttgctaatgggatatgggatgctggtgatttccaggaagtgaccgcacaatgactcaagctaccacatactgttgattgtgaaatgccagttgaagcatatgtcctgcgagcttaggggtgctacaagttgaccactgcagcagtaaagatgactctgaagaatggcgtgggatggatcctttcgaatgcatttgagcagcggtctccaaccacagggccacagagctggaggtgagcagcaggcgagtgaagggaaacttcatctgtatttctagcccctcccatcgcttgcatgaccacctgagctccatgtcctgtcagatcagcagcagcattagattctcataggagcacaaactctgttgtgaagtgtgcatgcgagggatctaggttgtgtattccttatgagaatctaatgcctgatattctgttactgtctcccatcaccccagatggacagtctaattgcaggaaaacaagctcagagatcccactgagtctacgttatagtgagttgtagaatcatttcattatatattactgtgtagtaataatagaaataaagtgcacaatatatgtaatgcacttgaatcatcctgaaattattccctcactcccagtctgtggaaaaattgtcttccacacattcactctgttttttggtagaggcagggtcttaatatattgcccaggctgatctcaaactcctggcctcaagtaatatacctttctcagcctcccaaagtgctgagattacaggcataagccaccaccctcaaccaagactttcttaaaccaaataaaaattaagtgagattacttgagcccaggtggtcaaggctgcagtgagcctgattgcaccactgcactccagcctaggtgacagaatgagactgtctcaaaaaataaaataaaatacaaattaaccctttatgacattcccagtaactttccctcctaagtgttccccacaagtctttgaattctgtttaattttcacataacatttaagacatttaagaacttatgtctgtctgtgtcatccctttatgtcaaaagatgtctttttgtcacttccagctggatctaccatgaaagacttctgaatccaggaagagagactgactgggcaacatgttattcaggaacaaaaagatttggactgtaacttaaaaatgatcaaataatagtgcatgcatcaagtgcaatgggaagctcttctggagagtgagagaagcttccagttaaggtgacattgaagccaagtcctgaaagatgaggaagagttgtatgagagtggggagggaagggggaggtggagggatggtgaatgggccgagatgggatagcgcaaactgcccgggaagggaaaccagcactgtacggacctgaacaacgaagatggcatattttgttcagggaatggtgaattaagtgtggcaggaatgctttgtagacacagtaatttgcttgtatggaattttgcctgagagacctcattgcagtttctgattttttgatgtcatcatccatcactgtccttgtcaaatagtttggaataggtataatgatcacagtaaccccaagcataatatttcattaattctcacagaatcacaggtaggtgccacagttatccccattttatgaacggagtgatgaagccttaggaataatgaatgatttgcccaagctcacctggatattaagattgagtcaaatgttgggtttggtctgactttaatgtttgctttgttcatgagcaccacatattgcctctcctatgcagttaagcaggtaggtgacagaaaagcccatgtttgtctctactcacacacttccgactgaatgtatgtatggagtttctacaccaaattcttcagtgctctggatattaactgggtatcccatgactttattctgacactacctggagttagcacagaccccacaagttaggggctcagtcccacgaggccatcctcacttcagatgccaatggcaagtcctaagttgtcaccgtacttttgaccaacctgttaccaatcgggggttcccataactgtcttcttgggtttaataatttgctagaacagtttacggaactcagaaaaacagtttattttctttttttctgagagagagggtcttattttgttgcccaggctggtgtgcaatggtgcagtcatagctcattgcagccttgattgtctgggctccagtggttctcccacctcagcctccctagtagctgagtgtacatgcctgcaccaccacatctggctagtttcttttattttttgtatagatggggtcttgttgtgttggccaggctggccacaaattcctggtctcaagtgatcctcccacctcagcctctgaaagtgctgggattacagatgtgagccaccacatctggccagttcatctcctattactggttcattgtgaaggatacatctcagaaacagtcgatgaaagagacgtgcatgctggatgcagtggctcatgcctgtaatctcagcactttgggaggccaaggtgggaggatcgcttaaactcaagagtttgagaccagcctgggcaacatggtgaaaacctgtctctataaaaaattaaaaaaaaaaaataactggtgtggtggtgtgcacctagagttccaactactagggaagctgagatgagaggataccttgagctggggactggggaggcttaggttacagtaagctgaggttgtgccactgcactctagcttggacaaaagagcctgatcctgtctcaaaaaaaagaaagatacccagggcaagttaagttcggaggggcacagagctcccatgccctctgttgaacatgcgaccctcccagcatctcctgtgtccagcaaccctgaaagctctgcaaacccctttcagggtgtttatggaggctttattatgcaagcatgattgataaaacctttggctgttggtgattaagtcagtctccagcccctcctcctcctggagttcagtgcatgaggctgaaagttccaagcctcttataatgtggttgcatggtaatcagccctcctcttgaagaaatttaggagcttgcagtcacgcagtcatctcaacaacatccccaaatgcattcttaccatgctggagatcccaaagttattagaggctcttgtgttagaaacctgggaccaagaccaaatattaaaacaaaagatgttcctgtcacatctgccactgaggtctttgtaagagctttagaagctctgtgccacgaaccagggacagagattaaatatgtatttcttttcttttttttgagacagaatctcctgtgtcatccaggctggagtgcagtgatgtgatcatagctcactatagctttggcctcctgagatcaagcaatcctcccatctcaacctcccaagtagctaggactacacatgcatgtcacccatgcccagctcatttttgtagagtcagagtttcgccatggtggccaggttggccatgttggccagatggggtcttcttttgttgcccaggctggccacaaattcgtgggctcaagtggtcctcccacctcgtccttgtagagatgagatttagttatgtcgtccaggctgatctcaaactcctgggctaaatcgattgtctcacctcagcctctcaagtagctgggactacaggcgcataccaccatgtcgggctaatatttatttttatttttttctagggggggttctcactgtgtttttcatgctagtttcaaacttcgggcctcaagtgttcctcctgccttgacctcccaaagtgttgggattctgggtgggagccaccatgcccagcaatcacaagggtctttataaaagaaagagagtaggagattcagaattggagcaggagatgtggtgatgaaagcagaggtaagagagggatctgatttgaagatgcttcacctctggctttgaagatggagtcaggggccatgatccaaggaatgggggtggcttctagaagctggaaaagccaagggaacatattagagtctccagaaggaatgcagccctgctgacaccttgactttagccttaatagacctagtttgggtgtctggcccctagaactgtaagatggtagatttgtggtgttttaagccactaagtgtaggaaactgcaaactatgttgcagcagcaagaagaaatgaacatgaagccaggcatgatggctcatgctggtaatcccagcactttaggaatttaggcaggaggatcacttgaggccaggagttcaagaccagtctgggcaacatagtaagaccttgtctctacaaaaaatgaaaaaattggccaggcgtggtggctcacgcctgtaattccagcactttgggaggccgaagcgggcagattacctgaggttaggagttcgagaccagcctggccaacattgtgaaaccccggctctactaaaaatacaaaaattagctgggcatggtggcacgcacctgtaatcccagctacttggaaggctgaggcaggagaatcacttgaatctgggaggtggaggttgcagtgagccgggatcgcaccgttacactacagcctgggcaagaagagtgaaactctgtctcaaaataaaataaaataaaatactaaaaaatttagccaggcatggtggcatgaacctggagtcccagctactcgggaggctgaggtgggaggatcgcttgagcctggaaatttgaggttgcagtgagctgtgatttcgccactgcactccagccttggtgacggtgagatcttgaaaaaaagaaagaagaaagtaaagaaagaagaaatgagcatggtgggcatggggacagatggcaatgttaagtagaatggtcaggggtggcctcctaagtgaaaattgagtaaagacttgaaggaggggaaggaggtggccaaggtgctgagggaagaggattgtaggcagaaacaatagaataaagtgtctgaggtgtgtctgaggctctggaaggaggcccatggagcagacggagagagggagagaattaggggagggagccagggagttgctgggtggggatcagtacagatcacataagccctgggaggttattgctggggctttggcttttactctgactcagatggaaactgcgggagggttctgagcagagaggcgacatgatctgtcacctgatttaaaagcattctctggctgctgagttgagaaagaccgtgggaagatgtgatagaagcatgggggccaagctttggcaacatccaggcgggagatgatggtggtcctgaccagggtcatggtggtgttgagagatggtcagaggggagaagtaggggaggaggccagggagttgctgggtggggatctttagtacatgtcgaagacagtcaacaggatttcctgacagactggatatggggtgtgagagaaggcaggggtcaaggttgagtttgattgttactgaaattattaagtaattttaaaaaacactactgcctttcccaatcctaccaagtatgggatgctagattaaagaaatctcttcaggctcattgcagtggctcatgcctgtagtcccagctgtttggtaagcagaggtgcgagtatcttttaagggcaggtgttcaagaccagcctggacaacacagcaagatctgctctttacaaaaatatttttcaaaattaaataaatgtagctaggcatggtgatgtgtacttgtagtttcagctactcaggaggctgaagtgggcagatctcttgaggtcaggagtttgaggccagcttgggcaacatagcaagatccctcactctacaaaaaaattaaaaaaataaccaggcatggtgacactcaactgtactaccagctactggggagctgaggcaggaagatggcttgagcccaggaggtcgaggctgcagtgagctgtaagtgcacagctgcactccagtttgggtgacagagcaggacctgtctcacaatacaaataaaaatacaagtaaaataatatctcaagtcagagccttttggctctgcagcccttgcaacccctcagccgtgcagtggggtttgcatccctgggaatgaggagacccctgcccggtgttgttgcctgattaatcagtgttttaaaacatatattaatcggggtgggcgcggtggctcacacctgtaatcccagcaattagggagacccaggcgggtggatcacctgaggtcaagagttcaagaccagccttgccaacgtggcgaaactccttctctactaagaaaatacaataattagctggacatggtagtgggcacctgtaatcccagctacttgggaggctgaggtaggagaatcgcttgaacctgcggggtggaggttgcaatgtgctgagattgcgccacttcactccagcctgggcaaaagaacaagactttgtctcaaagaaaaaaaaaaagtaatatatcaacatgtaatggttttattattaatatgtaatgaatattaaatattttaaaaatcttgtattatatcaacatgtaatggctttaatatgtgatgaataatatttaaaaaattgtgtcttattttctagttttaatataattatctgcagaaagaaatagtcttagagatcttcaataaagttaaaaaatgtaaagggatgttagaccccaaaagattgagaatttctagtttagaaatattcagagtaagccacatacaacttgctacttgaactattttttttctttgctttttattttaggagatggggtctcaccctgtcacccaggcttgagtacagtagtgctatcacagctcactgcagccttgaactcctgggctaaggatcctcctacctgagcctcctgagtagctaggactgtaggtatacatgacgatacttggctaatttttaaattgttttgtagacacggggtctcactttgttggccaggctggtgtcaaactaatggcctcaagtgacccttccacccctgcctcccatcctcgaggcatgtgccaccacaaggagcacttgttcaattttctaaaaaaaaaatttctaaagtaaggctgtgggatgatggcaggaagatcaaagaaaaacagaagaataagttaaaatgacttatgcacacatattcttttgacagcaagaagaacatttagtatatacattccttacaaacaaacaaaaggcagataaacaatgttgtataggaacttcaacacacactgtacaatattcccactttgctgacataagttatggaaatttcatggtttacttgagtgtcgctaccagtattttgcttctctgatgatttttatcaacttcctcatctgttaacttctctccaaggtatgtcatgtcatgacatactgcctctgcacgaacgtggccagtgtctttctattaaacatgtagaatgctttcctaatttctctttttactgtctgtctttgtgttctgcattttccttacttttattgtcagaaactccagaaagtcaatcgtactaatttatcacgatttgctttattaatttatactttgcttatatggaattttgcccagcagacctcattacaatttctaacctgttttattttgttttttttctgagacagggtctccctctgttgtccaaggctggagtgtagtagtgctatcacagctgactgcagcctcaaccttccaggctgaagcgatcctcccatctcaacctcccacgtggctgagactacaggtgcttgccactatgcccaactaatatttggaatttttgtatacgtggattccagaggggtgacagcgaaacgtgagtaagcatggattttgttatatgcagagatggggggctggaactaattctgtatactgagggacgactgtatatgtttttacaattacgctgtaggatacatactgttgcatagccttgaaaataataatttttaattgagtggaataataataatattgataaaagtggcagctggccaggtgtggtggctcacactggtaatcgcaacactttgggaggctgaggcaggaggatggcttgaggccaagagtttgcgataggccttggaaacaaagggagtcaccatccctacagaaaaatacatgaattagcctagtgtggtggcatgttcctgtagtcccagctacttgggaggctgaggtgggaggatcacttgagcccagggaggctgagactgcagtgagtcatgatcaggcctctgcactccagcctgggtgacagagtgagaccctgtctcaaaacaacaaaaaagtagcagctaacatcaactgaccttttaccaggtgcctattgataccatagtttaatttcttataactgtttcttatttcacttaccaactctgtcttcagttactcccagatttttactgtgtgtgtacagatgaccttttgtttagattgaattgtctccccagaagtaagattactgtgagtcatggtgaatggacattctcattacccttgatgtaaattgacagggttttgggtgcctcccagctataatcttagcactttgggaggctaagagaggaggattgcttgaggccaagagttggaggaggcagtatggcagtatggtgagaccctgtctccattattttaaaaaatggacaggctttaccctggaaggcttatacacaatttaaacacccctcatagtataagaaagtgcccatttcactgcacctttgccagcacagggtattataatttagtaagtcattttttgtttgattattttacatagacaaaagaactcatattactttacttgtcacatttcaacatctttcctcagcttattagctctatttcttttctgtctgtaaatggttgttgttgttttgttctttgagacagggtcttgctctgtcaccaggctggactgtagtggcataatcatgcctcactgcagccttgacctcccaggctcaaacttccgcattccgagtagctgggactacaagtgtgcaccaccacccccagctaacttttttcttcttttggatagagacagggtctcactgtgttgtccagaccggtctctagctcctggccttaagcaatcctcctgcattagcttctcaaattgctggaatttcaggcatgagccaccatgcctggcctgggctagtcctgtattctctagagttctctttactttgtgctagccaatctctcattatgctgttcacctgttataatgaataattctctgtattaaattttaccactttaaacttttgagtggtttatgcttcctgattggactctgactaatatgttaggaagggtcccaggagataaacccacacagatgggatttgggcataggtttggtttcccagggggcagtgctgagctctttgccagtgggaaatgggatgctggtgatttccagtaggtgacctcacagtgactcaagctaccacttactgttgattgtgacgaaatgccagctgaggcacatgccttgggagctaagtggttgctgcacttgaccactgtgaagactggtgtgggaagggtcgtttcggatgcacttgagcaggggtccccaacccctgagccatggagccgcaaggagccacacagcaggaggtgagtggtgtcgagtgagggagtgagggaagcttcgtctgtatttacagccactcccctttgctcacattcccgcctgagctccaccttctcagatcagcagcagcattagattctcataggagaacgcaccctgttgtgaactgtgcatgtgagggatctaggttgcgctgtccttatgagaatctaatacctattgatctgtcactttctcccatcacgctcaggtgggaccatccagttgcaggaaaacaagcttaacacgcccactgattctacattatggtgagttctataattattttattatatattacagtgtaataatggaaataaagtgcctaataaatgcaaatgtgcttacatcttttggcccagctcctacctcctggcagcctctccaggcccagaactttctccagtcagcctctacagaccaagctcatgactcacaatggcctatttaggcccataccctacgtcacggcagtctccgcagatgaggctactgcctcacaacagcctccacaggcacagctccatcgttacaatggcctctttagacccagctcctgcctcccagccttctctccaggccctgaactttctcaagtcgacctcaccaggcccagctcatgcttctttgcagcctctccaggcccagctcctgcatcttggtggcccctccaggcccagcctctgcctcccgtcggcctctacagtcccaacatctgtctcacagcagattcttcaggcccagcatctgcctcactgtggaccccccaagccaagctcccaacctttcagcagcttctacacacccagctcctgccacccagtggcttctttaggccaagctcatgcttcacaagggcctttccaggcccaacttttgtctcatggcaaccttccctggccagattcctgcctgtctcccagcagcctagacaggcccaggtcttgcctcacactggcctctctacatccagcttatgcctcacggtggcctctccaggcccaactcctgtcccaggacgtcatctccgggcccaaaacttactcaagtcagactctctagtcccaactgctgcctcctggtggcctatgaaggcccaaaatctcctcaagttggcctctccaggcccagctcctgcctcctgtcagcgtctagaggcccaacctctgcctcatgggggcttctccaggcccacctcttcctcttggctgggtctacaggcacaactgctgcctcacaacagccttttttggcccagttcctgtccagctcatggcggccaatgtaggcccaaaacttcctcaagtcaaactctccaggcccaccttctgcttcccggtggcatgaaccggcccagctttgacttgagaacagcctctgcaggccctgctcttgcctcccaggggctttttccaggcccagctcttgcctcatggcagctgccccaggccgaatttctgcctgcctgccagcagcctcaacaggcacagctcctccctcacagtggcccatttaggcccaactcatgactgtcaggccatttccaggcctagtgcctgcctcgtggctgactcttgaagcccaaaacttcctcaaatcagccttttgcccaacttctgtctactgtcggactctacaggccagcctctgcctcacagtggaccctccagacccagatggtgtctcactgtggcatcctcaggtgaagctcctgcctttcggcagcctctccaggcccagctcctcctgcctcccagtggcctctttcggcccagcccagctcatgcctcccggcggccttcccaagccccgcttttgactttccaccgaaagtcccagcctcctgcctcccgaaggcctgcacaggcccagcctctgcctcacagcggactctcctcgcccagctagctgtcgcctcactgcggcctcccgagtccaaagttcctgcctctcggccgcttcggcaggcccagctcccgcctgccagtggcctcttcaggcccatggggctcattcctcacaacggcctttccaggcccagtttttcccttccggcggcctctccgggcccagaacctcctcaagtcggcctctccagacccacttgcatcctccgggcgtcctctccgggcccagctcttcttcctggttgcgtttccaggcccgactcctgcctctcaacaacctctttggactcagtgcctacccatctcctggcggcattggtcggcccacagcttcctcaagccaagctcccgaggcccaggtcaggcctcacggtggcctctccaggatgagctgctgccctccgatggcatctccaggccccaaatggtctccggtcggtgggctcctccatgccactgctgcatgccactgcttgggcctccatcccagcgactgctgcaggcccaagttgtcctgaagtcggcctctcccggccctgcctcccagcaagtaagcaagctcttttggctcaactgcccagctcccaaccgcctttctaggccccgaactttctgcagccaagctctgagggcccacctcctgcctcccggtggcctgtacaggcccagcactggttggagaacagcctctgcaggccccgcccttgcctcccaggtgcctctccaggcccagctcttgcccccacggcggcctcctggggccaagtccctgcctgcctcccagcagcccgcgtgcggcccagctcctccctcacggtggcctgttgatgcccaactcatgcctctggcaccctgcccagaggcgtgagccccttgcctcacaccggctcctcccacgcggacagaggtcagcgtgagcccttgcctcaacaggccaccgtgagggaggagcagggtcgcacgcgggctgctgggaggtaggcagggacttgggcctgggaggtcgcggtggggcgagagctgggcctggagactcccctgggaggcaacagcgggttttgcagacgctcttctccagccggagctgggactgttcagtcactgggagaagggatgtgggtctgaagagcttggttgcagaaacttcggggtctacaaaggccggcgggagctgagccaaaagagcttgtttgctgggaggcgggagatgcagccaggaggaacagctgggccatgcgggaggcagaggccgggcctcctcaagtcggcctctcagacccacttggcagcctcccggcgtcctctccgggcccagctcttcctcccggctgcgtctccaggccggactctggcccgactccaggtcccaacaacgtctttggactcagctcctgcccagctcccagcggccctggtaggcccacaacttccctaagccaagctccctaggcccagctcaggcctcacggtggcctctccaggctcagctcctgccctccgatggcatctgcaggccccaaacggcctccggtcggtgggctcctctaggcccagcttgggcctcctggcggcctctgcaggcccaagtcgtcctcaagtcggcctggaagtgggcctggaagagcagcaagttggcctccccgggcccagctctgtcctctcggcggcctctccaggtgcaaaacttcctcgagtcagcctctccaggcccagctcctcctgcctcccagtggcctctttcggcccagcccagctcatggctctcggcggccttcccaggccccgcttttgacttttggcagcctcttcaggcgcagaacttgatctccagtcggcctttgcaggcccggcctcctgcctctcgaaggcctgcacgggcccggcctcggcctcacagcggactctccacgcccagctagctctcgcctcactgcggcctccccagtccacagctcctgcctttcggccacttcggcaggtccagctcctgcctgccagtggcctctttaggcccagctcattcctcacaacggcctttccaggccccgtttttcccttctggcagcctcttggcctctaatttgtttatcttttgtgtataaatcccaaaatatggaattttggaatatttccaccattatatattttggtaggtaatttatttggagtgagtttctgcaccatgcccgatttttttattttattttccttattatttggtgttaaacaggtttaatgatggtcatggcaactttttggcacagtgaaaaatatcgcccatgatcaacgtgttctgttctggggaagggggcaaaggcagggtgaatcactttcttaaaaagtatagctcaagttgggagtgcagagggaatggggagaaaaccctcccgctgcctgtgtcgaagtgcaggagcccccacccccatactcacctgagtccagcccttctggggaaagaaggggtgcatgaactccccctagtccacaggcgcctccctgtggcccaaggccctcttcacactccatcttgtagccccagtaggagctattttccgaaaagtgaaaagctctgaaggtcccacaattcatggtatgtacaggggctcggaggagggaaactgcccagctttcccccggcacagctgcaggggtagggggtatagataagaggagcaggccttggccaggtgtggtggctcacgcctgtaatcccagcactttgggagggggaggcaggcagatcacgatgtcaggagatcgaaatcagcctggccaagatgatgaagccccgtctgtactaaaaatacaaaaattagccggacgtggtagcgtgcacctgtaatcctagctacctggaaggctgaggcaggagaatggcgtgaacccggcgggaagaggttgcagtgagccaagatcgcaccactgtactccagcctgggcgacagagcaagactcggtctcaaaaaaaaaaaaaaaaaaaaaaaaaaaagaggcaggccttactccgtcccaaactgaaaggattaaatggctttacctgggagaagataaccatcctgccctccattgctacccccacatactgtccatgttctcagggggtactgtgagtcctgggatctttggggttgcccacctgcctgtggtagttatggagacccccaggtgttgaggcagggctggggtgtccccttccaaccaggctgtcaaggccccaactctggggcagaggcagtggcagggcagccagggttgcgccagagcctgagcaggttgaggtggggtcaggcagggctgggagtcagggcaggggcagcagcagtggacccgctatg

SEQ ID NO: 2857 - DNA, 11821 bp, Homo sapiens
ctctcactcaggctgcagtacagtggcacaacctctactcactgcagcctctacctgccaggctcaagcaattctcctgacttagcctcccgagtagctgggattacaggtaagtgccaccacaccaagctaaattttgtgttttttgtagagatggggtttcgccatgtttcccagactggtctcaaactcctgagctcaaagcaattcacccgccttggcctcccaaagtgctgggattacaggtgtgagccaccttgctcattctagtttaaacttttgagtggtttgtgtctcctgattggactcctacaaatacagaattgatggtaggaagggtaccaggagatagacccacacagatgggatttgggaataggtttggttatccaaggagcagtgctgagctccttgctaatgggatatgggaggctggtgatttccaggaagtgacctcacaatgactcaagctaccacatactgttcattgtgaaatgccagttgaagcatatgtcctgtgagcttaggggtgctacaagttgaccactgcagcagtaaagatgattctgaagaatggcatgggatggatcctttcgaatgcacttgagcagcggtctccaaccacagggccacagagctggaggtgagcagcaggcaagtgaagggaaacttcatctgtatttctagcccctcccgtcgcttgcatgaccacctgagctccatgtcctgtcagatcagcagcagcattagattctcataggagcacaaactctgttgtgaagtgtgcatgcgagggatctaggttgtgtactccttatgagaatctaatgcctgatattctgttactgtttcccatcaccccagatggacagtctagttgcaggaaaacaagctcagagatcccactgagtctacgttatagtgagttgtagaatcatttcattatatattactatgtagtaataatagaaataaagtgctcaatatatgtattgcacttgaatcatcctgaaattattccctcactcccagtctgtggaaaaattgccttccacatattcactctgttttttggtacaggcaaggtcttaatatattgcccaggctgatctcaaactcctggcctcaagtaatatacctctctcagcctcccaaagtgctgagattacaggcataaaccaccaccctcaaccaagactttcttaaaccaaataaaaattaagtgagattacttgagcccatgtggtcaaggctgcagtgagcctgattgcaccactgcactccagcctaggtgacagaatgagactgtctcaaaaaataaaataaaatacaaatgaaccctttatgacattgccagtaactttccctcctaagtgttccccacaagtctttgaattctgtttaattttcacataacatttaagacgtttaagaacttatgtctgtctgtgtcatccctttatgtcaaaagatgcctttttgtcacttccagctggatctaccatgaaagacttctgaatccaggaagagagactgactgggcaacatgttattcaggtacaaaaagatttggagtgtaactcaaaaatgatcaaataatagtgcatgcatcaagtgcaatgggaagctcttcgggagagtgagagaagcttccagttaaggtgacattgaagccaagtcctgaaagatgaggaagagttgtatgagagtggggaggaaagggggaggtggagggatggggaatgggctgggatgggatggagcaaactgcccgggaagggaaaccagcactgtacagacctgaacaacgaagatggcatattttgttcacggaacggtgaattaagtgtggcaggaatgctttgtagagacagtaagttgcttgtatggaattttgcccaagagacctcattgcagtttctgattttttgatgtcatcatccatcactgtccttgtcaaatagtttggaataggtataatgatcacaataaccccaagcataatatttcattaattctcacagaatcacaggtaggtgccacagttatccccattttatgaatggagtgatgaagccttaggaataatgaatgatttgcccaagctcacctggatattaagactgagtcaaatgttgggtctggtctgactttaatgtttgctttgttcatgagcaccacgtattgcctctcctatgcagttaagcaggtagacaagtgacagaaaagcccatgtttgtctctactcacacacttccgactgaatgtatgtatggagtttctacaccaaattcttcagtgctctggatattaactgggtatcccatgactttattctgacactacctggagttagcacagaccccacaagttaggggctcagtcccacgaggccatcctcacttcagatgccaatggcaagtcctaagttgtcacctgtacttttgaccaacctcttacaaatcgggggttcccataactgtcttcttgggtttaataatttgctagaacagtttacggaactcagaaaaacagtttattttctttttttctgagagagagggtcttatttggttgcccaggctggtgtgcaatggtgcagtcatagctcattgcagccttgattgtctgggctccagtggttctcccacctcagcctccctagtagctgaggctacatgcctgcaccaccacatctggctagtttctttttttttttttttttgtatagatggggtcttgttgtgttggccaggctggccacaacaaattcctggtctcaagtgatcctcccacctcagcctctgaaagtgctgggattacagatgtcagccaccacatctggccagttcatttcctattactggttcattgtgaaggatacatcccagaaacagtcaatgaaagagacgtgcatgctggatgcagtggctcatgcctgtaatctcagcactttgggaggccaaggtgggaggattgcttaaactcaggagtttgagaccagcctgggcaacatggtgaaaacctgtctctataaaaaattaaaaaataataataataaccagtgtggtgttgtgcacctagagttccaactactagggaagctgagatgagaggatgtcttgagctggggactggggaggcttaggttaccataaggtgagattgtgccactgcactctagcttggacaaaagagcctgatcctgtctcaaaaaagagaaagatacccagggcaagttaagttcggaggggcacagagctcccatgccctctgttgaacatgcgaccctcccagcatctcctgtgtccagcaaccctgaaagttctgcaaaccccattcagggtgtttatggaggctttattatgcaagcaagattgataaaatctttggctgttggtgattaagtcagtctccagcccctcttcctcctggagttcagtgcatgaggctgaaagttccaagcctcttaccatgtggttgcatggtaatcagccctcctcttgaagaaatttaggagcttgcagtcacccagtcatctcaacaacatccccaaatgcattcttaccatgctggagatcccaaagttcttagaggctcttgtgttagaaacctgggaccaagaccaaatattaaaacaaaagatgttcctgtcacatctatcactgaggtctttgtaagctttagaagctctgtgccaggaaccagggacagagattaaatatatatttcttttcttttttttgagacagaatctccctgtgtcatccagactggagtgcagtcttgtgatcatagctcactatagctttggccttctgagatcaagcaatcctcccatctcaacctcccaagtagctaggactacacatacatgtcacccatgcccagctcatttttgtagagtcggagtttcaccatggtggccaggttggccatgttggccagatggggtcttcttttgttgcccaggctggccacaaattcctgggctcaagtgatcctcccacctcgtccttgtagagatgagatttagttatgttgtccaggctgatttcaaactcctgggctaaatcgattgtctcacctcagcctctcaagtagctgggactacaggcgcataccaccatgtcgggctaatatttatttttatttttttctagaggtgggggtctcactatgttgttcatgctagtttcaaacttcgggcctcaagtgttcctcctgccttgacctcccaaagtgttgggattctgggtgggagccaccatgcccagcaatcacaagggtctttatataaaaaaaaaagagggtaggagattcagaattggagcaggagatgtggtgatgaaagcagaggtaagagagggagatttgaagatgcttcacttctggctttgaagatggagtcaggggccatgatccaaggaatgggggtggcttctagaagctggaaaagccaagggaacactttagagtctccagaaggaatgcagccatgctgacaccttgactttagccttaatagacctagtttgggtttctggcccctagaactgtaagatggtagatttgtggtgttttaagccactaaatgtaggaaactgcaaactatgttgcagcagcaagaagaaatgaacatgaagccaggcatgatggctcatgccggtaatcccagcactttaggaatttaggcaggaggatcacttgaggccaggagttcaagaccagtctgggcaatatagtaagaccttgtctctacaaaaaatgaaaaaattggccaggcgtggtggctcacgcctgtaattccagcactttgggaggccgaagcgggcagattacctgaggtcaggagttcgagaccagcctggccaacattgcaaaaccccggctctactaaaaatacaaaaattagctgggcgtggtggcacgcacctgtaatcccagctacttggaaggctgaggcaggagaatcacttgaatctgggaggtggaggttgcagtgagccgggatcgcaccattacactacagcctgggcaagaagagtgaaactctgtctcaaaataaaataaaataaaataaaataaaataaaataaaatacaaaaaatttagccaggcatgatggcatgaatctggagtcccagctacttgggaggctgaggtgggaggatcacttgagcctggaaatttgaggttgcagtgagctgtgattgcgccactgcactccagccttcgtgacagtgagatcttgaagaaaagaaagaagaaagtaaagaaagaagaaatgagcatggtgggcatggggacagatggcaatgttaaatagaatggtcaggggtggcctcctaagtgaaaattgagtaaagacttgaaggaggggaaggagctggccaaggtgctgagggaagaggatcataggcagaaacaatagaataaaatgtctgaggtgtgtctgaggctctggaaggaggcccatggagcagacggagagagggagagaattaggggagggggccagggagttgctgggtggggatcagtacagatcacataagccctgggaggttattgctggggctttggcttttactctgactcagatgggaactgcgggaaggttctgagcagagaggcgacatgatctgtctcccgatttaaaagcattctctggctgctgagttgagaaagactgtgggaagatgtgggtagaagcatgggggccaagctttggcaacatccaggcgggagatgatggtgatcctgaccagggccatggtggtgttgagagatggtcagaggggagaagtaggggaggaggccagggagttactgggtggggatctttagtacatgtcgaagacagtcaacaggatttcctgacagactggatatggggtgtgagagaaggcaggggtcaaggttgagtttgattgttactaaaattattaagtaattttaaaaaacactactgcctttcccaatcctaccaagtatgggatgctagattaaagaaatctcttcaggctcattgcagtggctcatgcctgtagtcccagctgtttggtaagcagaggtgggagtatcttttaagggcaagtgttcaagaccagcctggacaacacagcaagatctgctctttacaaaaatatttttcaaaattaaataaatgtagctaggcatggtgatgtgtacttgtagtttcagctactcaggaggctgaagtgggcagatctcttgaggtcaggagtttgaggccagcttgggcaacatagcaagacccctcactctacaaaaaaattaaaaaaataaccaggcatggtggcactcagctgtactaccagctactggggagctgaggcaggaagatggcttgagcccaggtggtcgaggctgcagtgagctgtaagtgcacagctgcactccagtctgggtgacagagcaggacctgtctcaaatacaaataaacatacaagtaaaataatgaaatctcaagtcagagccttttggctctgcagcccttgcaatcgctcagccgtgcagtggggtttgcgtcgctgggaatgaggagacccctgctcggtgttgttgcctgactaatcagtgttttaaaacatatattaatcggggtgggcgcagtggctcacacctgtaatcccagcacttagggagacccaggcgggtggatcacctgaggtcaagagttcaagaccagccttctctactaagaaaactccttctctactaagaaaatacaataattagccagatatggtagtgggtgcctgtaatcccagctacttgggaggctgaggtaggaaaatcgcttgaacctctgcggggcggaggttgcaatgagctgagattgcgccacttcactccagcctgggcaaaagaacaagactttgtatcaaagaaaaaaaaagtattatatcaacatgtaatggttttattattaatatataaagaatattaaatatttttaaaatcttctattatattaacatgtaatggctttattaatatgtgatgagtaatatttaaaaatttttgtcttattttctagttttaatataattatttacagaaagaaatagtcttagagatcttcaataaagttaaaaaatgtaaagggatgttagaccccaaaagattgagaatttctagtttagaaatattcagagtaagccacatacaacttgctacttgaactattttttttctttgttttttattttaggagatggggtctcaccctgtcgcccaggcttgagtacagtagtgctatcacagctcactgcagccttgaactcctgggctaaggatcctcctacctgagcctcctgagtagctgggactgtaggtatacatgacgatacttggctaatttttaaattgttttgtagacatggggtctcactttgttggccaggctggtgtcaaactcatggcctcaagtgacccttccacccctgcctcccatcctagaggtatgtgccaccacaaggagcacttgttcaattttctaaaaaaaaaatttctaaagtaaggctgtgggatgatggcaggaagataagagaaaaacagaataagttaaaatgacttattcacacatattcttttgacagcaagaagaacttttagtatatacattccttacaaacaaacaaaaggcagataaacaatgttgtataggaacttcaacacacactgtacaatattcccactttgctgacataagttatggaaatttcgtggtttacttgagtgtcgctaccagtattttgcttctctgatcatttttatcaacttcctcatctgttaacttctctccaaggtatgtcatatcatgacatactgctgctgcacgaacatggccagtgtcttcctattaaacatgtagaatgctttcctaatttctctttttactctctgtctttgtgttttgcattttccttacttttattgtcagaaactccagaaagtcaattgtactaatttatcaccatttgctttattaatttatactttgcttatatggaattttgcccaacagacctcattacaatttctaacctgttttatttatttatttttttttttctgagacagggtctccctctgttgtccaaggctggagtgtagtagtgctatcacagctgactgcagcctcaaccttccaggctgaagcgatcctcccatctcaacctcccacgtggctgagactacaggcgcttgccactatgcccaactaatatttggaattttcctatacgtggattccagaggggtgacagcgaaacgtgagtaagcatggattttggtatatgcagagatggggggctggaactaattctgtatactgagggaggactgtatatgtttttacaattacgctgtaggatacatactgttgcgtagccttgaaaataataatttttaattgagtggaataataataatattgataaaagtagcagctggtcaggtgtggtggctcacactggtaatcgcaacactttgggaggctgaggcaggaggatggcttgaggccaagagtttgcgataggccttggaaacaaagggagtcaccatccctacagaaaaatatatgaattagcctagtgtggtggcatgttcctgtagtcccagctacttgggaggctgagctgggaggatcacttgagcccagggaggctgagactgcagtgagtcatgatcaggcctctgcattccagcctgggtgacagagtgagaccctgtctcaaaacaacaaaaaagtagcagctaacatcaactgaccttttaccaggtgcctattgataccatagtttaatttcttataactttcttatttcacttaccaactctgtcttcagttactcccagatttttactgtgtttgtacagatgaccttttgtttagactgaattgtctccccagaagtaagattactgtgagtcatggcgaatggacattgtcattacccttgatgtaaattgacaaggttttgggtgcctcccagctataatcttagcactttgggaggctaagacaggaggattgcttgaggccaagagtttgaggaggcagtatggcagtatggtgagaccctgtctctattattttaaaaaattgacaagctttaccctggaaggcttatacacaatttaaacacccctcatagtataagaaagtgcccatttcactgcacctttgccagcacagggtattataattaagtcattttttgtttgattattttaaatagataaaagacctcatattactttgcttgtcacatttcaacatctttccttagcttattagctctatttcttttctgtctgtaaatggttgttgttgttttgttctttgagacagggtcttgctctgtcaccaggctggactgtagtggcataatcatgcctgactgcagccttgacctcccaggctcaaactttagcattccgagtagctgggactacaagtgtgcaccatcactcccagctaatttttttctttttttggatagagacagggtctcactgtgttgtccagaccggtctctagctcctggccttaagcaatcctcctgcattagcttctcaaattgctggaatttcaggcatgagccaccatgcctggcctgggctagtcctatattctctagagttctctttactttgtgctagccaatctctcattatgctgctcacctgttataatgaataattctctgtattaaattttaccactttaaacttttgagtggtttatgcttcctgattggactctgactaatatgttaggaagggtcccaggagataaacccacacagatgggatttgggcataggtttggtttcccagggggcagtgctgagctctttgccagtgggaaatgggatgctggtgatttccaggaagtgacctcacaatgactcaagctaccacttactgttgattgtgatgacatgccagctgaggcacatgccttgggagctaagtggttgctgcacttgaccactatgaagactggtgtgggaagggtcgttttggatgctcttgagcaggggtccccaacccctgagccatggagccgtaaggagccacacagcaggaggtgagtgtgtcgagtgagggagtgagggaagcttcgtctgtatttacaaccactcccctttgctcacattcccgcctgagctccaccttctcacatcagcagtagcattagattctcataggagaacgcaccctgttgtgaaccgtgcatgtgagggatctaggttgcgctgtccttatgagactctaatacctattgatctgtcactttctcccatcacgctcaggtgggaccatccagttgcaggaaaacgagcttaacacgcccactgattctacattatggtgagttctataattattttattatatattacagtgtactaatggaaataaagtgcctaataaatgtaatctgcttaaatcttttggcccagctcctacctcccggcagcctctccaggcccagaactttctccagtcggcctccacagaccaagctcatgactcacaatggcctatttaggcccataccctacctcacggcagtctccgcagatgaggctactgcctcacaacagcctccacaggcacagctccatcgttacaatggcctctttagacccagctcctgcctcccagccttctctctaggccctgaactttctcaagtcgacgtcaccaggcccagctcatgcttcttggcagcctctccaggcccagctcttcctcccggcggcctctgcaggcccagactgtcatcaagtcggcctgtccagggccagctcctgcctcccggcgccctctgcaggcccaagtcgtcctcaagttggcctccccaggcccagctccagcctctcggcggcctctccgggtgcaaaagttcctcgagtcagcctctccaggcccagctcctcctgcctcccagtgcctctttcggcccagcccagctcatgcctctgggcggccttcccaggccccgcttttgacttttggcggcctctgcaggcctcgacaaggcccggcctcctgcctcccgaagcctgcacaggcccagcctctgcctcacagcagactctccacgcccagctagctctcgcctcactgcggcctccccagtccaaagctcctgcctctcggccgcttcggcaggcccagctcccgcctgccagtgcctcttcaggcccatggggctcattcctcacaacggcctttccaggccccgtttttcccttccggcggcctctccgggcccagaacctcctcaagttggcctctccagacccacttgcaccctccgggcgtcctctccaggcccagctcttcctcccggctgcgtctccaggcccgactcctgcctcccaacaacctctttggactcagtgcctgcccatctcctggcggccttggtcggcccacagcttcctcaagccaagctccccaggcccaggtcaggcctcacggtggcctctccaggatcagctcctgccctccgatggtgtctccaggccccaaatggtctccggccagtgggctcctccacgcccagcttgggcctcccggcgacctctgcaggcccaagtcgtcctgaagtcggcctctcccggccctgcctcccagcaagtaagcaagcttttttggcttagctcctgcccagctcccaaccgcctttgtaggccccgaactttctccagccaagctcttcgggcccacctcctgcctcccggtggcctgtacaggcccagctctggctggag

SEQ ID NO: 2858 - DNA, 946 bp, Homo sapiens
caccagcatccgtttcacctgcagttgaagatccgtgaggtgcccagaagatcatgcagtcatcagtcccacggagcagcccgtgaggctgaggctcctcccactggaccgccccccaactggcaccactgctgcccctgcccctactctcagcctcacgtgactctcgggcagaggcagtggtggggcagccagggcagcgtcaagagtctgagccaggtgaggtgcggtcaggacccccacagggctgggagtcagggcaggggcagaacaaaccttggaggggaagatgtgtgcatagtgggcctggagggcggctgtggcctagtggacaggaagaagcagtgggcctggaagagctgcatgatcagggccggcactggtccagggcacgtgcagtgaagaggacagcgccttctcggtctccggttccctgagcctgtccttggcttctccacctgtacaggcaaaggggaagctgtccccatcacacatggcacacttgggggtgttgggctttggactgcagctggagcatcttctcatcttgcatttgggcgtggtggggtcctccagtgtgggatccatgtccgtggggttccctctgccccgaccccgaaagcccagtcagtttctcttcaggctctgccccccgggtggctcagcccagctcctgcctaggaaagccttagtgttgggagggaccctgatgactgaggagcctggtagctccaggtcgcccacactttcaggtctcttgcaccagaaggtggcaggatccattgggaggaaacaggtcaccttggaaggcgtccctgggcccccatccccaggggtaggggccgtagggggcccgctctgctgccttgaccagactcctgggcattgaaggctcctgggcccagtaagaaggaggtgggtgccaaggttgaggaggaagcatccg

SEQ ID NO: 2859 - DNA, 312 bp, Homo sapiens
cgagatggagtttcactcttgttgcccaggctggagtgcaatggcgctatctcggctcagcgcaacctccacctgccgggttcaagcgattctcctgcctcagcctcccgagtagttgggattacaggcatgtgccaccatgcccagctaattttgtatttttagtagagatggggtttctccatgctggtcagactggtctcaaactcctgatctcaggtgatctgtctgccttggcctcccaaagtgctgggattacaggtatgagccattgtgcctggccaaaattaatactttttatattaaatttac

SEQ ID NO: 2860 - DNA, 5549 bp, Homo sapiens
tttcacctgcagttgaagatccgtgaggtgcccagaagatcatgcagtcatcagtcccacggagcagcccgcgaggctgaggctcctcccactggaccgccccccaactggcaccactgctgcccctgcccctactctcagcctcacgtgactctcgggcacaggcagtggtggggcggccagggcagcgtcaagagtctgagccaggtgaggtgcggtcaggacccccacagggctgggagtcagggctggggcagaacaaaccttggaggggaagatgtgtgcatagtgggcctggagggcggctgtggcctagtggacaggaagaagcagtgggcctggaagagctgcatgatcagggccagcactggtccagggcacgtgcagtgaagaggacagcgccttcttggtctccggttccctgagcctgtcctcggcttctccacctgtacaggcaaaggggaagctgtccccatcacacatggcacacttgggggtgttgggctttggactgcagctggagcatcttctcatcttgcatttgggcgtggtggggtcctccagtgtgggatccatgtccgtggggttccctctgccccgaccccgaaagcccagtcaatttctcttcaggctctgccccccgggtggctcagcccagctcctgcctaggaaagccttagtgttgggagggaccctgatgactgaggagcctggtagctccaggtcacccacactttcaggtctcttgcaccagaaggtggcaggatccattgggaggaaacaggtcaccttggaaggcatccctgggcccccatccccaggggtaggggccgtagggggcccgctctgctgccttgaccagactcctgggctttgaaggctcctgggcccagtaagaaggaggtgggtgccaaggttgaggaggaagcatccaagtatgtgttggaggaggacagggtgggaccatagactttgccaaaagctgcaggtggatcgggggaccctgggggctcaggatccagcaaggggcggcaggagtaaaggaggaaggaatgacaggtgcaaataccttcccaccaaagcccttgttgccctctggctcctccccagagttgtccccactctcagtcggtcacccactccttgaacttgagatcggtgtcggtggtgctaaagccatcatcagcaatgacatcatcaccccctcctcctcatggatgaccgtgtgctcctcgtcactcgctgtgtcctcaccggccatgtgctgggaatgagcagctcaggtgggcagcagcagggctgcccacgggtcacctccctcaccaggggctgcaaagtggcctggagctccatgctgagtagaaggctttgggccagagtatgatgcagtgccagacaccacctgtgtcagttcccgtagtgcctggcggtctatttccctgccgtccaggctgtgtacccctctgtgggagaaggcttgggccaggctgagccaggttccctgactgtgtgcagctgttctgccccacagaagctgctccttggtatccgagctctggagtgtttgggctgcaactgacaggagttcagaggacaccccaggggcagtggcagtgcccgtctctgatatgctccgctcccacgagcccttgttacactcctgctagcccctggcttgtgggcttggcctctgagctggacttctttcggtccttgttgcaagtgggccaccttcacctggaaggccaggttgtatttctgcatctcattgggccccagggtgtaccaccgctcgctcagcatctggctgatggtctggttatcctggttagggtgaccctggtgcgccctgccagggcctggtgccgcttgctgaagatcatgaccgccactcatgggccaccagatgtggtccttgtcccatttgttggggttgcgtccatccttatcagaagatgagtcctgttccttgcgcagggcactgagggactgggcctgacatcatctgagtggtagaggcaactgggtgtcaggagacatgatggagaggaaagcatcatcatggtcattctctgtctcactgtccagcagggactctcctgaggggcccagggctcctcctccatggtgggaggtgagcttttaccaggttccaccacccgcaaagtgtgtggggttgcaggccctgggctttcagggcagatggctccagggggccgcccagggtcaacactccctgtcccacctggtggacgctcatgagcaacagctgccaacttggcaggttgttttctctggttggaggccactgagtgactggcaggttgctgggcctcgtgtggctgcggggggtgcgtcaggaaggggatggagtaccaggggaacacggccacagagtgaacttccacattcctccacacgaacatgctgacgccacgggaggcctcactgaacgcaggcctgagggccgagtacttggtccgggcagggggttcctggcaggggctcacacctcctcgccccctcctcagccaaggtggcttgggcccagagaaggggaggttggagaggagcagaaggccaggcctcaagttttgttttttttgtttgttttgttttttgtttttgaaatgtagtttgactcttgtcacccaggctgcagtgcagtggcacgatctcagtggccttcatacctggctaattttttgtatttttactggaggtggggttttgccatgttggccaggctggtcttgacctcccgacctcaggtgatccacccacctcggcctcccaaaatgggattacaggcatgagccaccgctcccaacttcattcatttttacttgaaaaactcccttaagcatttttttaaggtagacctactggtcctgaatgccctcagctttgtttgtcgaggaaacacgttacttcttctttctttctgaaggacagctttgtcagacatagtattagttgctggcagtttttttctttcagcactttgaatgtattattcgattctgtcctgacctgcaaagtttctttaacttttgactatttgattatattgtgacttggtgagtatctatttggtttgaacctctttaggaatctttaagcttcatggatttagatgtctaaatctttcccatgatttaggcagttttcagccattctttaaataagctttcttctcctttctctactttccttctcaaactcccataacctgacaatggtttgcctaatggtgtcttgttggctttcttttctctgtctctttttttttcttttttttttttttttgagacagagtcagagtcgtgctttgtcacccaggctggagtgcaatgtgtggtctcggctcacattgcactccaacctccgcctcctgggttcaagcgattctcctgcctcagcctcccaagtagctgggactacaggtgtgtgccaccacacccggctaatttttgtatttttagtagagatggggttttgtcacgttggccaggctggtcttgaactcctgacctcttaatctgcctgcctcggcctcccaaagtgttgggattacaggcttgagccaccacgcccagccttcttttctcttttttattctttttttctttgttctctgactggataatttcagaagatctatattcaagtttacagattctctctcctgttgaagtttactattgtgttatatcacccagtctggtcttgaactcctgggctcaagcgatcctcccaccttggcctcccaaagtgctgagtttacaagcatgagccactgcatccagtcagtcccagcactttgggaagctgacgtgggaggatcacttgagctcaggagtttgagaccagcctgggcaacatactgagaacttgtctctatattaaaaaaaaaaaaaaaaagtctttgggaggccaaagcgggaggatcacctgaggtcaggagttcgagaccagcctggccaacatggcaaaaccccatctctactaaaaatacaaaaattagccaggtgtggtggcacacacctgtagtggtggtgcatgcctgtagtcccagctactcaagaggctgaggcaggagaatcacttgaactgggagatggaggttgcagtgagctgagattgcaccagtgcactccagcctgggcaacagagtgagactccatcttataaaaggaaaaaagaaagaaaagaaaaattccatatctgagtgtttactcctgagtttttgagattgttattaagatcgtgctctactgtgatgatttaggtttgtttgataatcagaaaaaagcatattcttttgggtgttcagccacactgctttggtgtcacaactgcacattggtttcacagttgcaggacaaattcgagcatcttaaaatgattcaacaggaggagataaggaggctcgaggaagagaaaaaacaactggaaggagaaatcatagatttttataaaatgaaagctgcctctgaagcactgcagactcagcactgatacaaagaaagacaaacatcgtaagaagcaatagtttctcttactattctgagagccttatcattctacatcccatcttcctgtgagattgtctttgtagcatttaactctaattgcagttctctttttaaaaattggcttgcttattgtatattttccccaactaaagcgtgaactcctagcagggcgtggtggctcatgcctgtaatctcagcactgtgggaggccgaggtgggtcgactacctgaggttaggagtttgagaccagcctgaccaacatgatgaaacgctgtctctactaaaaatacaaaaattagctaggtgtggtggctgggacctgtaatcccagctacttgggaggctgaggcaggagaatcacttgaaccctggaggtggtggttgcagtgagccgagatctcaccattacactccagcctgggcgacaagagcaaaactccatctcaaaaaaaaaaaaaaaaggatgaacttgaaggcaggtcctgtgtccatcttttcagattctgtatcccagcacttaggacatagacaaacacgaagatgacaatcaatatttgccaaaatgaaaaaacaaaagaaacatgtaacatcatgtaaaagaagctggttaggtggagaaatttctttaccatagtcttgcttgtggatccagtagtgacttttacattttatatctaaatagaagctggaggctttgttgggtactcataggcataaaatattatgttatttattatagagttaaatgctacaaagacaaatctaattaataggcctattttcctttttaagttctactcataatttcttcatagtttttatgataaaaggttggattttgattagaactcccatgcttttgtgtcagaattaaaactggtattagaataaataattcaaaagctagagaaagagtacaatgagaagccatgagttgcatttgaattataatattatgtcttacagatttggggtatatgctaaagttaccaaagttgtagaaaataagg

SEQ ID NO: 2861 - DNA, 2357 bp, Homo sapiens
ggcctgcagacgctcttctccagccagagctgggactgtacaggccactgggaggcaggatgtgggcctgaagagcttggctgcagaaactttggggtctacaaacgccggcgagagctgagccgaaagagcttgcttgctgggaggcaggagctgggccgggagatgcagccaggaggaacagctgggcctgcagaggccgccatgcgggaggcagaggctgggcctcctcaagttggcctctccagacccacttgcagcctcccggcgtcctctccgggcccagctcttcctcccggctgcgtctccaggcccaactccggcctcccaacaaggtctttggactcagctcccccgcagcttccagcggccctggtaggcccacaacttcctgaagccaagctccccaggcccagctcaggcctcacggtggcctctccaggctcagctcctgccctccgacagcgtctccaggccccaaacggcctccggtcggtgggctcctctaggcccagcttgggcctcccggcagcctctgcaggcccaaatcgtcctgaagtcggcctctccaggcccagctccagcctcccggcggcctctgcaggcctaagtcgtcctcaagtcggcctggaaatgggcctggaagagctgcaagtcggcctccccgggcccagctccgtcctctcggcggcctctccaggtgcaaaacttcctcgagtcagcctctccaggcccagctcctcctgcctcagtggcctctttcggcccagcccagctcatggctctcggcggtcttcccaggccccgcttttgacttttggtggcctcttcaggcccagaacttgacctccagtcggcctttgcaggcccggcctcctgcctctcgaaggtctgcatgggcccggcctcggcctcacagcggactctccacgcccagctagctctcgcctcactgcaccctccccagtccaaagctcctgcctttcggccacttcggcaggcccagctcctgcctgccagtggcctctttaggcccagctcattcctcacaacggcctttccaggccccgtttttcccttccggcagcctcttggcctctaatttttttatcttttgtgtataaatcccaaattatggaattttggaatatttccaccattatataaatattttggtaggtaatttatttggagtgagtttctgcaccaagcccgaattttttattttattttccttattatttggtgttaaacaggtttaatgacggtcatggcaactttttggcacaatgaaaaatatcgcccatgatcaacgtgttctgttctggggaagggggcaaaggcagggtgaatcactttcttaaaaagtacagcttaagttgggagtgcagagggaatggggagaaaaccctcccactgcctgtgtcgaagtgcaggagcccccacccccatactcacctgagtccagcccctctggggaaagaaggggtgcatgaactccccctattccacaggcgcctccctgtggcccaaggccctcttcacactccatcttgtagccccagcaggagctattttccgaaaagtgaaaagctctgaaggtcccacacttcatggtatgtacaggggctcagaggagggaaactgccaagctttccccctgcacagcagcaggggtagggggtatatacaagaggagcaggccttggccaggcgtggtggctcatgcctgtaatcccagcactttgggaggtggaggcaggcggatcacgatgtcaggagatcgaaatcagcctggccaagatgatgaagccccgtctgtactaaaaatacaaaaattagctggacatgttagcgtgcacctgtaatcccagctacccagaaggctgaggcaggagaatggcgtgaacccagcaggaagaggttgcagtgagccaagatcgcaccactgcactccagcctgggtgacagagcaagactctgtctcaaaaaaaaaaaaaaaaaaaagagaagcaggctttattccgtcccaaactgaaaggattaaatggctttacccgggagaagataaccatcctgccctccattgctacccccacataatgtccatgttctcagggggtactgtgagtcctaggatcttctttggggtggcccacctgcctgtggtagttatggagggacccaggtgttgaggcagggctggggtgccccttccagccaggctgtcgaggccccaactctggggcagaggcagtggcagggcagccagggttgcgccagagcctgagcagggtgaggtggggtcaggcagggctgggagtcagggcaggggcagcagcagtggacccgctatg

SEQ ID NO: 2862 - DNA, 1370 bp, Homo sapiens
tttttatttttttgtagagatggggccgcactatgttgccatggctgaccttgaactcctgcactcaagggattttcctgccttggcctcccaaagtattggtattacaggcatgagccattgtgcccactgtctctggttcttaaccttctgcctccctcttccacttttaaagaatgcttgtaattacatgggctctcctagatactccaggataatcttgttttaaggtcagctgatgatgagcaacattaattttatctgcactcttaattcccccttcctatgtaattgtgctgtgtaacataggacatgagcaattagttggcagggtggggggttattactttggccaccacagtaacttgtgccaggtactgagctaaccactggtgaattaagcatgaataacacacactccctaatctccatccattcatgggaggagcacctcacctgccatgctcctgagaatctggggagtcaaggaagtcttccatgaggaggtgatgccaaagcggacaagtgacagaggagccgaagctagccaggaagagagtagaggtttaaggggaagcatattataagcagaggatatcacccacttcagagactcccagaggagaaagagtgtgcattcagggggcagatgaggctgagttggactccatagcaggtgaaatggagaggggcaagcagtgaggctgccttgcaaggcagggcagagcgggggctgttaaggagtttggacttaatccccaaggcaaggagaagtgatgtaaatggggaagtaacatgatgagattcatggattagagacatggctcaggcttctgtagagaaggaaccagggagagcagatggctcaatgggtgtgcaggagacctctcactgagttgagggagaggtttttaaaacagaagaagtttgagtaatttaaatgatggtgggaaggcgctaaaagtgggagataggttaaagatacaggaaagtgggaggaagaactgacaagtgaggttccagagagggcaggagaagaggagattcccttagggggattaacactttcttttctttttctttctaagacagggtctcactctgtcgcccaggctggagtgcagtggcatgatcttggctcactgtagtgtagacttcccagcctcaagggatcctcccaccccagactcccaagtagctggaattacaggtatgcaccaccaccacacctggctaatatttttcttttttttggtagacatatagtctcactatgttgcgctgacaggtctccaactcctggcctcaagtgatcctcctgcctaggcttcccaaattgctgggattacaggcatgagccacagtgcctg

SEQ ID NO: 2863 - DNA, 3828 bp, Homo sapiens
attttttttttttttttttttttgagacggagtctcgctctgtcgcccaggctggagtgcagtggcgctatctcggctcactgcaagctccgcctcccaggtccacgccattctcctgcctcggcctcccgagtagctaggactacaggcgcccgccaccacgcccggctaattttttgtatttttagcagagacggggtttcaccgtgttagccaggatggtctcgatctgctgacctcatgatccacccccctcggcctcccaaagtgctgagattacaggcgtgagccaccgcgcccggctggtggtgggattttatgagtgtgagaatagaggggtacatcttccagggcttcctgtgctgctgtgagagatttggagtttatcctgaatgtccaggaagccacatttactgtagatctgtatctcagatactctgtagtgtggaaaagtgttggagaaaggccacactaaggatacggaggtcattgcagtaatccccaggagaattacaagggttttaaagacagttgcagtgggacgggaggagaaaagatttgatagctctaaggaggtagaatacaccataccacagcattaatcagtaagaaatatgtagaagtaaactctgtctcttgaggtttccagccgatgactatcttttgaagaaatgtccagcatattctttttttttaactgcacaagttgctttgcagaccataattggaatcccagtttatcagggggaagttgtcacatgtactgagggtatcgaaatctgaatggttaaataatcatatgataagactcaaattttcttgtaatccaggaaatgcacattgaaactataattagatcattgtatgttcatcagattaggaattgcaaagtttgacactatcaagagatgataagcgtttgaagaaaatgagattctcgctgggcgcggtggctcgtgcctgtaatcgcagcactttgggaggccgaggcgggcggatcatgacgtcaggagatcaagaccatcctggccaacatggtgaaaccccgtatctactaaaaaatacagaaattagctaggtgtggtggcacgtgcctgtaatcccagctactcgggaggctgaggcaggagaattgcttgaaccagggagccggaggttgcagtgagccgagatggggccactgcactccagcctggccagagagggacatgccatctcaaaaaaaaaaagaaaatgagattctccttcactatgggttgcaagtgtatctttgagcagtgtagccactagcagattggatatatcttaagatcagtggttccacttctagaaaatactaagaagccagagacatttgtatacaaggggcaggatattagggttgtttgtggcaacactgtttataatggtttaaaaaattggaaacagcctaaatgtccattactaggggaatgcttgtagagtgggtatgtatctttttataataaatcgattggaaagaaatgctaatttaggatagtgataactttgcagtgtggggaggatgggatgggacagaaggaacaatttcgtctgtaatgtggaaaaaagatgagtgggtttataaaataacagagaatggtctggatgataggtaagtggtgttttatgttattctttgtacatttctataggttaatgtccacccttcaatttcttgaagtaaaagttaaagtaaaaatttaacttgagttaacatgtagctataaaaagttaggctcagtcattttgggaaaaggctgcaaactgcactggtcccaggtttcaaaaatagtaagttgggtgaaagaaaactcaaatgccaaataagcattaaaaattaaaatgtggagaagttattaagcattgagcgacatttttggatttttaaatttttttgttttttgtagagactgggtctcactatcttgcccaggccagtctcaaactcctgggcccaagtgaccctctggctttggcctcccagagtactgggattacaggcaggagacactgtgcccaccgttgacccaaatttcctttcctagaaacctaagttctaaccattaatagattaaaaacattttttgactgcttcttttgaaatacgtgttacttgcttatactttccataatactaaaagataggccaggcgcggtggctcacacctgtaatgccagcactttgggaggctgagccgggcggatcacctgaggtcaggagttcaagaccagcctcaacatggagaaaccccgtctctactaaaaatacaaaaaattagccgggcgtggtggtgcatgcctgtaatcccagctacttgggaggctgaggcaggagaattgcttgaacctgggaggtggaggttgtggtgagccaagatcgtgccgttgcactccagcctgggcaacaagagcgaaactccgtctcaaaaaaaaaaaaaaaaaactaaaggataatttccttaaaaaaaagataaagtcattactctgtaaaatgtaaaactgaacatgtgttaaggattttatttaactcattaatgaggtattggagactgcaaagtacagccaatttgtagattagaaatactgaattgaatttgcaaatgaaagacaaaactggcctctctacagagggggaaggaagtcaaatgaacctacatttggtaacatgcatttgcctgtctagactagaattatttgcattgctgttacccatagtatgcagaattataaaataactcctataaattagaattagataaccgtgaagagtatgctctaatctagaagctagtttgccaatgaatcatattttctctgtaggaaaaaacaacaataaactaagctgagtaaaatagatttttctttttcttttttttttttctttttggagacagagcttaccctgtcaccaggctggagtgcagtggcgcgatctcggctcactgcaacctcttcctcccgggttcaagcgattctccttcctcagcctcctgagtagctgggattacaggcacatgccaccacacccagctgatttttgtatttttagtagagacggggtttcaccatgttcgccaggatggtattgatctcttgaccttgtaatccgcccacctcgacctttccaagtgctgggattacaggcatgagccactgctcctggcctagatttttcatctgagttaagatctagttggatgatgatgatgataacgataatttttttttttttttttgagacagagtctccctctgctgcccagcttaggagtgctgtggtttgatctcggctcactgcaacctctgcctccaggactcaagcagttctcatgtctcagcctcccgagtagctgggattacaggtgcatgctaccatgcctggctaatttttgtatttttagtagagatggggtttcgcatgttggccaggctggtcttgaactcctggcttcaagtgatccacccaccttggcctctcaaagtgttcgaattacaggcgcaagccaccacaccaggcctggatttttttttttttgagacggagtctcgctttgttgcccaggctggagtgcagtggggcaatcctggctcactgcaagctccgcctcccgggtgcacgccattctcctgcctcagcctcccgagtaggtgggactatcggtgcccgccaccacgcctggctaattttttttgtatttttagtagagatggagtttcactgtgttagtcaggatggtctcgatctcctgacctcgtgatccacccgccttggcctcccaaagtgctgggattacaggcgtgagccac

SEQ ID NO: 2864 - DNA, 3807 bp, Homo sapiens
atttttttttttttttttttttgagacggagtctcgctctgtcgcccaggctggagtgcagtggcgctatctcggctcactgcaagctccgcctcccaggtccacgccattctcctgcctcggcctcccgagtagctaggactacaggcgcccgccaccacgcccggctaattttttgtatttttagcagagacggggtttcaccgtgttagccaggatggtctcgatctgctgacctcatgatccacccccctcggcctcccaaagtgctgagattacaggcgtgagccaccgcgcccggctggtggtgggattttatgagtgtgagaatagaggggtacatcttccagggcttcctgtgctgctgtgagagatttggagtttatcctgaatgtccaggaagccacatttactgtagatctgtatctcagatactctgtagtgtggaaaagtgttggagaaaggccacactaaggatacggaggtcattgcagtaatccccaggagaattacaagggttttaaagacagttgcagtgggacgggaggagaaaagatttgatagctctaaggaggtagaatacaccataccacagcattaatcagtaagaaatatgtagaagtaaactctgtctcttgaggtttccagccgatgactatcttttgaagaaatgtccagcatattctttttttttaactgcacaagttgctttgcagaccataattggaatcccagtttatcagggggaagttgtcacatgtactgagggtatcgaaatctgaatggttaaataatcatatgataagactcaaattttcttgtaatccaggaaatgcacattgaaactataattagatcattgtatgttcatcagattaggaattgcaaagtttgacactatcaagagatgataagcgtttgaagaaaatgagattctcgctgggcgcggtggctcgtgcctgtaatcgcagcactttgggaggccgaggcgggcggatcatgacgtcaggagatcaagaccatcctggccaacatggtgaaaccccgtatctactaaaaaatacagaaattagctaggtgtggtggcacgtgcctgtaatcccagctactcgggaggctgaggcaggagaattgcttgaaccagggagccggaggttgcagtgagccgagatggcgccactgcactccagcctggccagagagggacatgccatctcaaaaaaaaaaagaaaatgagattctccttcactatgggttgcaagtgtatctttgagcagtgtagccactagcagattggatatatcttaagatcagtggttccacttctagaaaatactaagaagccagagacatttgtatacaaggggcaggatattagggttgtttgtggcaacactgtttataatggtttaaaaaattggaaacagcctaaatgtccattactaggggaatgcttgtagagtgggtatgtatctttttataataaatcgattggaaagaaatgctaatttaggatagtgataactttgcagtgtggggaggatgggatgggacagaaggaacaatttcgtctgtaatgtggaaaaaagatgagtgggtttataaaataacagagaatggtctggatgataggtaagtggtgttttatgttattctttgtacatttctataggttaatgtccacccttcaatttcttgaagtaaaagttaaagtaaaaatttaacttgagttaacatgtagctataaaaagttaggctcagtcattttgggaaaaggctgcaaactgcactggtcccaggtttcaaaaatagtaagttgggtgaaagaaaactcaaatgccaaataagcattaaaaattaaaatgtggagaagttattaagcattgagcgacatttttggatttttaaatttttttgttttttgtagagactgggtctcactatcttgcccaggccagtctcaaactcctgggcccaagtgaccctctggcttcggcctcccagagtactgggattacaggcaggagacactgtgcccaccgttgacccaaatttcctttcctagaaacctaagttctaaccattaatagattaaaaacattttttgactgcttcttttgaaatacgtgttacttgcttatactttccataatactaaaagataggccaggcgcggtggctcacacctgtaatgccagcactttgggaggctgagccgggcggatcacctgaggtcaggagttcaagaccagcctcaacatggagaaaccccgtctctactaaaaatacaaaaaattagccgggcgtggtggtgcatgcctgtaatcccagctacttgggaggctgaggcaggagaattgcttgaacctgggaggtggaggttgtggtgagccaagatcgtgccgttgcactccagcctgggcaacaagagcgaaactccgtctcaaaaaaaaaaaaaaaaaactaaaggataatttccttaaaaaaaagataaagtcattactctgtaaaatgtaaaactgaacatgtgttaaggattttatttaactcattaatgaggtattggagactgcaaagtacagccaatttgtagattagaaatactgaattgaatttgcaaatgaaagacaaaactggcctctctacagagggggaaggaagtcaaatgaacctacatttggtaacatgcatttgcctgtctagactagaattatttgcattgctgttacccatagtatgcagaattataaaataactcctataaattagaattagataaccgtgaagagtatgctctaatctagaagctagtttgccaatgaatcatattttctctgtaggaaaaaacaacaataaacgaagctgagtaaaatagatttttctttttctttttttttttctttttggagacagagcttaccctgtcaccaggctggagtgcagtggcgcgatctcggctcactgcaacctcttcctcccgggttcaagcgattctccttcctcagcctcccgagtagctgggattacaggcacatgccaccacacccagctgatttttgtatttttagtagagacggggtttcaccatgttcgccaggatggtattgatctcttgaccttgtaatccgcccacctcaacctttccaagtgctgggattacaggcatgagccactgctcctggcctagatttttcatctgagttaagatctagttggatgatgatgatgataacgataattttttttttttttttttgagacagagtctccctctgctgcccagcttaggagtgctgtggtttgatctcggctcactgcaacctctgcctccaggactcaagcagttctcatgtctcagcctcccgagtagctgggattacaggtgcatgctaccatgcctggctaatttttgtatttttagtagagatggggtttcgcatgttggccaggctggtcttgaactcctggcttcaagtgatccacccaccttggcctctcaaagtgttcgaattacaggcgcaagccaccacaccaggcctggatttttttttttttgagacggagtctcgctttgttgcccaggctggagtgcagtggggcaatcctggctcactgcaagctccgcctcccgggtgcacgccattctcctgcctcagcctcccgagtaggtgggactatcggtgcccgccaccacgcctggctaattttttttgtatttttagtagagatggagtttcactgtgttagtcaggatggtctcgatctcctgacctcgtgatccacccgccttggcctcccaaagtgctg

SEQ ID NO: 2865 - DNA, 163 bp, Homo sapiens
gaggagcggcggcgcccgcagcaatcacagcagtgccgacgtcgtgggtgtttggtgtgaggctgcgagccgccgcgagttctcacggtcccgccggcgccaccaccgcggtcactcaccgccgccgccgccaccactgccaccacggtcgcctgccacaggt

SEQ ID NO: 2866 - DNA, 458 bp, Homo sapiens
ccaccacgcacaggtagcatgcccaggtaatttttgtatttttagtagagacggggtttcaccatgttggccaggctggtttcaaactcctgacctaaatgatctgcccgcctcggcctcctgaagtgctaagattacaggtgtgagcccccgtgcctggccttcaggatgattttattttaaacccctagaaagcagagagtaggatcaaaacctttaggtttggaaggctctttacagatttcattgtctaactagctgctttgcttggctttgatggtcttctgtgtctaacccagagccagtagctggcactgaggggtcactcctgatggtggttaaggtgtaggctttggtatcagacctggatgtgaacttgactctgctacttagatggccctgtgaacttgaccttattacttgcattgttggtgataatttatctggaatgggcactg

SEQ ID NO: 2867 - DNA, 163 bp, Homo sapiens; identical to SEQ ID NO: 2865

SEQ ID NO: 2868 - DNA, 458 bp, Homo sapiens; identical to SEQ ID NO: 2866

SEQ ID NO: 2869 - DNA, 335 bp, Homo sapiens
ccattttctgtggttgacttggggcaatttgaaggcattgtgtgtccagattttgcttggagtgttttagggggagctcctctttctgcatttaaacaaagagtagcatgggcctgttttctgagcgtaggcatctaagaatgggctcatgctctagctgagggcccatgtgagcacttgaatgtactgagatgacaggtgtggaatgggtcatgatgaaagcttgctatagggttttagggcgaagaatgcttgtgctgttttatctttatttgtggggggataggaggtgacagcctgagtgtatagtacccaaagtctcatttaaaagctca

SEQ ID NO: 2870 - DNA, 335 bp, Homo sapiens; identical to SEQ ID NO: 2869

SEQ ID NO: 2871 - DNA, 366 bp, Homo sapiens
attttgaggaactgcagaaggggttagggctttaacatatggattttgggggaatacacttcagcccataagagcagcattactggcagggcgcgttggctcacgcctataatcccagcactttgggaggccaaagcaggcagatcacttgaggtcaggagttcaagaccagactgaccaacatagtgacaccccatctctactaaaaatacaaaaaattagccaggcctggtggtgtgtgcctgtaatcccagctactcgggaggttgaggcgaacctgggaggtggaggttgcagtgagctgagatctagcctgggtgacagagcgagactctgtctccaaaaaaaaaaaaaagcaacattact

SEQ ID NO: 2872 - DNA, 366 bp, Homo sapiens; identical to SEQ ID NO: 2871

SEQ ID NO: 2873 - DNA, 1324 bp, Homo sapiens
  SITE (768): n equals a,t,g, or c
  SITE (888): n equals a,t,g, or c
  SITE (919): n equals a,t,g, or c
  SITE (1038): n equals a,t,g, or c
agttaccgacacacgggagcgtcatggttaccacatttcgggcaagtgaagcctttgctggtgcactcgaactcaccggtaaagccacactcgtagcactcatcaatcggtgtattggtgccgtaatacggtacatgctgatagctgtaatcccagacatcttccagcgccttcaggttgtgctgaatgtttggatactcgccgtagcaaatgaaaccaccgttcgccagcggcgggtaaggcgcttcaaagtcgatcttgtcgtacgggttcaccttcttctccacatcgaggtggaaactgttggtgtagtaacctttatcggtcacgcccggcaccacgccaaactcagcagtatcgagacggcagaagcgatcgcacaggttttcactcggcgtgctgtagagactgaaaccataacccgtttcttctttccactgatccactgcctgacgcagacgttcaacaatggcgatacctttcgcgcgaagctgctcgttgtcgtaaacatgctcgccgccgaacagcgcgttaatggtttcgtggatgccgatgtaacccagcgaaatagacgcacgaccgtttttgaagatttcagaaacatcatcgtcagcattgagacgcacgccacaagcaccttccatatagaggatcggggccacgcgcgctttcacgccttcgagacgagcgatacgggtcatcagcgccttacgtgccagcaccagacgttcattcagcagcttccagaaggtggggctcatcgctttngcttccagagcatacggcaggtcaggctgatcacgcgagggtgtacgacatcgtggatctgctcgcgtttcatttccacacgcgaggagctgcgcagcccatcggagttttaaacgaacnggtgactttcactacctgatcgtagtcaggnatatccggatacatgcgctgcttgcgcactccagcgccagctgtttgatgtcgtagtcgggatcgcctttttatgggtcagggccatcgcgaatcgcaacacccagtttcgggaacacngcagttttacggtttttaccgaggcctgcgatacggttacgcaggatcgattcctgaatcaggcgcgattcccagctggtgcccaggccaaaaccaaaggttacaaacggcgtctgaccgttggcggtgtgcagggtgtttacttcgtactccagtgactggaaggcatcgtagcactctttgatggttcgagagttagcgtagccttcggcgtccgggatgttccactcttctgcggtcttgcgatgtttgttgtagctggcagtgacaaacggtgccagcactt

SEQ ID NO: 2874 - DNA, 298 bp, Homo sapiens
agttaccgacacacgggaggcgtcatggttaccacatttcgggcaagtgaagcctttgctggtgcactcgaactcaccggtaaagccacactcgtagcactcatcaatcggtgtattggtgccgtaatacggtacatgctgatagctgtaatcccagacatcttccagcgccttcaggttgtgctgaatgtttggatactcgccgtagcaaatgaaaccaccgttcgccagcggcgggtaaggcgcttcaaagtcgatcttgtcgtacgggttcaccttcttctccacatcgaggtgg

SEQ ID NO: 2875 - DNA, 298 bp, Homo sapiens; identical to SEQ ID NO: 2874

SEQ ID NO: 2876 - DNA, 352 bp, Homo sapiens
gtacgttaatggagtcacggcgagcaaagatactcagacgcacactgttaccgatgacgaggaacacggccgccaccatcaacacgccgatcatcgccgaaacgcgcccgaccagcccggtcaacgccgccagacgggcaaaccagctgtcatccatccgcacttcgtcaatgccgttaatctgcgtgatacgatcacgcagcgtattcagtgattccgtcccctggaaatcgagtttcgggatcaccaccgccactgtcggaagcgggttttcttccagcatatccagcgcaccaccaaaaccagaccagttacggaactcacccagtgcgtcttcacgagaaagatagtt

SEQ ID NO: 2877 - DNA, 213 bp, Homo sapiens
gcactttcggaagatcggccccatgcgcgtgcctttgcctgcggcaaggatcactacgctcatagcattattcaacatacgcgtcctgactgtaatttgagaacgaatttaaaccgcttcaccttgaaaaaactacatttttttcatcgtgaaatggacagaggataaattgttcaataacggattatccccgctgacgaaagcgccattttc

SEQ ID NO: 2878 - DNA, 345 bp, Homo sapiens
tcacagattcataaatatcttattttctagctctaaccaactcatcttgctatgatagttgtgatataaactaaaaaaaaacctaattgataggacaattagtacaattaattgtacaattaaccttcattacttaaattcttcttaaaaatatttctggaagataactcaattttgcattttgtttttcattttggtaagcatagttcagctttggcaacttaatacctacaatttccaacacccacttgtcccccttcaccagttgattcgagttgatgcacaagaatgtccagatgtgtggatttgactttaaatccagaggctccttcttcttctttcata

SEQ ID NO: 2879 - DNA, 335 bp, Homo sapiens
tcacagattcataaatatcttattttctagctctaaccaactcatcttgctatgatagttgtgatataaactaaaaaaaaacctaattgataggacaattagtacaattaattgtacaattaaccttcattacttaaattcttcttaaaaatatttctggaagataactcaattttgcattttgtttttcattttggtaagcatagttcagctttggcaacttaatacctacaatttccaacacccacttgtcccccttcaccagtttgattcgagttgatgcacaagaatgtccagatgtgtggatttgactttaaatccagaggctccttctt

SEQ ID NO: 2880 - DNA, 345 bp, Homo sapiens; identical to SEQ ID NO: 2878

SEQ ID NO: 2881 - DNA, 315 bp, Homo sapiens
ccttggtctcccaaagtgctgggattacagatgtgagccatcgtgcccagtatagtgagttttcttaaacttagttttcataccactcttctaagtcttgaggccttaaacttcaatcatctttaatttgctgctgcttggttgttgttgcctactcttccatgcacagacatacttaatcagtgattattatgcctttactatttaaggaactgtgagagttaacaaagtttgtgacctccaagtgtgcacaatcaatcaggtactcatatcacttcagtacaaggcaatcagtgataagtcggttttgcctat

SEQ ID NO: 2882 - DNA, 515 bp, Homo sapiens
taaatgatgccctaaaagtcctggcttcaccactaggcaatctatgcatgtaacaaaattacacttgtaccccataaatttatacaaattaaaaaaaatcaggctgggtgcaggggctcatgcccataatatcaatactttgagaggctgaggcaggaggactgcttaaagccggaagttaaagactaggctgggcaatatagtgagaccccatcctatgaaaaaaaaataggaaataataaaataatttttacaaaaaacaaaatataaacacaaaaaaagtttttcttctagaaaaaataactaatttacatctcaataagataaaaacaatccaacttaaaaataggcaaaagagactggaccccgtagctcacacctataatcccagcactttgggaggctgaggcgggcggatcgtgaggtcaagagatcgagaccatcctggccaacatggtgagacaccgtctctactgaaaataaaaaattagccgggcatggtggcacatgcctgt

SEQ ID NO: 2883 - DNA, 237 bp, Homo sapiens
tcacgtggttctggtgacaatctttctctccccctccagacctataggtggtaaatgcaccccactgtgctaaccctagggcacctcaccatcccttgtgggtttccttaacccttccctcgcctctgtaagcggtccctttattagactgtcttcaagaaacccttttagttgttatcagtttcctactgggactctgacttacttactctctttttttttttctttttttttttt

SEQ ID NO: 2884 - DNA, 237 bp, Homo sapiens; identical to SEQ ID NO: 2883

SEQ ID NO: 2885 - DNA, 237 bp, Homo sapiens; identical to SEQ ID NO: 2883

SEQ ID NO: 2886 - DNA, 106 bp, Homo sapiens
atcccagcactttgagaggtggaggcaggtggatcacgaggtcaggagattgagaccatcctggctaacacagtgaaaccccgtctctactaaaaatacagaaaaa

SEQ ID NO: 2887 - DNA, 106 bp, Homo sapiens; identical to SEQ ID NO: 2886

SEQ ID NO: 2888 - DNA, 104 bp, Homo sapiens
tttttttttttttttttttgagatggagtgtcactctgttgcccaggctggagtgcagtggcgtgatctcggctcactgtaagctccgtctcccaggttcacgc

SEQ ID NO: 2889 - DNA, 119 bp, Homo sapiens
tttttttttttttttttttgagatggagtgtcactctgttgcccaggctggagtgcagtggcgtgatctcggctcactgtaagctccgtctcccaggttcacgccattctcctggctca

SEQ ID NO: 2890 - DNA, 104 bp, Homo sapiens; identical to SEQ ID NO: 2888

SEQ ID NO: 2891 - DNA, 239 bp, Homo sapiens
  SITE (176): n equals a,t,g, or c
cggtcagcagaaggtggcgttaaatctcgcttcaggtgaagggaatttctttatccgtcctggcggcgtgttttatgtcgcgggagataaagtcggcatcgttcgtctggatgccttcaaaaccagtaaagagattcagtttgcggtgcagtcagggccaatgttgatggaaaacnggtgtaattaatccgcgtattcatcccaacgtcgcctcaagcaaaattcgtaacggtgttggg

SEQ ID NO: 2892 - DNA, 375 bp, Homo sapiens
ggcgcttcggcagtttgcagctgcggcggggtcgggtccacccgcggtccccggaatgccggacggctgatcccgggtgctggtcactcgccgattcggggctgggaaggtttgccagaagcgggaaagatgggagatctgagcgctctcttggcatcgccacacccaggacttgctcgtgccgcaattccccacggaaacaaccgagttgaaacgagaagcttgctctctgggtgcagtagctagaaggcttcaggtaactccaaagccaacactgggtgaggcaacacacgccgcctcaggactcagcatttctttcaggctgcgttttcgtggcagacctacccagattgatggagaaagtttggctggcgg

SEQ ID NO: 2893 - DNA, 250 bp, Homo sapiens
gaagcttttcccttggaaattccaccttggtctatttcactcgcgtcctcatgcgggtgtcgcgccagagccccggcccagcctcccccgcccaccccagccccacagcgccggatcccgatcctccgcgcgtcggtccgccgggtccgggagcccagcctgcgcggatctccaagccccgagcagcggtgcgctgttgctgagcgccccgatcggctaagggcgctggggctgcgtgggtgtatttaaa

SEQ ID NO: 2894 - DNA, 376 bp, Homo sapiens
gcagaggttgcagccaagattgtgccattgcactccagcctgggcaacagagggagactccgtctcaaaaaataaaataaaataagccaaggtcctaacacagtgcctggctatcttaggtgttcaatcagttttagtttcctggccctggttgttctccccttgtggttgactttagccagattgtggtcttcatgaattttcattcattcgttcattcattcagccagccacttcctattgagctcctgggatgtgccaggcactggaggagatttattctgacccatcataggtcacttgaagtcacttctaggtctagactcgctgaaataaggtcattctaaacaaacagcaaataattctaaaaataatt

SEQ ID NO: 2895 - DNA, 376 bp, Homo sapiens; identical to SEQ ID NO: 2894

SEQ ID NO: 2896 - DNA, 138 bp, Homo sapiens
tttttttccttttgagacagagtctcgctctgttgccaggctggagtgcagtggcacgatcttggcccactgcaacctccgcctcctgggttcaagctattctcctgcctcagcctcctgagtagctggcattacagc

SEQ ID NO: 2897 - DNA, 7601 bp, Homo sapiens
ctggagttataaactgcatctgctggaaaaagttgaatactgagtctgtatcaggtaattttatttgccacattcctttacttttcacctaactaatggattttactcaatgtagttcatcaaaacagctatagggctaaattttcacatttatctgctggtgagttacattgatctacctgaagcactatacccagagctttggctgctctgaaaactgatgccataggagagccagttgcttttctttctcccatctctttggtgctcactgcttcctaagcctacaagaatgtgaataggttacagggagtttcagcaattcatttttaccatgcccattattacataagtcaaggtgtcttagcctaattgcaagtcaggtctgaatccccttgtcccagccatatcacttgaccaaagaacattttgaagactgtttctctcacatggttgccactaacttctgtgctgccatggtccagattttctaaaatctctgtgttcaaacaaataataccaggaattctaagactgagaaggtaagataggattcctttggaaattatccattaagtaatataaattaaaagaactttaaaattgtatagtgaatacattgactataactgaaacaacatttggagttgcttgaatatattttaataatttttagatacttttttttttttttaaagttaggttctcactatgtttccagggctggtctcaaactcctggacacaagtgatcctcctgcctcagcctcccaaagtgttaggattacaggcttgagccaccacacccggcctaatttttagatattttttaatttaagttcataatatgaaagaatatcgtgcaatattggtgatggtttttggttctagagaagctttgaaaactggaaccttgtttttcctgtgttttacaacatatacagtatagtgccatacacagtggggttattcagtaaacactgcctgctctaatatctaacatctagtatctatctacttgcattatgtatggtaagaatatctagtgcttagagtcgtttcttcttttttgccattacgtgtcagaatctcaactttgtactttgactataccgatcaatggaatgctcatttgcttaattttctgatgtatttacatttagaatttggccatcagtttcatgtaactttggaattctaattcctaatttgggaacatctaaatcaatggcattgctttggtgaggaaggtttgtagatagatttaagggagacaacgtgtttttaggcagatacctcataggcaagaaataaacctatgagacaatcaggtatctggatttttatgtatgtctgaggtgtttttcttaatctgttttgtgctgctgttacagaatacctaagactgggtaattttataaagaaagaaatttatttctcatagttctggaggccagaaattccaagatcaaagttttggtgtctggtgaggtccgggtttcccctccaagatggcaccttgaatgcttcatcctccagaggggaggagaactgttcctcacatggcagaagagcgtgagaatgagaaccacttctgcaaacccattttatagtggccttaattcattcatgagagtggagctctcataacctaaacacctcccattagaccccatcttctaacactgttgcattgggggttaaatttctaacacatgagattttgaggggacaaaaacattgaaacttgtttttgtcaaactgtagcagtattaaaatcatttgcagatttttggttgttgtcacaatcttcagtcagaaggtgtagtttgaatatgcgtacttgttctagatggggagtcagcaaagtttttctgtaaagggccatattttctgtttgtgcaccctatggtctgtgtgtctcaactattcaacgctgccattataacagaaagtaaccataggtagtacataagcaaatgggcatggctgtgttccaataaaactttattttaaaaaacaggctgtggatggatttggtccatgggctatagtttgcagacccctgttttagtcattgtttcagttttcaaaattaactctttttaaagaaatagcatcatcaggaatatataattcttatacttcgtaattttttagatcaacaaaatgggtattaatactgagagtcagatttttaaaatatcaataagtagatgaatggatgaacaatcacagtaggtagccttaagattgctttgcaaatataacgagaaggtaagagtagaaggagaaaacctaaaaatgattctcatcgtctttaaattgttcccaactagcccattctctccttttaatttaattgcccttagtttaaaagctttccattggaaggtggccagcaaagactaattttttaaacaaaatttagtctgagtcaaaatcatgttccactcagttaaagtaaaagaatataatattagctttcataaatgtcacattgaatgtaccatttggacttagcttatgagcaaagttaagatttcctggccctgagtattcgaatgttaaaggggatttatctttcatgatggaatagacactgaaagtgaagttctgtcaggctccagtcttctcattatattcatttaattacacagcttgagcctccttttggcaacttggctcaccctttaagtgaaaggtgggcctctttttctcagaccaaccatcagtctgatcatttcagtggtgctatgtgaagcatttattatcacctataatgtctgcataatgacaatgagatttataaatacctttaaaattcagcctaagtagaagagggcctggggataggaactgctacttttgaaaaagtagcagttggggattttttgaagaaacccagtaagctctgagcagcggtaatgctgattgcgtccaggttcctacctggactcactgaatgcacagagttctctgtgctccctatgttgctgtttccctgggtatagtaggtgtgttcaaggaaaattaatgcctctgtacattacagagccacagttgtcaaaattatattaggttgattttgatgaagggtttctctataaagaaatacagagagtagatcatcttgtgtaaaaacacagcctctcctgcaatttaaaagcaaaataagatgtacggaataattatgtattttttaaggtattaaaaatccaaatgactgaagctggtgtaggagttgtgagcctgcatgcattactgacaatgttgtctaaaaacagagagatttgatcatttttttctggcaagcattctgacaatatgtaatgaactgtaaaccagtttgtaattttttatccagtaataatctccaaagaaagacccccaaaaaacaagatactttttctggaaggtttaattattcattatcacaaatagcttacatttattatttcctataaatatggaattgtgctaagtgcagaatgtaagtgttcaattagataatgcacaacaactctatgtatgaggtagactctactgttatatccatttcataattgaggaaaccgaagcgtaagtgtagaaaggaaacaggcacagtgaggttaagcaggttaagcagcctgcccaagattacacagctagtaggaggtaaactgagattcacgtcaggtctttctgactccagtagccaaaatgccgatggctgagctatactgcccccatacagtgctagtgaaaaaaacgaaagtaaaaatttataaaactgtacctataatcccagctactcaagagactgaggtgggaggattgcttgaggccaggagttcaattccagcctgggcaacatagtgagaccctgtctctaataaacataaaatgcttggctgtgtagcttctttggatacatatgtgtatttgaaattatgctagacaggaaaacagaatacatagtcttttacacccaccagccgtaactgggaaatgtgagtatcttcctggggcaggcagcagagaataaaggataagtgggatggctctggagctagagactgcctgggttcaaactccagccttgtctctaactagctgttctactttgggcaagttgcttgacctctctgtgactcagtttcctctctaaaatgggactaataatgagcaggagtggttgtgaggactaaatgtgctaatacattgtaaactccttagaacagcatctatagtacccagacattcgtgacgattcttcttacttaactaatacaatttggaagtaaaatagtgatagaagttatttagaattgagtgtacattgggtttttttcattataaagttgctcgagtttatagttttaagtggtatgagagagagaaagtggagaaagtgtgagagagagagagagtgtgtgtgtgtgtgtgtgagagagagagagagagacagagagattagcctagtttcccaacagagatgagaggtgagaaattgggatgttgagcactcagatgggacaagtctcctcgcaaggacatttgaaaggttgtttaaagctattgctgccacgcccagctgaactcattgtacagaatttgtctcaaggccatgcagagccctttgactgcactggtgatgcagggcaggaaagaaggccctggagcctgtcggaacttgcccgctggacctcagtctagactccgttcctttcaccccgctcttgaataattacagtttataccttgttctcagtggagtactccaaaaggttatgtggatttccaacagtagaacaattactcagaagtagaataaataagcatattgtgttggtcttaccctaaaactgtctcacagatgtggtagagtgattgtgttataactttttctctttccctctggctctaaacaactacagctgctccaagtgcagcaagagagctcagcttaacctcacaacttaagaagctacaagagaccattgagcagaaaacaaagatagagatcggggacacgatccgagtcagaggcagtatccgcacatacagagaagagcgagagattcatgccaccacttactgtaagcacaagatatttctaccaaattggtggtttttctggatgtgcgtccagtaaacctcttgttcagctggaagtcaaactttcaaaaagttcagttaaggtataactctatttaatgagtgaattacattgtttaacatgctttctttagaaaatcagcatttcttacttttattttgaagacagctaattataagttgggaaagaaaatgaattatttactttatatatggttggcaagtttatttggatgacatagtagagtttccaaagcactttcaagttcagaatgtcaatccattagggcaaaatatgaatattcttcaaaataatggaaatttctttattttttctttattttttttctttttttgagacagagtcttacactgttgcccagggtggaatgcagtggcacagtcacagcccaatgcagcctcaaattcctgggctcaggagattctcccacctcagccttctgagtagctggaactacaggcatgcgccaccacacccagctaattttttgtagagatggggtttcgccatgttgtccaggctggtctcaaatttctgagctcaagagatccgcccacctcagcctcccagagtgctgggattacagccgtgtgccactgtgcctggccagaaatttcttgaataccattaagtccattaactttaaatgaaaacagctaatcagaaatatgacagttccccatcatcttccctttgcacgtgctggctggttttcagttggaaatctcaaggacagcccctgctgtccaccagaggagcagacgaatcaatacattgatgtgctttcctggttccttggccctggccaagcccatgacacttagggcatcgcattccctcatgcaggatgactgggagccatttagtgcatctagactgtgatccctgggcactcacaaggaaggaggcccacccagcacctcatttactgttgtcttagcagcagtttgggcctgggaaagaattgatctcaatgtaatttgtaatttctgtagcatcttttttctggtcacttgttagataaagtggacgacccagtgtggaacattcaaattgcaaggatgcttgagctgcccactatctacaggaaagtttatgaccagccttttcacagctcagccctagagaaagaagaggcactaaggtaagtggtgacttatcactgctgagcacgtgaccacggcagaaaactgaagcagctgagcccagatgctgggatcggcctaggttcaaatcccgaatcatccacctatgcactgtggggctctgggcaagccctctaaccctctctatgcttcaatttcctcaactgtaacatgaagagaataatagcacagatgtcctagggttgtcgtgaggaaattatgggtgtaattggagtcactgaaggaggagtggaggcaggagcagagaaaaacacttggaagaaataataatgcctgacatttttccaagtttgataaaaactttaaactcacagatccaggaagctcaatgaaccccaaggcaagaaacctgaagaaaaatgcaccaagtcacctcataatcaaaatatgataccatagcacgtcataatcaaaaacctgttttaaaaaaacctgcaccggtcattctcaaccagggatgattttacttttttataggggagaaaacccaggaggaatgagaatgtgtgcatatttgctaatatgtgcataaaagaactctgagaggagacacagagaaccggtaacagcagctccctcgggggtggggaccggaggataggacaggaaggggacagaaaggagactttactgtgtatcctttaatgttttttaacatgaatatattatatattcaaaaaagtatattaaaagcacaactatagactcatataaaaagtgaaaattctccattttcctgtctcctgcctcaggaccattccccagagattaccaatgttcataagccaatgtgtgtctttttaaattagtttcttctgtgcttacacaagcatgaatattcacccatagattttgtgggtttccattttttttatataaaaataggaccataccttacatgctgttctgcagtttgacttttttctcctaatctgtcatgaatatcttagttcctgtagttctgcctcatcattttaaacaaccacatgatgttccctgtatatattactctgtatatgaaaaacaaactccaatatagtgttgcattttctagctaattttctggtttttatacaccaaaaaggaacaaaggtgatggttttctgcagagctctttaaaactttccctccgcagcaatccaggcgccctggacctccccagtctcacgagtttgctgagtgaaaaagccaaagaattcctcatggagaacagagtgcagagcttttaccagcaggagctggaaatggtggagtctttgctgtcccttgccaatcagcctgtgattcacagtgcctcctccgaccaagtga

SEQ ID NO: 2898 - DNA, 7601 bp, Homo sapiens; identical to SEQ ID NO: 2897

SEQ ID NO: 2899 - DNA, 433 bp, Homo sapiens
ttaagtcgtcatgactgtctggtgaccaaagagcgcgatatgacccatggaatatgggagttggggaacggtcaggagaaaaaatcggtgaaggtaagcgggcatctttcctccaatagcggcgagattgtgctgcaatgggcgctggagggcaaagggattatgctgcgttccgagtgggatgtgttgccgtttctggagagtggcaaactggtgcaagtattgccagagtatgcacaaagcgccaatatctgggctgtttaccgggagccgctctatcgcagcatgaaattacgtgtctgcgtggaatttctggcggcatggtgccagcaacggctgggcaagcccgatgaaggctatcaggtcatgtagatccaccagaaatcactcgggatccttttcgcgctttcttttgaatttcgtccagattttt

SEQ ID NO: 2900 - DNA, 823 bp, Homo sapiens
ccgctcgcggcgtggcgctgactgaaagtgccaacgttgttacgaacatgcgttggaaatcctcacccaatatcagcgactggtcgatgacgtcacgcaaatcaaacgcgcccggaggggatgattcgtattggttgcagttttggttttgggcgcagccatattgcgccagctattaccgaactgatgcgcaattatcctgagttacaggtgcattttgaattgttcgatcggcaaattgatttagtgcaggataatattgatctggatattcgtattaatgacgaaattcctgattattatattgcgcatcttttgacaaaaaataaaagaatattatgcgcagcacctgagtatctgcaaaaatatccgcagccacatccctacaggaattaagtcgtcatgactgtctggtgaccaagagcgcgatatgacccatggaatatgggagttggggaacggtcaggagaaaaaatcggtgaaggtaagcgggcatctttcctccatagcggcgagattgtgctgcaatgggcgctggagggcaaagggattatgctgcgttccgagtgggatgtgttgccgtttctggagagtggcaaactggtgcaagtattgccagagtatgcacaaagcgccaatatctgggctgtttaccgggagccgctctatcgcagcatgaaattacgtgtctgcgtggaatttctggcggcatggtgccagcaacggctgggcaagcccgatgaaggctatcaggtcatgtagatccaccagaaatcactcgggatccttttcgcgctttcttttgaatttcgtccagattttt

SEQ ID NO: 2901 - DNA, 613 bp, Homo sapiens
aggcaggtggatcatgagttcaagagatcgagaccaccccggccaacatggtgaaaccccatctctactaaaaatataaaaattagctgggcatggtggcacaggcctgtaatcctagctactcaggaggctgagacaggagaatcgcttgaatctgggaggtgtagtttgcagtgagccgagattgtgtcactgcactccagcctggtgacagagcaagactccgtctccaaaaaaaagaaaaagaaaattattttctaatatatttcgtattttatttagtgtgtctgtttctcttccaccaggatttaagctccaccagggtaggggtttgtctgttttattcagtgttgtatctccagtgcctaggacaaaaccaaacatgcagcatatggtcaagacctattagttgagtggaggactgaatgaacttggcccctgcctgcctctctaccctcgtgtgtcatcagacttcttcatgtcctacatgcccacatcttttccatctttctgctctctctaaacacgccatgctttcctccactctctgtgcctttctacttactgctgcatctatttagatggttcatcttcacctgtttggctcttcagg

SEQ ID NO: 2902 - DNA, 389 bp, Homo sapiens
ctaacttcaggttgttggccagatctggatgtggtcagataaggtagatgtaactgtttcctgagtctaaaacctatcaggatgcactggttgggaaatggatagagcaccttagtgtattttctgagaaacacagatcagtggttttgcttacctgtgtgttgataatgagtgctttttctgcgtgcgtactttatttcttcgaaataggacttacgtgaaaacaaagtggcttaatcattcaattacagtttcctctatgaaatttttcaataaaaatgaaataaagcaggggagctctaagtctgtttcatactctgcagtatggatgatcaccaggaaacattttcttaatggcatcataatattctgaatgttatttatactaa

SEQ ID NO: 2903 - DNA, 4963 bp, Homo sapiens
tggaactctgaagaatgaggcccgagtcagcagcacaagtgcatcggaggccgtaaccttcaaccttcatcccagttccagagtgctgggatgcagaagggaccacaagtaactgtaccttatgtgaacattagtatgttaatacaactgggtagcctatattttaaaatagagtttagagccattctagtctcttagaatgatatttttgaagatagcccagttgactgacattgtcctgtgctggttctgttgtgttcttcctcctccaggaatgaaatggaaaggcattttctggagcttcttcagtttaatattaatgttcctgccagtgtttatgccaaatactactttgaccttcgctccttagcagatgacaacaacctgaattttctatttgctcctcttagcaaagaaagagcacagaacctagaggtaaggctatgaagtcactaagtgaggttttccatcagccaccaaagccaacatctgtgactaaatcatattaagtagtgattaggaaaatggaaagctttaaaattaactaacactgaagagcttattagccctttggcgtcagatttcctgtgtcttgtatggtttatacaaggatcaacattatttaaaaattatacatattaactcttctgtgaccataattcagaatattttaaatcaaatttaatctgttgttaatgaggtttccttttgaacttctaccctttcacataaccatacatgaataatttttttagctgggcactgtggctcatgtctgtaatcccagcactttgggaggctgaggtgggcagatcacttgaggtcaggagttcaagaccagcctggcgaacatggtgaaaccctgtccctactaaaaatacacacacaggccgggcgcggtggcttacgcctgtaagcccagcactttgggaggccgaggagggcagatcacctgaggttgggagttcaagaccagcctgaccaacatggagaaaccccgtctctactaaaaatacaaaattagccggccgtggtggcgcatgcctgtaatcccagctactcgggaggctgaggcaggagaatcgcttgaacccgggaggcggaggttgtggtgagctgaaatcgtgccattgcactccagcctgggcaacaagagcgaaactccatctcaaaaaaaaaaaaaaaaagtacacacacacaaaaatacaggcatgggggtgcatgcctgtaatcccagctacttgggaggctgaggcatgagcatcgcttgaacctgggaggcggaggttgcagtgagccaagattgcaccgctgcactctagcctaggtgacggagtgagattgtgtctccaaaaaaaaaaaattttttctttgcgactgtattcctaattttatctacatacataattcacttgccactcttgactgtcttacttactgtttgcaaattcatgtcatggtttatgtatcacagtgcagtcccatgagttttttagacaaaggattagtggataagccaagagacctatacccttcactgtataggatgcaggtgtttcaaatgctggatgtaagtggtaggcatggtggctcacacctgtaattccagcattttgggaggccgaggcaggtggatcacttgagatcaggacttcaagaccagccttaccaacacagagaaacccggtctctactaaaaattcaaaaattagccgggcgtggtggcagacgcccagttactcaggaggctgaggcatgagaattgcttgaacccgggaggcggaggctgcagtgagccgagatcatgccactgcactccagcctgggcgatagagcaagacccttgtctcaaaaaaaaaaaaataataatgtaggaagtacatgggtttttaatagaaatggtaactttatggggcaaagtaatatttatggcttatgactcttggtgagtatacagcagaattacaactgaaatggacacatattttaaactaacactttctgtggtaccttggtggtactttagaataatatgtatttctaggctgggctcagtggcacatgcctgagagtggctcatgcctcagaggctcattcctcccagcactttgggaggccgaggcaggcgggatcacctgaggtcagcagtttgagaccagcctggccaacatggtgaaaccctgtctctactaaaaatacaaaaaattagctgggtatggtggcacatgcctgtaatcctagctacttgggaggctgaggcaggagaatcgcttgaacctgggagatagaggttgcaatgagctgagatcactccagcctgggcaacgagcgaaactctgcctcaaaaaaaaaaaagaaaaaaataataatatgtatttctaccataattaacgtgcatgtgaagtaataccttttggcgcgtcagtcatcagaccgctcatatgttccagtatagtccagcacacacctgcctcattaaaatgtgctttgagtatataatagctaataaggattgggtagaatttgaatagctgaataaacatttttttgcacaagtgtacgtttgttatatttaaggaataagttaacagataacagatgctattgctgttaggagccctatcacaatacctttgatatctttgggaatccagttttttaataatataataaattcccctttgttctctgggaatctaaccatagcccttaaaggatattaccttggtgaactgtcaggaagtagtgtccccacaacctggcagtgtaaaactcagccaaagtagctgtaactgtgaactatctaaaggagtccacatgtgtggctttcacaatggtgctctttcaaaggcgggaaccctttttaaaattgtacctgttttctatttgattgactttcctaggctatttctagattgtgtgaagacaaagacttgtgtagagccgctatgagaaggtctttcagtgctgataacttcattggtattcagcgctctaaagccatcctctcttaaaaggagaaatgaggggttataacgtcatgggaccttcatctacaaagactggagaaataccacctttcctgctcaaaaaccagcaaaattagtgttttcatcaaaaggaaagatctcaaattcaagagactcatggacaacaaggattatactccacaggaaagaatgggaccttgtcaatgcaacaaaacactcttctgtcctttttaatgtaaacagagttacaaaaaccactccaaagtgaaggctcccatcctacacacagatatttgcttactgtgtgggccgatagctgtgaactatgtaaggttttttaaacaatagtttaaatttttagactttaaagacactaaccatataacttttatgtttcttccagtttctctccctccccccgcattttgctgcatatgcctttaaaatcaatgcagtattaccattaaaacatgggactctaactaaagccacttaggagcagacagcagcgttgttaggtactgaagggttcttcctccctactgttaccattgaagctgctagtcattggcaatcattttaaaccaaaaagctgctggataacatttgtcattcatattctttgcaagcattactttagcattttagcatgtttggggtcataaacagaggaagtatcagttattgatatctacttctattggagtccatgttgcatttcttgtgaactataaatggtgcttctcattttctgataatttttctcttgctaaataaatgtattaaaagatattttcataatgccaaccaacatggtggttcagtgacgatgagaaaaagtgaagcagttttaagcttgaatatagtttgggccctccaaggcactgcagcatgagtataaatgctataaacctttaaaaaacatgatttgaaagttttttgttttgttttgtttgtttttaaagagatgggggtcttactgcgttgtccaggctggagtgcagtggcttttcacaggtgcaatcattgtgcactcactgcagcctagaacttcctggtctcaagccatcctctagcctcagccacacaagtagctgggactacaagtgcaactggcacctgtctcctgaatattaagcttttaattttttgtttcggtcactcttgatagcagacattgactgaaacaaaaaattaaaagctttatattcaaaatttgcaaaatgaagctgggtgtggtggtgcacgcctatagtcccagctacttgggaggctgaggctggaggattgcttgaggtcaagtattggaggctgcagtgtaccatgatggtgcctataggaatagctactacactccaacctggacaacgttatcaagaccccatctcttagaaaaatgcaaaattaaatgcaaaagaaatgggctgggcatagtgattcatgcctgtaatctcagtaccctgggaggctgaggtggaaggattgcttgagtgcaggagttcaagaccagtctaggcaacatagtgagaccctgcctgtaaaaaaaaataataaaaatagttggatatggtggcatgtgtctgtagtcccagccactctggaggctaaggtgggaggatcagtagagcccaggaggtcaaggctgcagtgggccatgatcatgtcactgctctccaacctgggcgacatccagaccctgtctcaaagaaaaaagcagaagaaaaatgttcagacaaggttttgtaaaggtttgtagcatttatatttctacaagtatcaaagcttaaaattacactgaacttttggaataccttgtatctccataaaatgccctctttttaaaagtagttacccgcagagctgtgctctatatgctttgattaccgcagtttctttaaaggaagattttgaagagcagtgttaattaacatgtaataaaaggaattggaccctaattatagaaggtgatatga

SEQ ID NO: 2904 - DNA, 592 bp, Homo sapiens
tttcactatcgctgcaccaatccggtgttgatgacggatggtctcaccgacgttagtgtcccagacgccaaagtcgctggcataggcaccggtaaatatctcgcggataaacttagcgccggtagccatcgccaggtcgaatgaggcgaccggatcccacagaacattcacgccaaacgggatgcggatatcgctcattaattgcccgatgattcgtgccattgccgcagtggtttccggacgcaccttcgtgagatagggaagactaaactcgttggagaacatgactgcatccaccccaccattttggagcgccatcagatcgtcccaggctttgtcgataacccagttcatccccaactgcgcatcaaaactcgggtcgccgggcaatgcacgtagatggcacatggcgatgaccgctttttccgtcccaataacctctttcagccaactcattgaaagtactccttattccgataattcacgtttacgtaagaacagcacgacgctggcgacaataccgaccgccacgacaacgccaataatcccaagcgacatcaattcagaaatcgaccaaccgaacatatggccc

SEQ ID NO: 2905 - DNA, 569 bp, Homo sapiens
gtgttgatgacggatggtctcaccgacgttagtgtcccagacgccaaagtcgctggcataggcaccggtaaatatctcgcggataaactagcgccggtagccatcgccaggtcgaatgaggcgaccggatcccacagaacattcacgccaaacgggatgcggatatcgctcattaattgcccgatgattcgtgccattgccgcagtggtttccggacgcaccttcgtgagatagggaagactaaactcgttggagaacatgactgcatccaccccaccattttggagcgccatcagatcgtcccaggctttgtcgataacccagttatccccaactgcgcatcaaaactcgggtcgccgggcaatgcacgtagatggcacatggcgatgaccgctttttccgtcccaataacctctttcagccaactcattgaaagtactccttattccgataattcacgtttacgtaagaacagcacggacgctggcgacaataccgaccggcacgacaacggccaataaatcccaagcgacatcaattcagaaatcgaccaaccgaacatattggcc

SEQ ID NO: 2906 - DNA, 659 bp, Homo sapiens
gggaatatggaaaccgatggatgagttcttacctcttttttcgtccagacaaactgtcctaagatggttttaagagataccgagtaatcagctgccagctcagtagcgcatcttcagattgactctccctccttccctgtctccttccccatattcttcatcttgttccctgggatctttctccctaataaaggaaaagctcatagacctctgccccagcttctgctttctggggaatgcaggccaatccagccacactactctccctccatgtaacctgaccatgccatccccctgcttaaaagctttcagtgcttctccattgcccataaagctcatactttctagctatgagcttcaaggccacttggaggtcatctggccaactgtccttcctgctacaacagtctaagtcataggctttggaagataactgattgggtttcatctttggctcttattgaaaatgtggaaaaaattatttcacctctataagcttcagtttcttcatctatctgatctcaggattgagggaaggcaatgtatataaagcatctggcacagtggttggggcactaaatacatggcagccagtgtttattattacaaaccaggaaaccaggatgcaaagggagctgcttcagctccctttcagtcag

SEQ ID NO: 2907 - DNA, 562 bp, Homo sapiens
gggaaaggtcttagcctgttcaaaagatagcagagaagcaagcactgctgaagaggagtgggtgaggggaagggtagtgggaagtgaggccagagaggggtggatgatctgcagacacaggtggagactgtgactgtgaaatttgccctgaatatgatggaaagccactggagggatgaacaaagttgtagaggcacctgactagtttcagtggatcactctggctgaatgaggccagaaaggaggcctctgccatgatctcagtagggaggacagtggcttgaacctgaagcagagcctggaggcagtgagaagtggtcattctgagaacattttgaaggcacagcttacagaactcaccgatagattggatgagggttgtgaataggaggtgatcccaaagactgtggcccaagcaaatgaaaagcaggacttgcccttttctgaaaaggaggacactgaggaaggaggtagcagggacaaatctggagtttgcttttaaatgtgccaagcttgagatgctgactggtgtctaggaaacacaaagcatgcctggacaccc

SEQ ID NO: 2908 - DNA, 437 bp, Homo sapiens
ctgaagtctctcctgaccactccttctgcccgctcttcatccttcacaggtgtggtgtttcccacaatgcctctgcaggtctaatcttgtcttggcctctgcttctcaacaaatctggctgcccctagttgtccttccttcaattcatcctccacactgttagagtcctcctcctttctaaagtccagatctgatcttgtcacgctctgcttccattctttccaagatgtctgtttacttacaagataaattagaagcttatgtctcttgagactcagcctgtgctcaactgtccactctcttattccctacccaaggccccatcttgacagccacatggaactatctacactctagtctaaacgtcaatgccgcttcacatcaaggcctgtggacatataactcctcctttttggaacatctttctccattctcat

SEQ ID NO: 2909 - DNA, 529 bp, Homo sapiens
aagaaaaggaaaccaggacacagatgcacatagagggaagactgtgcggagacacaaggagaagacagccatctacaagccaaggagggaggcctcagaagaaaccaaccctgctgacctttgactttagacttccagcctccagatatatgaggaaattaacttctgttgtttaagccacctggtctgtgccatgtgttacagcagcctgagctgactcctgcatctgccaagcctgtgatgtcctcaagaaaagcggaggacaacttctggccccaaccaagaaaggagcaagggcagcaacctcacaagccagaggggaaacagccttcccagaccagggggtgctggcaaacaaggcaagctcctcttttccatctgctttccattctcccgtgactggccttagagcagactgtgctgctgcaggcatctctgtgctgtcagggagtgtgctcaggtctcccttcaagagaacctggtgcaagaagcctccagcctcctgctgctatattttggttgtgttggg

SEQ ID NO: 2910 - DNA, 101 bp, Homo sapiens
cctgtagtcccaactacttgggaggctgaggcaggagaatcgcttgaacccgggaggcagaggttgcagtgagctgagattgcaccactgtactccagcct

SEQ ID NO: 2911 - DNA, 385 bp, Homo sapiens
ttttttttggcagggaataaaatgttttgaggaaggcacacctttttaaaattcacacaaaaggaccatttaggctagaaaaggctgggtcatggccatgacaaaaaatataatctaatggggaaaggcaacatagaaactcaaaaaaaaaaaaattgcactgattgatgactgtgttgagtattgaaacagcaagtgtctgtgtggtcacggagggaggagaaagcattccttccagtgaagagctactgaaactcagcagcaatggtagttttaagacatgtccacaagttccttgatattcctccctttaaaatatgggcctcactctgctccctgggagggggagctatatttagtgacccattttgagtgaactgaatgt

SEQ ID NO: 2912 - DNA, 385 bp, Homo sapiens; identical to SEQ ID NO: 2911

SEQ ID NO: 2913 - DNA, 442 bp, Homo sapiens
tttagaaaacttatttttattctattatattgaacacattgtatcacccccactcatagctgcattccaaaacagttcttctgggaagcagggttttagttttactgaacatgaataaaaaatccaggcagaattcaaaaccaggggaaagagtcaaggaagcaaatttgcttttcagaagcaagatatttataaacagtaatagctgagaatcatataatttgtttctgaaaattaccttttaaatagggcttcattttacatttgcatagtatatggaattttgtaagaagcattaaatttcaaataacttgatgcaataaataatcatggaatactcattgtccaaatataacagatagagcatgtccactaagagtaatgttatttctcttaaaataaaggggaaaatctaagttccttgaggcagagactgtgttgt

SEQ ID NO: 2914 - DNA, 442 bp, Homo sapiens
tttaaaaaacttatttttattctattatattgaacacattgtatcacccccactcatagctgcattccaaaacagttcttctgggaagcagggttttagttttactgaacatgaataaaaaatccaggcagaattcaaaaccaggggaaagagtcaaggaagcaaatttgcttttcagaagcaagatatttataaacagtaatagctgagaatcatataatttgtttctgaaaattaccttttaaatagggcttcattttacatttgcatagtatatggaattttgtaagaagcattaaatttcaaataacttgatgcaataaataatcatggaatactcattgtccaaatataacagatagagcatgtccactaagagtaatgttatttctcttaaaataaaggggaaaatctaagttccttgaggcagagactgtgttgt

SEQ ID NO: 2915 - DNA, 1031 bp, Homo sapiens
actgcatgcacctgggccttgtcagtctggttgttttctgtcaagctcttgaggtggacatttccctccaagggcctgggattgtaccaggaggaagtgaggtttccctgagtctccaggggcctagaggtggaagctgcttccccattgctacaggggccccttttattgtcctcctgcccctgggtctctacctggtctttcacctccgttgcttctttgggctcttctgccctcacctccatcttcgggagcctggctgggatcacctgctcatctaatgaaggaagttgaaggttaaacttgcctctgagacaagagatcctcacggggctgaggtgtccaaacatcctggagttgcgagcagacagcacgggtttcttccttgaggggggggctccagaccacaggaggcaggaccctctgtggggtgcccgtgttccgagggataagacacagcctcacaggggcgccatcccacctgactggaaaagaaggcccaagatgtcgctgacggttgaagaggagtgggaaacggccccagattcccggggcaggcacaggtgcaggagccgcggggtgagcccggccagctgggaaggcctcacggacaagacgagcaggttgccggtggcgtggccaggacctgcggtggaaccaggaacaaaatatgcttagtgagttgcccattttgagcgagttgtgcacagacgaaactaagggtcagaagcggagaggatactccgaagtcacccacttctctgtggccgggtgcacactgggcatctgggagtttatgacatcactatggggctggtgacagagccagggtgtgaaggagtgcttaggagcccagcgagggtgcctacaagaggagtcaaagggcaaagggtgagacccttccaccagtccccctggactctagcctcagggacgtcctgctcctgggggcaggtgtgtggccctggatgggcccccctgtggggctgttgggggtgcggggctgatccgccagagccatggcgcctggc

SEQ ID NO: 2916 - DNA, 1046 bp, Homo sapiens
actgcatgcacctgggccttgtcagtctggttgttttctgtcaagctcttgaggtggacatttccctccaaggtcctgggattgtaccaggaggaagtgaggtttccctgagtctccaggggcctagaggtggaggccgcttccccattgctacaggggccccttttattgtcctcctgcccctgggtctctacctggtctttcacctccgttgcttctttgggctcttctgccctcatctccgtcttcgggagcctggctgggatcacctgctcatcaaatgaaggaagttgaaggttaaacttgcctctgagacgagggatcctcaggggcctgaggtgtccaaacatcgtggagttgcgagcagacagcgcaggtttcttcctcgagggggggctccagaccacaggaggcaggaccctctgtggggtgcccgtgttctgagggctaagacacagcctcataggggcaccatcccacctgtctggaaaagaaggcccaagatgtcgctgacggttgaagagtgggaaatggccccagattccccgggcaggcacaggtgcaggagccgcggggtgagcccggccagctgggaaggcctcacggacaagacgagcaggtggccgatggcatggccaggacctgcggcggaaccaggaacaaaatacgcttagtgagttgcccattttgagcgagttgtgcacagacgaaagtaagggtgagaagcggagaggatactcctaagtcacccacttctctgtggccgggtgcacactgggcatctgggagtttatgacatcacaatggggctggtgacagagctagggtgtggaggagtgcttaggagcccagcgagggtgcctacaagaggagtcaaagggcaaagggtgagacccttccaccggttcccctggactctagcctcagggacgtcctgctcctgggggcaggtgtgtggccctggatgggccccctgtggggctgttgggggtgcggggctgatctgccagagcgcttccgcctggcgcctggcccaggtgctggct

SEQ ID NO: 2917 - DNA, 1051 bp, Homo sapiens
actgcatgcacctgggccttgtcagtctgattcttttctgtcaagctcttgaggtggacatttccctccaagggcctgggattgtaccaggaagaagtgaggtttccctgagtctccaggggcctagaggtggaggctgcttccccattgctacaggggccccttttattgtcctcctgcccctgggtctctacctggtctttcacctctgttgcttctttgggctcttctgcgctcacctccgtcttcgggagcctggctgggatcacctgatcatctaatgaaggaagttgaaggttaaacttgcctctgagacaagggatccttacggggctgaggtgtccaaacattatggagttgtgaggagacagcacgggtttcttccttgagggggggctccagaccacaggacgcaggaccctctgtggggtgcccgtgttccgagggataagacacagcctcataggggcgccgtcccacctgactggaaaagaaggcccaagatgtcgctgacggttgaagaggagtgggaaacggcccacaattccccgggcaggcacaggtgcaggagctgcagggtgagcccggccagctgggaaggcctcacggacaagacgagcaggttgccgatggcatggccaggacctgcggcagaaccaggaacaaaatacgcttagcgagttgcccattttgagtgagttgtgcacagacgaaactaagggtcagaagcggagaggatactcctaagtcacccacttctctgtggctgggtgcacactgggcatctgggagtttatgacatcactatggggctggtgacagagccagtgtgtggaggagtgcttaggagcccagcgagggtgcctacaagaggagtcaaagggcaaagggtgagacccttccaccggtccagctggactctagcctcagggatatcctgctcctgggggcaagtgtgtggccctggatgggcccccctgtggggctgttgggggtgcgaggctgatccgccagagcccttccacctggcgcctggcccaggtgctggcta

SEQ ID NO: 2918 - DNA, 1051 bp, Homo sapiens; identical to SEQ ID NO: 2917

SEQ ID NO: 2919 - DNA, 1051 bp, Homo sapiens; identical to SEQ ID NO: 2917

SEQ ID NO: 2920 - DNA, 825 bp, Homo sapiens
ttttttttaattaaaaagtaaactttaatgtcgaaaatgcaaacttggggagggcagaaagatcacacacaaggctgtcacttcacacgtggaaggttgcacagcggctgggcagagacgctcctcacttcccagatggtgagggggccgggcagaggcgctcctcacttcccagacggtgcaggggctgggcagaggcactcctcccttacaaagggtgagggggctgggcagaggtgctcctcactttccagacagggcggtggctgggcagaagcgctcctcacttcccagatgggacggtggccgggcagaggcgcttctcatttcccagacggtgaggaggccgggcagaggcacgcctcacttcgcagacgggatggcggcgaggcagaggcgctccttacttcccagacagggcagctgggcagaggcgctcctgacttcccataccgtgaggcggccgggcagaggtgctcgtcacttcccagatggggtggaggccgggcagaggcggtgctccttctcaattcccagatggtgggcagctgggtagaggcactcctcacttcccagacagggcagtggccaggcagaagcactcctcacttcccagagtgtaagggggccgggcagaggcactccttgcttcgcagacaggacggcagccaggcagaggcgctcctcacttcccagatggtgcaggcagagatgctcctcaggtctcaatctcttgacctcctgatccgcccgcctgggcctcccaaagtgctggattacaggcgtgggccaccacgcctgccctgccgtctctcctttctcctc

SEQ ID NO: 2921 - DNA, 455 bp, Homo sapiens
ttttttttaattaaaaagtaaactttaatgtcgaaaatgcagacttggggagggcagaaagatcacacacaaggctgtcacttcacacttggaaggttgcacagcagcgggcagagacgctcctcacttcccagatggtgagggggccgggcagaggcgctcctcacttcccagacggtgcaggggctgggcagaggcgctcctcccttacaaacggtgagggggccgggcagaggtgctcctcacttgccagacagggtggcggctgggcagaagtgctcctcacttcccagatgggacggcggccaggcagaggtgcttctcatttcccagatggtgaggaggccgggcagaggcactcctcacttcgcagacaggacggcggcaaggcagaggcgctcctcatttcccagacggtgaggaggccgggcagaggcactcctcacttcgcagac

SEQ ID NO: 2922 - DNA, 442 bp, Homo sapiens
tttttttaaattaaaaagtaaactttaatgtcgaaaatgcaaacctggggagggcagaaagatcacacacaaggctgtcacttcacacttggaaggttgcacagcagccaggcagagaccctcctcacttcccagatggtgagggggccgggtgggggcactcctcacttcccagacggtgcaggggctgggcagaggcactcctcccttacaaatggtgagggggctgggcagaggtgctcctcactttccagacagggcggcggctgggcaggggcgctcctcacttcccagatgggacggtggccgggcagaggcgctcctcatttcccagacggtgaggaggccaggcagaggcactcctcacttcacagacaggacggcagcagggcagaggcgctcctcatttcccagacggtgaggaggccgggcagaggcactc

SEQ ID NO: 2923 - DNA, 722 bp, Homo sapiens
gaggtcttcacttcaacatacgagttgaccatggcatgctctgggctccagtcctctacaaagacgtagggcaggaactaccagttgtcagcacagcaccatcccacattgctcttctaatggagcctttcaccccagatgttctttctcgtctgatgggaaggatccaagtatgtaaagattatgttatagatcagctttggtctgtcctaaaagaaatttgccagtggattattccatatggataaaagtcagtttctctggtcttcctggaatgtgtctagaaagcaaatagattatttacaagttcatagtagatcaatgtattggattaaaatatgacaaacataatttggtcattgtgagcatgccagcttggtcaactattcaccacacatgatgccctaaatataactctaggttttcttatgcccaagagagggacatactcttgggtgtctggactagggaaacatgtatgaaaaaccatttggccactctacatcttgttattggagaattgaaaccatctatattcaaagatattattaaaaggcaagaagttaaaaaataaaaaaataaattgcatgtctgttgttatggaattttataactgtacataccttttatttaatccattcacaggtcatattataggatatctttcatttaataagtatactaaatccataccttatactgttgagttttgatagtaccag

SEQ ID NO: 2924 - DNA, 442 bp, Homo sapiens; identical to SEQ ID NO: 2922

SEQ ID NO: 2925 - DNA, 722 bp, Homo sapiens; identical to SEQ ID NO: 2923

SEQ ID NO: 2926 - DNA, 442 bp, Homo sapiens; identical to SEQ ID NO: 2922

SEQ ID NO: 2927 - DNA, 722 bp, Homo sapiens; identical to SEQ ID NO: 2923

SEQ ID NO: 2928 - DNA, 27483 bp, Homo sapiens
gacttcctcaggcggtggctggaggctgcgcatctggggctttaaacatacaaagggattgccaggacctgcggcggcggcggcggcggcgggggctggggcgcgggggccggaccatgagccgctgagccgggcaaaccccaggccaccgagccagcggaccctcggagcgcaccctgcgccgcggagcaggctccaaccaggcggcgaggcggccacacgcaccgagccagcgacccccgggcgacgcgcggggccagggagcgctacgatggaggcgctaatggcccggggcgcgctcacgggtcccctgagggcgctctgtctcctgggctgcctgctgagccacgccgccgccgtgccgtcgcccatcatcaagttccccggcgatgtcgcccccaaaacggacaaagagttggcagtggtgagttgctgcgctggcctcaaggaaccacgtttagacaaacttcggaggcaaaggatgggggtgtctctccccctgccctcggcggtgggcacacagcgtgggggaggggcttcggtaaacagcttggggggtctttggcaagctattggagtgatctcttgcaaacggtgggggatcttttgtaagcaaagaaaacctttgataaacaatttggcaaccttcagcatacagcagtggggcgaaaaacaagccagagagtgggagaggggtgacctggcaaactactggaaagggactcttatgtaaatagcggggacatcctctagtatctgggacatttggcggggggggggggcggtctttgtaaacaacttttggacacatctgggcagttgctaagggctcttgccaagcgtctaggtaagcctttggcaaacagctacaggggtcgtttttgctaatgtaggactttgggaacggtgctctggcacacaatttgggtaaacttatgcgcgcataaggatgggagggagcttggtcaaagcggggcttggcaaatttctaggaaccttcggcacagatccggagagggacctttaaacaaacagctcgagggggccatttgggaagtgattggggcaggagggaagcagagagcgcatcttttttctcctggcttaatggacaaattggtcaagggctgggcctcggaaagtttcctcgaacttctccaaagggtcggagaaaagaaggagagagctggcccggcaggagggaggaggagtggggcaggcgctggagggcccggcgcgtggggcgggggcggactgcgctccgctcgggtcggagagcggccagagagccctccttcctggctgggctcccaaaccgcggttcagatgttgtcttgtgagcgtgcgcgcgcctggctggaggggcactgagcctggccgcagtgttgcgtaagtagggcctgaggagagaggcaggccagggacccatcaagatgtcctttccagtccaggggatatctgctcccttgttgcttcagccaccctgccctccagcctccccctcaacctgtccgggagaagacgcccatgccctctggtcaccctaggaactccttcaggaggtgacaactaccctctcccaactctcacccttccaaacagctaggtctcagccccctctggatagatgggttgggaaacctccatacatttttagagggctacttttttcaaggatctggagctggctggcataatgatgtggctgttgggtgggggtgagagtggagctttgggacaatgacaaagctacttggtttcctacaccttttccagccaatgggtcacaggatgaacccctaaattggggttcagcctgggggccacatgggttcttggcttgcacaggaaggaattcaagagcgagccaacagagtaaagtgaaaacaaatttattaagaaggtaaaggaataaaagggtgattattccatagacagagcagggaatgggctgctggactgagtatacatatggttatttcttgattatatgctaaacaaggggtggattatttaagagttttccagaaaaagggtggggagttcctggaaccgagggtttctctcccttttagaccatatagggtaacttctcaatgttgctatggcatttataaactgtcacagcgctggtgggagtgtctaatgtatttaacatgctaatacattataattagcatataatgagcagtgaggacgactagaggtcactttcattgcagtcttggtttgggtgggctttctccagcttctttactgcatcctgttttatcataggggtctttgtgacccgaactgtatatggtgaaatcagtcctaccaacctcctgtctcattctgtgactaagaatgcatgcctgccctcctgggaatgaagcacagcaggtctcagcctcatcttacccagccccccactcaagatggaggtgcctggtttgaacacctctgacaaatggaagtctgtgttgtccagaggcaatgcagtgggggcttaagaagataactctggacttagaccgcttggcttcaaatcaaagagtgcatgaaccaaccagctggcctagtgatgatgttaggcaagtgacttctcagtttcttcatctgcaaactgggaaatttcctatctcagggttaaaagagaggtaatcttaggtgcttacctagcacatggtaagtactcaataagcactagccattattctattatattattattattgttatgtcctccatttcccctttcctaactacttccaacaaggctaggaccgttgtcagaagatctcctggctcctttcaacattctaacacagtacttatcacatacttcattttgttttatttgggatctatcagcctccctgctaggatttgaaccttagagacagaattgtctatctttttcacctgtttttcctcagcagtagcactgggcttggtacatggtaggtattaaaaagtatttgttgaataaataaatgagtcggttgctccctgaacctctgcagggacctgctcagtttgggcctcagtttgggcagggccagttgtatgactcatgaaggacaggactactttctttttgcaaatggctgattcaggatttaaacccaggtctgtctactgccagagcccatgcacatagtccttgaatctctttagaagaaaacaggaggaaaaaagtccccaagtcaccagccgcaaggtagataaatgagttgatagaggtaaaggaaggatgctggagtataatgattccatatcacagcctctggagccagattgctttgtcccaaatccagatctaccatttgtgaactgtgtgatcgtaagcaagtttcttaacctctctgtgcttcagtttcctcctctgtataatagggttagtatatctacattacagagttttgagcattaaatgagttaacatattctgactttagtgcctggacatatagtcagcacccagcaccaacaagtggtagccatgctctctatagctgtatgtcctgtcgctcaactaatgggtgaccgtgctggtttgggaacccagtactccacccagtgctctgggacccctggcttatttcctgtctggactatggcactgggttggggggctgattgctacagcctgctttggtcagtactgtgccatcctaatgtggctaattgccttgggggtgtgcatttctttcagcaatacctgaacaccttctatggctgccccaaggagagctgcaacctgtttgtgctgaaggacacactaaagaagatgcagaagttctttggactgccccagacaggtgatcttgaccagaataccatcgagaccatgcggaagccacgctgcggcaacccagatgtggccaactacaacttcttccctcgcaagcccaagtgggacaagaaccagatcacatacaggtgccggggcagggcttggggaggcagggccatggggctgagggacacgagtctccttgacccatgcattctctccactcaggggatccatgaggtgtcttttgtgaaggcttgacatcttagggagtttcaatacacagttcttagaaaatgaagtcagacagacttgagtttcatacttgctggccatgagacattgggttacttttcagtgctgtgaatgttggctttccaatctacaaaatggggcttaaaaaatgcccttatatggtatgttggggaactaagctaggctgaactaatacaaacggcttctatgatttttgacacagagcaagagtgtagtaatgctagtcattgttattgtttttagatgaggtcattgggatgggcagaaggaacgtgatgattggtagctaattgggtttagcagcccaattgggttataactggttgctaattgggccaagagctgtgctctgtatgggtggtgctgggttccaatggtgggatctttgccctgtgccccataatgcactacttatggccctcccccaccagccagaagtgacagatggaactcctgagctggggcctaaaaatgttggctggcctgggactccctgggtcttcaaggcattctgggagggttgtccttggcagtgagccctgcccagcctacacacacatacacgcaggcacatgctcacatatacatacacatacctgtgcacccttcccgtgcttgtgcatatacttgtatgttcacatacacacacacactcaaactttttcatacatctgtgcacacacacatacttgcatatacatacacttatgcacatgcatacacactcacatgcagttctaccacctccaggatcattggctacacacctgatctggacccagagacagtggatgatgcctttgctcgtgccttccaagtctggagcgatgtgaccccactgcggttttctcgaatccatgatggagaggcagacatcatgatcaactttggccgctggggtaggcagaagatggggcagaagaggggccagcagggatcagtgttgagacgagggggtgagatggacattagaggggcgtggggatcctaagggcggcttagataggacagtagatggtgtgggccctgggggtggtttagatgggggcagcacaacacggagtggacactggagagccacgttgacatgggggcagatggtgtgttgtggtataacctggaggccgtctaaacccgaagcaagtggtctactgtgctgtccaatatggcagccattaggcagaatatacatggctgtttaaatttaaattagttaaaaattttaaattagtttcctggtcacactgggcacattttaagtgctcaaaagacacaggaggctagtgactattgattttggacagcacagacaaagaatattcctcttaatcacagaaagctctgttggatgatgctggtagacactgaggaactgtagatatatgagagtggtttggaaacagtggagcagtgtagacactagaggaagggtcgtagaacctggggccaggtggccatgtgagtttatggtgtgaacactgccagtagcacagacataaaggtatgtggtatagacactgagtggtaagtgatgaaggtaaagagcaggggaaacaatgtagacaagtgggtgggtggtacaggccttggtgacaaggtgggcatgaggattcatgttgcagatattggtgatagtgtgacatgaaggcaggattgtggttaagagggcagtattgacaggatggaggatggcatagacactggggatgatgaagatggggtgaggacactagtgtggtaatgtgggtatgtggtacatatagtgtcatggtggtagagtagacaatggaggtagagggtatggatactgggagtcatgtaaacctgggagagcagtgtagaccataggatggtaacaaccaggtcagcagatctctactgagctcctgttgacagtcctggataaccccactgggacaagggaaggggacagatgctgggtgggctgacaggctccacatgtagatggggtgtggaggggtttcagggtctaggtggcacagctagacgctaagacccagtgtgtgtttcagagcatggcgatggatacccctttgacggtaaggacggactcctggctcatgccttcgccccaggcactggtgttgggggagactcccattttgatgacgatgagctatggaccttgggagaaggccaaggtgagaaaggggccctctgcatgccccagaccttctctcctgtcctctctccactccatttgcttggaccagagaggtgggaggggaggaaagtcacacatctgggtgagtcagaatcttggtctccaaagaaggcctggagaagtccaacctcccccttccatgtcactctttagtggtccgtgtgaagtatgggaacgccgatggggagtactgcaagttccccttcttgttcaatggcaaggagtacaacagctgcactgataccggccgcagcgatggcttcctctggtgctccaccacctacaactttgagaaggatggcaagtacggcttctgtccccatgaaggtgagcatccactctagtccccaagactttccaccccaagcctccagcttcccgggctccccagtgtgctcttccctccacactctccaggactggctgccactgccagttaatgagcatccctccaacgtccttcactcagttcccccccatcctgatctgagccattgctgtttctctcccaccagtaccatgatgaacgtagtactctaattaaatcaagttgattttttttaagtttcaccattagcaatcatttaggaagtcacagatttgatttgctaattatttatttctaatatatattggagtgaacttagaactattacaatgcccagtggttctctctagaaccagtctttacacttcagtcaagattgatacttcaagggcatgaggaaaggcttgctggtagctggaaacctagcagtgtgatagggaggcaggactcagaccagggctggactcaacctggtttgcgtactccaactgaggaatttcagctattgctcctgccttggtcctgatgctgcctctgctaatgcgtgtgtgtgtgtgtgtgtgtgtgcctgtgtgtgtgtgtgtgtgtgtgtgtgtgtgtgtgtgtgtgtgtctgggcacgggggctatactatctgcctctcttgggcactgtctttttctgcctcctgtctagcttgtgtctgcatctctgtgtcttgataaagactttaggcttgactcagtatttgtgtttgtgtgcttgtcagtgcctgagatgcaacatttcagagattttgaagccacatgggggaaatcttttaaaatggggtacagatattgacatacacactcaatcctttttaaaaatatccttgacacacttaatagtcataaatcacaaaaagacaatgtaacttcatactctatgaagtcatcatatttgataattctgcagattgaaagcccagaaaacctggcgaaaatggaaaaaagtctaaaaatttttaacactatcttctttcccatgtcacaaagactctatagtctacatagactaaagactgtctttttgtctgtaattttatgtctgtgaatctccctaaccccactgtaactgaaaactaagcaccaaccatcttgacagaatgaaagaaacaaagagctagttaattcccttcctgtttatgcttttactaccagagctaaactttatattaagtaagagtttaagccattcaccattaataagtcagacattttgaaataaaaatattttttgtatcttgcgtttcccggtagggattacatgtggcgttaacccttccctgtgtcacccctctgataggaacagaaagctttggtgatagttagatgtggaaacagctgtatttcataaatttgggaagggttattccctgcattggacattagccatttactttgtgcttagccagatgcaagtacgcacaacacgcacgtgtctgggtctcgaggcagagattgttgttactcagcccctgctgatggctgagtcagtgtctgattcttgccatccttgtcaggggaatttgggaggagacaggggcttcctgggtggtagaaatgagaggtcagaggcagggggctggcattggtcgaagttaacgctttgcctttctcaactctgaggccactaaggtatctggactcagtcttgccttttctctaggtgccattgtttctggcattgcaggacaaggtcttttggtagagaggggagtggtgaggatacagggcctcgagttctgtggtgggaggccagggactgggctccattccggccatggtggagttaacgggggctggtgaggtcacctctggcgccgttgtgcacagatggtccttgttatggacttgtggttttgctggttggcaattccagagacaccattttttagctttgggtggatgaggggaggatggggagaatccaagacagacaggccaggctctgaaccccactccctcccccaactctccatttatggcccctgtcttgaagatgtcaaagtaggagcccagagtgtttagtaaaagggacctgaaggcaccacctccctctccctccctcctcctcttcattctttctctccttcctacagagactgcaacaaggccatccaggaaggggcctggggttgacaggaggtaaagcaagctttctgtgtatgcgtgtgcacgcacacacacatatatgagagtgacagactaagcaagagagattgagattagtgtgttttgtagtttttagttacaaccttcattcacttctttcatttctgtgaccatgagcagtttgagaaccatctttgtcctagccttgatttctccacctatcaaatggagagagattctcgtggtcctgcctgccatgactgatatattcatgtcatacatcattattacatgaaatttgcatggtacaggtgtggaccaggcagaatggacagtgcccttggggctgaggcagggttctagaagcccttgctgtgtgccaggtgtcaatcattttgttgttgggtggtccacaaggtcccacgggagggattgggataaccagggaagcaggggttctctctgggagctcagagaagcagctccttaccaaccagtagagatgttttcttaatattttaacaatgcatcaacttcactggtgtgaaccggcaggtgggcagccagccagccctgtgcccatggaagcatgtctcattcacatccttccctctctcccccacccttagccctgttcaccatgggcggcaacgctgaaggacagccctgcaagtttccattccgcttccagggcacatcctatgacagctgcaccactgagggccgcacggatggctaccgctggtgcggcaccactgaggactacgaccgcgacaagaagtatggcttctgccctgagaccggtgggtgccactccctctccctccctcagggcccagcacctgctgtctgacaaaaaaaaaacccataagactccgagtgcccacctcctttccccaagacaggggtgctaagacatctgtgcgaatgacatccacaccaagatgtccgtgtagctagtcaggatacttgtcacctggtatggcctgggcactgaaatcagaacagacattgggcatcaacagttgaattggtgacacttaaatgtcaggcctgctcaggatcctctgaccgacctgcatcccttttctctcaggctctctggcagagacttctctctcctcctctctgaccctgcaatctctcttccctgcctttcctggtctgtatctccaccttttagtctgttttttattaagagctccgtgctttcctccctgtctccttcctgccctcctctctatccctccctcctttccttcttcccttcctccaacaggaatttactgagcgcctgctttgtgcagcatacacagaggttggtctctgcaaagccctgcccaagggggctcacagctgaggggcatgtgctggtgccatcagcttcatccaactccctttgcccctagcccatctgcccccttccatgggaggctcattagaactctggaatctggcttcctgggtttgaattgcagctctgatacttcctagcagtgttggcttagggaaatttcatcatctctctgatctatttcccatccatgaaacgcggtgctattcagtccctcctgcacaaggctgttgtcaggggtgggtgagatgagtctaaagatacagtgcctgggactgagtctaacttaggtgtggttcattaaggtcagcgtcatgtcattgcttcctggtggtagcctcagactctttgctgcgccttgacccgtatccctaaccccacagccatgtccactgttggtgggaactcagaaggtgccccctgtgtcttccccttcactttcctgggcaacaaatatgagagctgcaccagcgccggccgcagtgacggaaagatgtggtgtgcgaccacagccaactacgatgatgaccgcaagtggggcttctgccctgaccaaggtacgaggccctggtcattggacagagaccctggacattgcccttgcccctaaacttgctccaaaaaccttcctgagacctcacccacttcaagcatagacactgccccccagacacccacctacccagacccgcccacctgggctgagacaatgcccatctctggtggagccaaggtccctgcttagatcctgcccatccaggtggaggcacagcctccaaaatcagaccctggtagaccagatgctgctactcacctcctgggtaagaactggccttcctgaggggtcactgctcttgtcttccccttcagccaccctccaggcgggcttgtgactaccaaaattggctgaattctgagcacagattaccagagagacaattctcctaagagacattcccactgcacaaagaggtgccttcaaggagctggtaggcagtagaagaaaggaaaaaaggaagagcctcatgcttgatctgacaccatggtccacgcagccctgggggagcccccagagccctctctcccccatcagtcagcaccatctgttaccagggtgtaaatggtgggtcctcgtcagtcctgggtgctgaggatggagctgactgggacagctctctgccccctaggactcacaagctcaggggagagagtgaccaggagacagcttgtgaccttactatgtgctcagtgcagtgagcagggtgcttggggccctgtgcccaatctaggctacagagcccagggttgcagggttgcttaaagctccctgatggcccataatggccaggtcagtgggcaggtccagggcctgtcagaattaggcaagcctgtctttatgttgctttcattctttttaatcatcatgagatggaacttggcagatgtcagtggacagaggctggccaaaggaggttttcttatcccctgctaaattccttgctaggacacagtctgattttaccagcttaaaggtgggattctccaccttcctgagtggttcaagtatccagagctcagtggctcacccagggtgaatattatagtctcctggggctgccatgacaaagtgccacaaactgatggcttgaaacaaaccccatgtattctttcatgcttctggaggctggaagtctaaaatcacggcgtcagtaaggccatgttccctctgaaggatgcgtcactccagtctatgcctctgtcatgacatggatggccttcttccccctctgcttgcctctcctccttttttttttttttgagacggagtcttgctcttgcccagctggagtgcagtggcatgatctcggctcactgcaacctctgcctcctgggttcaagtgattctcctgcctatttccaaataagttcacattcacaggtccctagggttaagacttgggcaaatcttttctggggggacgcatttaaccacaacagggtgtgacacaggttttgctcgctggctgtggctcagcctgtgcaaccacgctaagtgtgaaaggtttttactgctttcacctgggcagaaatggtggcaacatggggccagcctatccccactcttcttacctcttcagagaggctgaggagctgggtttgtagagctcatcttttatagagagacataaaaagccaggaagcaggattttaaaatgaatggggttttaagtagaaaattcgcagatactacttgttctgttcctttatagcacacctgtcctgatactgacttggaaagagacaagaagactttggctgaccccacttggaaacaataggcactaatcccaaaattgtgtattgatcccagaattctcaggaaaagaaaaaaaaaatcaatacatgccgcttccagggttctcagccttactgtggggctgtcctcaaaagtctgcatcactgggtcaggtcttgacttctctctcatctctcttcctgtctttcaaccctctctcctccctgcaaccctcagggtacagcctgttcctcgtggcagcccacgagtttggccacgccatggggctggagcactcccaagaccctggggccctgatggcacccatttacacctacaccaagaacttccgtctgtcccaggatgacatcaagggcattcaggagctctatggtaaacctccgggcgggggttgggggtggagggtgaggaggggggaggtcatgtagcctgggatggaggcccagggggtgggaccagcaagatctcatccagccaggagtgctggagacgagggcaggaaatgggagtgttgacctggtcttgggaaggcagagcagctctccaaggggatacttggataactcttccctatccgaacaatgctaatatccatgtcactcttagcgctccatttctgggtttctcccattttctaggtgagtaaggtcacctggtgcaaggttacacaggtttgagcaacccagtggagtttagaatccaggagaatagccaagtacaggacagaattttccatcatgtggaatgaccttaacaatacgggggtggaagtttctagttttcataataagctttgatttttagtatgtagtagaaacagaacaaccagtgccttaagccaattatttatttatttatttatttatttatttatttatttatttatttattgttggttcttacagtgaggctagagtttaaaaagtcagttcatttttaaaaaatatttaatggtccaggtgatatctgagccaggccaaaatagtgaaagtggtgcttgagtgatgaagtttggggactgctagactcaggaaaaagcccaaggtctgccgtgaggggtgctgggttcaaatgtggcctctgcccttcactagctgcaagatattgtgtaagtctttatacctctttggactcagtttcctcatctctaaaataattgcttatcatgaaaagtgccatactgtcagttctggacacaccagcggccccctgaccgccctgactcttgtgggcataagaatctgagctttgggtttgaatccttgggcaagtcactcaacttttctgggcctcagtttcctcacctgtgaaatggtgcaatcatgataccccactcccagggctatagagaggactgatttgggtgatgtcagtaaaaagcatatataaagtacaaagggccccaggactccccaagtccaggcatcttcttgttaccttacggagcttacactaaggccagaaggcgatttcttctgactcttagatggttgggtgggcacccctgggggctcaccctagtggggagaacctctggagctgcagagagtctaaggtcaggtgttctccccaggggcctctcctgacattgaccttggcaccggccccacccccacgctgggccctgtcactcctgagatctgcaaacaggacattgtatttgatggcatcgctcagatccgtggtgagatcttcttcttcaaggaccggtgagtgcaggagcttgcttcttgtcctccttgtctcctgtcctctgctcttataccattattcttttccctcactcttcgctgaagactccgccaaatgcttcccagaatgacctgaattaggcagtttctgctgtgtatcaaacaacctccaggtttcagtggatttgcacccaagcattttgtttgctctctcatagtctgtgggtctactagttatcttgactttcagctacagtttgggttcaggtgtgctctgcctgttgttctcatgggattagcagctactcatggcagatgacagggtgcaagaggccaaactgaactacacaagctcatttaaagcctccactcacatcttgtctgagaatattccactgcctgaaataagtcacatggccaatcccaagacctaccctagagggtagtactgcaaagtcacatggaaatgcatatgaatgcataatcctaaaatcaaaatggagggaagaattgggaaccataattcagtctaccacaggccttctagaatggcgttgccctcaaatggccaaattactctgtgtatgggtggtgagtgactgcagagtagaaagaggtggtattcttcatgctatagataaagatcaccactcagttgactaaagactgaggtttaccctaatgccctagttccctggagaatggcaggcagtatctaggacctcattaaagggtctgtccttccattcttctatcatccatccatctacccatccatccatccatacctatatctttccatccatcatccatccagccagccagccatctattatccattatttatgatccagccatccattattcattattcatccatttattcattcatagagtatagtagttgagaaaatggactctgaagccagattctctgggttagaattctgtaactgctacttactggttatgtaatcatagacaagttaattaagtatcttctttgtaccttggtttcctcatttataaaatggggctaatattccaacctatctcctagggctgttgtaaggattagatgaacttagtgctgagaacaaaaacaatgcctgacacagagtaagtgtattcatattagctattgttattgacaaataattgtttggcatctactgtgccaaatactttgctaggctttagtagctggaggaggaagaatgatgttctcgggacagtggggtggggggctgctagatcagtgttctcaaagacaggcgcatgggcctcctataacagaaccatctagagtgtgggtattaaaaggtgggttttctgccccagcttcagaccctcctgactggaactctggggctaggccccaggaatctgcgttttagcaaattctcccagtgattctgatgcacattaaagtttgtgcatcacaagtccagtttgagaaataggcatggagaactgacatggcaagatgaaagaaaagtgatcgcagaggtgttaggtgcttttgtgagcacgtcccagtcaaggaaggcttcacagatgcagcagcatttgagcagagccttcaaaggagaagcaagaatctgatgggggtgacaagttaggaggttctttgagacagagggacctgcagagccaagccatagtgatgtgaaagtttctggattagccagtgagaatctggtgaggctagaagatgttccataaactttcaggaagagtttcctctactctaggcactgggccaaattctggggtgcagatgccttgcccttcacagggtctgctggccaatggggaaatggcaagaatgcaatgagagatgagacttagaatgtagtgagaaatcaggtcccgtcaggcctcgaatgcccaaatcaggatatataacagcagatgtcagcactgctctgcagttcccattgtaaggatctggcaatgtgcttcatctggagctcctcccactaagaaagccctgaccacacatgcagatctcagatgtgtggggcctaggaaaggatgcagagcccagacccaggctggagccatccctggcctaccacatcacagttttctttcaaaaggaacgtgatgagtgtttaatgggtttatttgattaaccagtaaatattaaacttcaaccatgagcaaaaattgctgctaggcactggtgagggtgggggtcatgaaggacagtattgcagggtgattaaactcagactttggagtcagatctggatatgaatcttggtaataactaatttatttagtcattgatgtagtgataactaagtaatttgaatcctaacctctctgagcttcatttgctaaataaaaattgtgacaccttcctacgctaggatgtttttctgcaaataacagagaccatccctctgcaaactcaatccagcctaaacagtagagagaaattgctttcatttggtacaaagtccaggggtagagctgcctgcaggggcagagagagggtcagtgacttgatgtctttgtccactgctagcctctgcacttacttcatcctaaggccggttctacctcatggtcacaagaaggttaccagtggcagttggggctctaatccctgccctctcccaggaagcgagagagaaagagacacgcacagatacacacacacagacccccagatgtgaaatacaagtctgtgtgttccgtctttacaccactgtaagtcatatggcaactgctgaatcagtaacagtgctagggaatgctaaactctgattggcttagaccagtagttctcaaaccttggcatgcgttagaatcatctggaaggcttgttaaaacacagattctgggccccaagcccagagattcttatctgtagatctctgtaaggacccaatcatttgcatttctaatgagttctcaggtgacgcagatgctgctggtcaggagactgcactttgagaaccagtggcttataccaatcagtatctacccctagaatgggggtaggggacacagggtcagaggaggtgaaggctggatcataaatgtggagttttgtgaagaaggatggtggggaaatagataattaatgctaggtagaccatccagagtgcatgctgtcttaaaagattgtggggattaaattacaaggcacataaataaagcacatggcatttagtaggaccctcaataaatgataactcttactcttgacaaagtacacaaattcatttcattttaattcaggaaatacttgagtgtcatcagctcctgccccaattggcctctaatcaaataggagagttaagacaaacagacactactgttccaggcactcagagttgatgattttgagaggcttagagagggaaaacacaatatggatggaggtagtcagggaaggcttcctggaggaggtagagggagagaacagggtaggaggatgtttctcagctccagcagattgcagacaggaactctgcccgttctccagtccttctccaaccttcctttgatcctgcctcccactcccatcatggaatcatctctgggatgtttctgggtgggtttgggggtgtgtgtggttcgagctgcagggtgactgaagatgtggtttcctgtgcccccttgcctcctgccaggttcatttggcggactgtgacgccacgtgacaagcccatggggcccctgctggtggccacattctggcctgagctcccggaaaagattgatgcggtatacgaggccccacaggaggagaaggctgtgttctttgcaggtgtgtgggaagcacccttccttggccctcagctccacagggctctgcaccagggctcctgggtgtcccaggctcactccccctctcaaaccacagttcctatgcacccgtgggtgctccctttcctttatggattcattctttcaacattatttcctgaagtgcgcagctcctctgggagattggttccgacacccaacatcagatagcattaaccctcagtgtacacatttcattttcttaattcttttcaatccgtctcatttcttttctagaagaaaaaaagtctcagtttagtgctggtgtgtccctaacgcctttgtagtgatacagtctttggcaggtaacagttttagttcgaatgttttaaagaatatttgttttcatttttacttttagacataaattggttttaacagaggcagttagttataatagtgtggagtttcaaatcaggacagaaacggattattcagtaactgatattttgacagtcaaaaaacattttttaataaatttatttttaaagatttcaaaatgaattcactgaaagcagaatgttaagtaaataatagtacagggagcccctagaagtggtagaaatcatcaaggtgaggtctgtatggctaaggtttactcatttaacatttattggagcatttccatgcgctgggctttgccataccctggggatacaagctctgccttcgcgatgctcacaaaccactcagggagacagacagctgggctcttatgaggggtaaagaaggatttaggaggtccctgtcctggtctgaggtgggatcctagagaagataaaggctcagccaagactattgtctccaccacctggctcccacctcccccaatccaccgtaatcatgggtcccggagaggacaactgctggctcctagggcacctttttgcaaattagcaaaaggtgcctctttatgacagcaaggcccttagagtgcacgacttggtgagcagagtgtgagctggatttatcccccaactcatgtccttgaccaggcaccttctgtaattgacttctaaagccctctgtgtgagccctgattctgggcactgcaaccaggagtgagcaggaagttgcactctgttgggaatggctgcagtggggcccgtggacagacagatgatgggaggaacaggctggcctagggcatgtcagcaccagccaacacaccctttgcttccaccccagggaatgaatactggatctactcagccagcaccctggagcgagggtaccccaagccactgaccagcctgggactgccccctgatgtccagcgagtggatgccgcctttaactggagcaaaaacaagaagacatacatctttgctggagacaaattctggaggtaagggagggcggtgggtaggacagcagcacagttggctgcgagagacagagaagccgccctgaggcttcaagcctcctgggctgagttcagaggttggtgggctctggatgccctctctctggtatctaacctctttggtctctggcacctctgagatgttgccaaaggtgaaccattcttgtacacattgctgatataattctggtggaatatcctttctctttgcagaattcttttgattggcccatgtctggtctggaccctcacattttgaaatgactcactgaagaagggggtaataaaaataaagataataactgctcctattgacactatgtgtcagagactgtcccaagggttctatgggataggaattattattcctcccattttacagatgaggaaacctgggttcagaaaggttaggtaaccgtggctgggcacagtggctcacgcctgtaatcccagcactttgggaggccaagatgggtggatcacttgagctcaggagttccagatcagcctggccacatggtgaaaccccatctctactaaaaatgcaaaaaaattagctggacatggtggtgcatgcctgcaatcccagctactagggagactgaggcaggggaatcacttaaacctggaagacagaagttgcagtgagctgagatcatgccactgcactccagcctgggcaacagagtgagactccaactcaaaaaaaaaaaaaagaaaaaagaaaggttaagtaaccagcttggagtcacatagccaggtagggacaggttgggatttgaaccctggcattctgtctcctgggaaaacatgttagtcttcactcttcactactattctatacccgagatggtggaatgggggttccaagagatgggggaacatgaaggcagtggacaaaatatgaagaagacttagagatgggtgcaccagtcatccatagaagccagcatccaaatcagaccccatggaaggagcaggtgccctgtgtcatgctcacagcaggcccgtggctgtgggtgcaggttggcaggggaacaatttggaagcagatggttctgtgctccaggttatctacaggaaagggtccagttctgaggggctatagtcatgaccagggaacctaatatccaggagtggctggtgagaggtagcccaaacctcaggagtttgactgtaattcttcacactttctagaaaaggaaacggaggtccaaagaaattaaataacttgttcaagctatagagatatgtgtatttgcacaaagccaggattatagctacttctcttgtattctaactgagtaccccctccactatacctgccagtccatttgattagtgaggaaagagtggtcggggcacaaagacttgtggtgtgtctttccatcccctccctcctggtatccccacattccttccatggctgccactgcatctgggccctacccaagaattttagagggcacttcctgaggcctttgtctgccatccccaaaacaatcccgcttacttcctaaggcctctgtcttctcccccttccctcctccccactactctgccccccagctgccctgcattcagaaactctttatatcccaggcctgcccatgtcagggtggaattccagacatattgctaagacacttagcaacctaagctgattgatatctcaagcctcaagaaagaaaacagtcaggcaggaaaccacagagcaggctttccacccaccagctccagacactagccccagacagtgtgcacgcacacgcacacacacacacgcgtactgcgaatggcatctcagcattgtaggagccctgaatctccaagtcttagaattgtggctggtgagccgcacagactcacagaaacgtgaatcttagaatcctaaagccctgaagttttcaaattatggtgttggaagaactttttaaatcacttttccatgcactgtatctatgtaaacatgcaaaaacagacctgttcctagcatataggaacatgattgtgtgcgcatgtgcgcatacacacacacacacacacacacacacacacacacacacacacacaggcatggaggttgtggcagtgccttgctggatttccaggcagagttatttgcctcccagtccttttccacacaagcccacctcccaaagccagagccaggacagacagcgtgctctacagaggaaccaccctgagacttcctgaaaagggacagagctgaagggcctatcagaagctctgggctggcttccaaaggagacagatctctattccaagagaagtggtgaatgagcttgtgacactggccctgccgtggagtctgcagaggccccagaggcatctttgctggagaaggagagagagccccagagtgacagaggctgagcagctgtcttcagcatgccaagaagagctcaggccctgcttgtagaagctttcactaagccacaaatatatgttccacatctgctgtgtgccaggcacttagctagctgctggagagacgggggtcaaaaaatcatcacaccctgccctcatgtagtttatagtagaatgagggaaaattatgtaaacacatttgaatcagataatgatggctctcagtatggggcctctaccatagcccagcctgaggctatgcaggtcacctatatttctcagttgaggtagatactgttagctccttttcccaagtgtggaaactgaggctaaagtggctcaaggaaaagctgggacacaaatatctgtgttcttaacacctgctatacatggcaacttctacagctgcagagaagtaccacatcttctgacaccacagtgcttgtattctttctggatgaaaagaacttggaagcaaactaattctcttatctgagactcagtttcctcatctgtaaaatgggcttgacttctgccatccccaccttctgtgggtagaatgagaaagaaatgagggccagttcaagtgtgggacacacatctccaaactatcctaacgctagggaatgtagtttgagggctcagtggaggtgccttggatgggagtgttgggattttgagctagggaacttggttttggtgacccagggcatgaggaagcatgccaggttttgtaagaatgagttttatgctgcacctgggattaaggaaggcgttagttcttcggggtgatggctgagggagaagtccctttgagggagaagtctcctctagaagggagcatatagggaaagctgctgttggggtccagggtggaggtggtcaaggctggctgcagaaaggaagggagccccctaggaggcactgtggagcaaaaggtggctgctaccaggatgggatgcgaacacagattcatctagaaacagctccacttgggcaagacttgtttactaggatatccatagctcccatagtgggagctcagtaaatatttatggaataatgaagtggagaggcaaaggaatcaacatgacagcagcatttaaaaagttctccaaaaatcttaaaagacagaaggattgctagccagggagaagaacatactaaccgatgcccaaagtatttacctgaattaaaggcggggcccaggattgctgccgccggaactgaggtggcatgtggcccaccctgtgactaacaggccttggacttacacgtaccttccaccttgcattgtaacctcactgccccagccatggtcatctcccagggcagggactgtcatctccctgtggcagatgaagaagcagcaatttttccaagccatgaagtgaaagaatgatggggcagattcccatccctgggcttctagtttagcactcctcggattacagcagggatttgtttgtaagggagctaacatttcttaagtacctactaaatatttatgagacatggggatagaggctctgcatgtgctgttttatttaatgcatgcattaaattaaatacactaaattagacacaaccccattttacagctggtaaaactgtagctgtatggaaagtggttaacacactgtttggcatgtagtaagtgctttataaatgttagcagtaatcatgagattgtttttatggggtcatccaaagtcatataattaaaagtggtagatctgaggctcagactcaggtctgattccatgcccttccttccactgcagctggctgcttccctgaagggctaggtccagtttccgaggcctatccaggagccatcagctgggtgctcccatccaggccaggggggaagtgtcctttagagaggccctgctggttcactgtgtctgtttctttacagatacaatgaggtgaagaagaaaatggatcctggcttccccaagctcatcgcagatgcctggaatgccatccccgataacctggatgccgtcgtggacctgcagggcggcggtgagccacccaggactgtctccgctttctaggactccccgcccctagccagggcccagctccttgcaaatacacacttctttattgtgcagggcaggcaggcaggcggcgcccaggaaaacaaatcaactccttcatcctagtgctgggaaggtttccagatccctgacctctgctccttggcctggctccaggcagtaagacccagaaagacttctcacagctgcagggcctggagccagggcaggggagggcggaaggcctgggccaggggagaaggaacatgggctctgtgccgtggattcattctggggtttgatccaggcccatttgcgttttgcaggaggcctgtgaccacctcccattagcagaaggatggctccatttgagacaaggcaaactttgtcatgctctgttgctcatgtggcaaagatcctccactcaaccagtttgcccctggccccctgctgattaaaacacaaccagtagcagcgagggatagaatttggagtttgaaaatcatactcttgaggaggcatctgtgagctttctagggtcctggaaatgggtccagtttggctttttttagaggagatttcaactaaattccacagatttttttttttttgagcacctactgtatgctaagcacaggccctgacctccagtagctgaaggtcttacatgtccaagaaaatgcagtgtacaatcagatgctagattaggagttatcttcaagaataaacatctattgagcacctactacatgctagcatattaatagtaaatgagattatgtatgtcaggagtcacaaactccaacagctccatgtgtcaggcaggtagcacaaatgagtaaagcaggcaggggcagacagtggggaactgtggagtctgtgcggaatcagagcacatgcctcatttacaggagacactttcttctcaccttcagataattattggcgggcaagattaggggcctaggcagctgccatggttcacacctgtcatcccagcactctgggaggccaaggcaggagaactgcttgagcgcaggagtttgagaccagcctgggcaacatagtgagactctatctctacaaaaaaattttaaaaaacattagctacacatgacggcgcatacctgtagtcccagctactggggagggtgagcagagaggatcgcttgagcccaggagtttaaggctgcagtgagccgtgttcatgccgctgcattccagactgggtgacagagtgagacctggtctcaaaaaaaaagaatggggcctggtgttgttagatattctatattagatattctagtttttttaaaggaagccagaaatctgtacttctgtgtgactttttggatgtttacatgttggcaagttattcagatttaaagacaaaacaaaacaaacttgtgagagtcaaataaaacccatctgtgggcctgacaggactggatatatcctgttttgccacctctggtacatggaatgtgcttagtttgatgcttgtgttaagtggagttattgtttttaataatagcatatgttatctgacttaatgctcactgcaagccctagaaggttgataatctttatcctcatcttagagatgagcaaacagggaataaaagagcttatttcacagccatttcccttcttccactcccagagggggctcttctgggcttttgttgtgttttggttttgtttttgttttcttttcttcaatcagctcagattgaaacaattgaatttttttttttttttttttgagacagagtctccctctgtcgcccaggctggagtgcagtggcgcgatcttggctcactgcaagctccgcctactgggttcacaccattctcctgcctcagcctcccgagtagctgggactacaggcgcctaccaccacgcccggctaattttttgtatttttagtagagacgaggtttcaccatgttagccaggatggtcttgatctcctgacttcgtgatctgcccgtctcggcctcccaaagtgctgggattacaggcgtgagccaccgcgccccgccacagttgagttttttttttggcggggggacaaggtcttgctctatcacccaggctagaggcacaatcatagctcactgcagcctcgaactcctgggcttaagcgaccctcccacgtcagcctcctaagtagcttggactacaggaatgtaccactatacccagctaatttaaatatgtttttcgtagaaatgggggtctctctatgctgcccaagctggtctcgaactcctgggctcaagcaatcctcctgcctcagcctttcaaagctctcttctcgtttaaaagcttcttccctatgccaggcagaaattcaaagttcccaggaaccttctgtgtgccagaatgtcaggataagggggtcacggtctcttctttctctatcccaggtcacagctacttcttcaagggtgcctattacctgaagctggagaaccaaagtctgaagagcgtgaagtttggaagcatcaaatccgactggctaggctgctgagctggccctggctcccacaggcccttcctctccactgccttcgatacaccgggcctggagaactagagaaggacccggaggggcctggcagccgtgccttcagctctacagctaatcagcattctcactcctacctggtaatttaagattccagagagtggctcctcccggtgcccaagaatagatgctgactgtactcctcccaggcgccccttccccctccaatcccaccaaccctcagagccacccctaaagagatactttgatattttcaacgcagccctgctttgggctgccctggtgctgccacacttcaggctcttctcctttcacaaccttctgtggctcacagaacccttggagccaatggagactgtctcaagagggcactggtggcccgacagcctggcacagggcagtgggacagggcatggccaggtggccactccagacccctggcttttcactgctggctgccttagaacctttcttacattagcagtttgctttgtatgcactttgtttttttctttgggtcttgttttttttttccacttagaaattgcatttcctgacagaaggactcaggttgtctgaagtcactgcacagtgcatctcagcccacatagtgatggttcccctgttcactctacttagcatgtccctaccgagtctcttctccactggatggaggaaaaccaagccgtggcttcccgctcagccctccctgcccctcccttcaaccattccccatgggaaatgtcaacaagtatgaataaagacacctactgagtggccgtgtttgccatctgttttagcagagcctagacaagggccacagacccagccagaagcggaaacttaaaaagtccgaatctctgctccctgcagggcacaggtgatggtgtctgctggaaaggtcagagcttccaaagtaaacagcaagagaacctcagggagagtaagctctagtccctctgtcctgtagaaagagccctgaagaatcagcaattttgttgctttattgtggcatctgttcgaggtttgcttcctctttaagtctgtttcttcattagcaatcatatcagttttaatgctactactaacaatgaacagtaacaataatatccccctcaattaatagagtgctttctatgtgcaaggcacttttcacgtgtcacctattttaacctttccaaccacataaataaaaaaggccattattagttgaatcttattgatgaagaga

SEQ ID NO: 2929 - DNA, 265 bp, Homo sapiens
gatccaccctcctcagcccccaaagtgctaggattacaggcgtgagccactgcacctggcctggcttaggttgttgacagttggaaagacatctttctgtgcaggtatctggctaaagagtctcaagggtctgccagtcccaacttgaagaccccctagactggggaatcttctatcatggctgtaatgcactgttattaatgttccctgttacactgagagaaaagtcagtggctccacaacataataatgcttaaaacatgcc

SEQ ID NO: 2930 - DNA, 507 bp, Homo sapiens
tctggaggccaagggattctttatttaaagtaaatgtgtggggattggggaaggaatgggtggaggtctcaatgccgttagccgtcaatgtcagaatggagctagactcattacacacggcgaagtcacttttaaagtgtctgtgtttgtgaacggagctcacagttccacgagtgccctctagactcaggccaagtccctggcccccggaggagtcagaccctcttgttccaatctggacttgcctgggtgaccctcttgctgtggatttgttccttaaagggtcactacatctggcaactgaggctggaattcgccgcgcacacttttgtccccgcgttcagaaacagctgcgacaggatgccagagtccatcgagaggctgggaacaagttcggcttctactcaactgcccctcgctgggactggtttccccccggactgaagcagggttgccccggcgacatgacctttcgcagctctgtcactccatgtgaagagggcgggg

SEQ ID NO: 2931 - DNA, 286 bp, Homo sapiens
cagacacctgaagccggaaaatggtgagtgtgcggggccggtgtcccgagacctgaggagggacaggttggaaccggccggaaccggctgtggcgggacccggggctcccctcggcgactctggggtctgggacccgggtccctctggcgcagctgggccctcagtgccctcggccgcagagtggggctgggctggcatccgggaccccgggcatcctgtcccgttcctgcgcgacgctgcgccccggcctcagcctcggcgccctctctgggcagctgcacgccg

SEQ ID NO: 2932 - DNA, 360 bp, Homo sapiens
gaaaatgttctataattgactgtggtgattatctgtttgcatctttgaatatactttactgaattgtacacttaaaagggatgcattgtgtagtgtgttttattctgatatagcttttcaaataaatatgacttcagatttttgattaatctgttaagcatactaagagtttccagatataccttaatttacatcactttttattgttcatttttgtatcagtgaaaatagggattcaattaccttaggtatatcatagtcgtttacatttcaaagttctctgcgaacacaatctgtaacctatttaaaataaattttcctgtagtgtgaaatgtacacttcagagtttaattgaacata

SEQ ID NO: 2933 - DNA, 3664 bp, Homo sapiens
ttttttctatgttattattggaaaactgaaaatgaaacacaggaagtataatcagtggggaaacaattatcttttctattcttctgaatcccacccccattcccaggtaaaacatgtaaatatggatctgaggtcttcctgtctctacacagccttgaagttaatttgcccttaatatttatgcaggtatgggattccattttcaattttttaaaggtagctaggaggctgagagaaaaaagaaaccaataaatctgttgaaatggcaaatctaaaataaacatgcgttaatagttaagaccacatccatctaaggattactaagaattattggctggccatggcactctgtgaggccaaggcaagtggatcacctgagttcaggagttcaagaccagcctgtccaacatggtgaaaccccgtctttactaaaagtacaaaaaaattagccatgtatggtggtgcacacctgtaatcccagctactcgggaggctgaggcatgagaatcgcttgaactcaggagacagagcttgcagtgtaccgagatcatgccactgcactccagcctgggcaatagagtgagactctgtctcaaaaaaaaaaaaaaagaattattaatatatttggttatttatgaatcagatgcacagaaaggttaagagatcagataatgcacacaaaatatttgattaaccattttgccgatttgcaaataaatcttacacccataacaaaaggtattcactgatacgtacaaatagttaagtttgaatttgctgtccatgaaagaaagaaaataaatcagagaagtgactttaaacacatttagcatgggaacccagttcaattctccttctcaacatgttgccattaagtcttaagatcaattagagtgaatttttgcagatgatctgacaggtattttgaaggaagtgaggctcaaaggatttagagctaaatattcactttttcttatccatactgcccaacaacgagatagcaaacaattacataaacctgttaaaatgtttttgaaggttgacacatcctatggagatcaacattactcatatagtgatattgatacagtctgtaatctatcaggtgtgtcgaagcaccttgctttaccttggtaagaggaaaacaagatgatcagtttgcaaaacccatcgactttgatatttgatcttgtctagatggttgatgtcccttccttttaagacagtagccaactgctttgcatcaataatttgatactagggcatttttaagatgccacacactcctgctatcccttactttcccaaacatctatatttctactttctttatgacttagtaactcagtaggcttagttatgcttagttgaatgaaaatttctcaagaccaagaactaggtgggctcaccagcttactactgtctgcgaactaattagaaaaatgttaactaaattttaagtctctaaaatagttgtgcaatgtggattcgttgtaatagcatttgaacacaattgtgttgtctaaacttgaatactagtttttcaaaacctgacataattaaagtttataataaatagatggattcaagatagtatggtcaacactttttaagaaaaggagaaagaaaatggagctgcaaagagcaatgaatgaatcagaggcctatgataccgacaaaaatggtggtaatattgccacctatacatttgtataaacttcattttatatcaattacaccaatagactaaccctgtggggttaaagtcagcaaagagtattatacccattttaaaagaggaggcattagatgactggagtgaattctttttaacaaccgagctaggcctagaatcagagtctctaacttcttagtctacgtatatagcaatgaaaacatgtcaaagcagaaacaaaacttccagagaattcagattgacttttggaagcaaatttacatttatttatttccaatgaatttgtaataataccatttagagttactatttgtttccttttactccgtgcactatcctagtgaatccatttaaaatgtacaacagtcctatgaagtagaaattattatttccatgtttcagataatttgccaaaagttacattggtaatcactagcagaatctttatcaataccttatcaacaaacatataaactaaaaaaaaatttctgaagaacctagtgccaagaacttgattattaattacaatgtacagtaaaaaagagcaagggctacttgaagaaatggttgaatcttgggctggggcaggatagatgatgaaactagagcctcttgtagtgccaaaaactaaagaaatatctgcaaaaaagtaaaaagaaatcccacaatgatagaggtatgtcaaaatgacatgggcattaaacaaaagagcttcaatggccaaaactgaaataatttagcaataaaataatataatattgggttataacttaaggataaaacaaatgtccatgagttcatactgccatcaataaatgattgtcaggtgcagtggtgcatgcctatagtcccacctgctcaggaggctgagacagaaggattacttgagctcaggagtttgagacccatctaggcaacatagcaaggtctcatatctaacataataataatagattgaataaataaattggaaaaatagacaaatctcctgggcagaaagatttcaaatatttaatgtagttactctgccctcaaggagatggagctctctttaagtatggcctgtgcatagtgacttcctacaaaagagtatagtatggaaagtggggaaaagtaactttacagtggagaaatctgacaaatgttatctcagtcaagtggtcaatgtcaacatcatcagtaataagttgtattgatggcatggtatctttgacatgatgtgacaaaaagggctcatgatctttcttctgaagacccatagtcccaattcaatcatgagcaattcatcagtcaaagctcagtcgagggacatcctaaaaaacacctgtccagtactgctcaaaacactcaaggcccttaaaattttggccctgaaactgtacctacgaagaggagtcttaggaaacttgatatcaatatgaaatgtgatttctgggatgggttcctggaacagagaaatggcattaggtaaaaactgaggaaatctttataaagtatagaatttagttaataataacatatcatcaatactggttcaataattgtgacaaatgtaccatactaatgtcagaagctaattatagggtgaggcaactttccatatctttgcaacttttctgtaaatataaagcaattcaaaaataaagttttatttttgtaaaaactgtataactttggaacaaagtttaaaacaatttttttttagtttggaaaagtaaatctgaaagaagtaaattcatttaatcaatacatcagctcattaatttatttgttcgttcattgataccttttattattcaacaaatactcttctgtctaatttgttgcagcatagcactatatcgtaagggctccacagctctataatgggtgttttctctatctgatgacttgtatacccttgagaagatgttgtttactactctggggagttcaaaattccagcacagtgcagcagaccatttgatg

SEQ ID NO: 2934 - DNA, 282 bp, Homo sapiens
cagtggctcacgcctgtattcctagcactttgggaggccgaggtgggcggatcacgaggtcaggagatcaagaccatcctggctaacacgatgaaaccctgactctactaaaaatacaaaaaaattagccgggcgtggtggcgagtgcctgtagtcccagctactcgggagactgaggcaggagaatggcgtgaacccgggaggcggagcttgcagtgagccgagatcactccagtgcactccagcatgggcgacagagcaagactctgtttaaaaaaaaaa

SEQ ID NO: 2935 - DNA, 333 bp, Homo sapiens
ggccatttgtatatcttcttttgagaattgcctattcatatccttagccactttctgatggaattgtttttttcttactgatttgtttgagttcattgtagattctggatattagcactttgtcagatgtacagattatgaaggttttctcccactctgtttgttatctgtttgctctgctgactcttctttttgccatgcaaaagctctttagtttaactaggttccagctatttatctttgtttttattgcatttcctttcaggttgttggtcatgaaatccttgcctaagcgaacgtccagccctatacaaaaaatcagctcaagatgga

SEQ ID NO: 2936 - DNA, 356 bp, Homo sapiens
ggaatcagagctgaaaggaagtgagtgattgtttaaatcagcatcatgtaaaggcattgggcatttcttgccagggaaccagttaaagcgtgagtcctaaagggagattcttcactgtccagccttagctggacttaacttactgtgttgtcattttgggaaaaagtcactaacctcagttgttgttggggacatacgtatagaagaccatgtgagactaattagaagtaaaaagactttaagccccctgtagaaaaaggttcttcttacctcctgcctatggtatccagacttctagtccattcaacattggttatttaggaaccatcctgaatctccttgtcacacagatgaaa

SEQ ID NO: 2937 - DNA, 3162 bp, Homo sapiens
attgaatttgccaggaagaatgtgtatagtgccaatcagaaaattcaggatgctcaggataagctctacctctcatgggtagagtggaaaaggagcattggatatgatgatactgatgagtcccactgtgctgaggtaagatgactgggacggtcatttgttggttgctgaagaagttcttatcagacttttcatttcaatttttccatactatgtcttagaatactcttctctatcaaaaggttgaacaataccatgtacataggtggctagttatgtggcagaaaagcaaaactaggcagcgaataattttatctaacaacctatgagtatacatatgccccaagtgagatacaactaaatgagaaacacaggccttgccctcataatgggtacagactaacaggggatacagccagccatgctgtcctattttgtgcctttttaatgctccttgcagaagagggctatctcataggcagtacactcagagtagccaagtccggttgttgtttaacggcataaatacaggtactattggctgggcgcgatggctcacgcctgtaatcccaacactttgggaggccgaggcgggtagatcacgaggtcaggagatcgagaccatcctggccaacatggtgaaaccctgtctctactaaaaatacaaaaaatgagccaggcatggtggcacgtgcctgtagtcccagctactcgggcagctgaggcaggagaatagcttgaacctgggaggcagaggttgccatgagccgagatcatgctactgcactccagcctgggcaacagagtaagactctgtctcaaaaaaaaaaaaaagaaaacatatgggaagactatctcaggcagccttggagtgggggtagttgagtcacattgctttctggaagagatgaatggtaagctgagaactaatgggtgaataaactaggtgaaagggcaataaggtgaccaaggttccagagggaaggcatagcatcttggctgggtgcaatggctcacacctgtaatctcagcattttgggaggccaaggcaggcagatcacttgagcccaggaattcaggaccagcctgggcaactgtgaaaccccatctctacaaaaaatacaaaaattagcagggtgtggtggtgtgcacctgtagtcctagttgctcgagaggctgaggtgggaggatcacctaagcccgagaggtcgggtccgcagtgagccatgattgtgccagtgccctccagcctgggcaacagactgagaccctgtctcagaaagaaagaaagaaaagaaaagaaagaaagaagaaagaaagaaaaaggaagggaagcagggaggaaggaagggaaaagaaatatcctcttatagtcctagaaagtggttctttgtgtcccaaaagctctgaagtcaatatgaactgtttgttcatgtcttgtcattttatttgaggagggaatatatacattacactactaacatgaaggatatttccattcttttgggtctcccctacctaatatgtttcttcagtttaagatgatgaactttggagactcaggcactagttcgaatccctacccagctgttttccagttgttaactgaagccatctacttaaactctaagcttatattcatatctatgaaatgtgaataatactgctgcactcggcattgtaatgaggatttttaaaagccaaagaatccacatatgtggtggacacataaccagcctactgtcatcgaactaatttatacatagcactgttggatccactgctaattttaagttttatttttagcacattgagtcacgtactcttgcaattgcccgcaacctgactcagcagctccagaccacgtgccacaccctcctgtccaacatccaaggtgtaccacagaacatccaagatcaagccaagcacatgggggtgatggcaggcgacatctactcagtgttccgcaatgctgcctcctttaaagaagtgtctgacagcctcctcacttctagcaaggggcagctgcagaaaatgaaggaatctttagatgacgtgatggattatcttgttaacaacacgcccctcaactggctggtaggtcccttttatcctcagctgactgagtctcagaatgctcaggaccaaggtgcagagatggacaagagcagccaggagacccagcgatctgagcataaaactcattaaacctgcccctatcactagtgcatgctgtggccagacagatgacaccttttgttatgttgaaattaacttgctaggcaaccctaaattgggaagcaagtagctagtataaaggccctcaattgtagttgtttccagctgaattaagagctttaaagtttctggcattagcagatgatttctgttcacctggtaagaaaagaatgataggcttgtcagagcctatagccagaactcagaaaaaattcaaatgcacttatgttctcattctatggccattgtgttgcctctgttactgtttgtattgaataaaaacatcttcatgtgggctggggtagaaactggtgtctgctctggtgtgatctgaaaaggcgtcttcactgctttatctcatgatgcttgcttgtaaaacttgattttagtttttcatttctcaaataggaatactacctttgaattcaataaaattcactgcaggatagaccagttacatgctgtttgttccatatgctttgtgtgttgctttcgtagagctgcttaacctgcatgacagagttattatacatacatgaatttcaattggcctgttggggagtttggcagagtgagaacattagaaggctaatgttaaaaatgggatgcttggccgggtgctgtggctcatgcctgtaaccccagcactttgggaggctgaggtgggcggatcacgaggtcaggagatcgagaccatcctggcgaacacggtgaaaccccatctctactaaaaatacaaaaaattagccgggcacggtggcgggtgcctgtagtcccagctactcgggaggctgaggcaggagaatggcgtgaacccgggaggcagagcttgcagtgagccgagatagcgccactgcgctctggcctgggcgaaagagcaagactccatctcaaaaaaaaaaaaaaagaaaagaaaataggatg

SEQ ID NO: 2938 - DNA, 129 bp, Homo sapiens
aacaagagggaaacgctgtcaaaaaaaaaaaagacaatatggaagagtctacctcttaggtagttgtgaagattaaatgagacaacctgctaagcatttaatatagcatctggcatattgcatctcctc

SEQ ID NO: 2939 - DNA, 211 bp, Homo sapiens
cattttacttaactttgcgttgaatctagagctgttatcctcctcttccttcctacacattctctcctcccttgaccatcacagcagttgatagaagcaattgcattaaattgagagctgaggggagctgaggcgagacatcctggctctgacacagaagaagctgtgcaaccttgggctagctccttaacctctttgaacctcagcatcc

SEQ ID NO: 2940 - DNA, 144 bp, Homo sapiens
tgagacggagtttcactgttgttgcccaggctggagtgcaatggcacgatctcggctcaccacaacctccacctcctgggttcaagtgattctcctgcctcagcctcccaagtagctgtgattacaggcgtgcaccaccatgcc

SEQ ID NO: 2941 - DNA, 3734 bp, Homo sapiens
gcggccgccaccaccacctcagctgccctcgcgggcagcacggcgcggcaaaagcgcacgtcgcctagcgatggcgcggggcggggacacgggctgtaccggcccgtcggagacttccgcttccggggccgccgccatcgctctcccgggcttagaaggcccggctactgacgcgcagtgccagaccttacccctcacggtccttaagtctcggtcgccctcgcctcgcagcctgccacccgcgctcagctgcccgcctcctcagccagccatgctggagcatctgagctcgctgcccacgcagatggtgagggcgcaacccggggacctctgcacgccgttcttgtgcctggcagcttcgaagcccatgttggagcaccgacccggtgctgcgctgttccgggcccggatggttaccgtccaccctctttcccgaattgcctcctgggtccccttctcttctactccgcgagaatctcctgtccattctccgtgagggtgtttcagttcctcccgggaagcccagaatttaatatcttgcccaggcccttaggagagcgggagaccctgatgttggggttaccctgtgccagagttgtgaggtcagggcaggaattgtatgttctcggcggtggaaccaattctttttttcctctgcttcaccccaggattacaagggccagaagctagctgaacagatgtttcagggaattattcttttttctgcagtaagtattggttttacatttaatctccgcccccgcctccctcccaaccctcagtttgagtgtgtttaatatacttcatttgtctctagatagttggatttatctacgggtacgtggctgaacagttcgggtggactgtctatatagttatggccggatttgctttttcatgtttggtaagaaatttgtgggtattagtggcagcttgggttttgtgagtcgggttggtttggttagacctactcagtagtgagacccaaagccaacgtttccctcatccttccaaacagcgtttccctttgctatcattggaaaagtagaatgccaaaatagtgtcagatggtgcgaactatataaaaggacacagcttatttcctttggcggctactctggctaataatcttaaggtcaaagccagcaggagttttcatggtgctcacgttgtcccttcaccttttatttatttatttatttaaattttttgagacggagtttcactcttgttgcccaggctgcagtgcactggggcgatttcggctcactgcaccttctgcctcccgggtttaatagattttcctgcctcagcctcccgagtagctgtgactacaggagcccaccaccacacccagctaatttttgtatttttagtaaagacagggcttcactgtgttggccaggctggtctcaagcaatccgcccaccttggcctcccagagtgcttggattacaggcgagagccaccacgcctggcccccacctttcttttaggtcttaaagccatttgtataggcagtgagcctgttcccatcatcatacagtattttgcatggatggtggcacagagcctttataggaatatggatttttttttttgtttttttgttccctcagcataggagtcatttgggaacctggcattatacgtaatgattttttaaacttttaatagctataatttatgcatttcctcttttctggcccagctgacacttcctccatggcccatctatcgccggcatcctctcaagtggttacctgttcaagaatcaagcacagacgacaagaaaccaggggaaagaaaaattaagaggcatgctaaaaataattgaggttttcatgattcagcacctgcttttgtttctgtgagatgagctaaattgctttcataccccagataagagctaaaaccacctaatgctcttatggcacagctgtgtatagatttagttctctttatacttcatttctagcccagttgggttttgatttatataagtagtttagaccttctcttcataatcttgctctgagatggggaacagaacacacaagtatgaagtttctttcaggtgtaaataatgaaaaataaatgcctcataaatgatagtacaatgtaactatcaaagttttataattcattatgagttaaccattttaatgtttccaattaaacctcatagtgcaagttctttgtctaaagggtcttctgttgattattctgcaaggaagataattaataaaagcctaagttagaagttcgtgcttctggccaggtgcagtggctctcacctataatcccagcacttgaggaggctaaggcaggaggatgacttgagcccaggagtttgagacatttcatggtatgtaattaatagttgtcattagaacattagttccatgagaacggggactttgttttgctcactgctgtctacccagtacatagaagagtacacgatgcattgttaagtacttaagatttattgaatgagaactgcattgtacaatatggtgccactagacacgtctatttaattaaaattaaaatataaaactctaaaactagccatgattcaaaggttcaatagctatatgtgactagtggctaccatataaaacatttccatcacaaagttccatttatcagatcttatatagaaccttgaataaaatttaatagacaagtgattttgtatttaacatttcacctttattgaatgcctataaggccatttgaataacggatcatgtacaaagcaacaggaaaaaaaaaactgcaagcagtaaaggttgtgcaggtgatattcagtaacactgcagtgtagccagagcaaggacataaaacttccttagctttgtaagtctgtggaaatcaaaacttctaaaagagaaaaccgaaatcagaattactgacactttaggccaggcatggtgcctcaagcctgtaatcccagcatttagggaggccaaggcaggcagatcacctgaggtcaggagttcaagaccagcctggccaacatggtgaaactccatctctactaaaaataacgaaaatcagccaggcatggtggtgtgtgcctgtaatcccagctactcgggaggctgagggaggggaacttgaacccaggaggcgtaggctgcagtgagccaagatcgcaccactgtactccagcctgggcaacaagaagactccatctcaaaaaaaaaaaaaaaagaatgattgacattttagaaccaatgccaaaagagtaacacatcaaagtctctgaactgtggccaaaggtatattcggaagaaaattcacagtcttaaagatgagtttttaaattaatttaggaagatgaattaagcactcaagtaaaaacgataaaagtgggaagaaaagatgtttaaacaaaataaaaatatacagtatggtaattaataagaaagtatgggggaagtcaggtgtggtggttcatgcctataatcccagcactttcagaggccgatgcaggaggactgcttgaatgcagtttgagaccagcctgggcaacacagacttcctctccacaaaaaattttaaaaattagccaggtgtggtggtgcatgcctgtggtcctagctacttgaggggctgaggtgggaggatcacttaagcccaggaggtcaaggctgcagtgagctatgatcacctcactgcactccaggctgggtgacagagcaagaccctgtctcaaaaaaaaa

SEQ ID NO: 2942 - DNA, 11991 bp, Homo sapiens
accggagatggtctgctgtattgttgagagtaacaatgtagaaaatcacattggagcgagtgttgtgctgaatgctgtttatagctgcaatggcccccccaagcctgtcttcagatgcagcgatgaccacaggaatctcctcttgtctcccatctactgcatgtcggagagcatttgggacaaagtctataggttgaggccctacaattcctgaatctgaaaacacaaggaaggcactgtgattacaatctcatgggcttttgatatagagtccaagacatggaaaaagggaaggtaaggattatggtactgatctacctcattctcccccattaaactgaagcatatagccctgaaactttccctgtatgtaaataagcttttggaaaagtggaggaagcattttttaaaatacactgacagcactttggtacactactggtaggaaaataacagaacctgttagaatgtattatggcaatttgtatcaagagtttcctaaggacaaaatctgaaatataatcaaaagaaagaattttatttaaattgtgaaaacttagcagcaaactaaatcaatgtttttcaagtcacgaatcacaagtaggcatgaaaccaattgagtgagtcacaatcaatttatacagaaaaagtttctggattgcaatagaaaactgaaatagaggccgggcatggtaggtcacgcctgtaatcccagcactttgggaggctgaggcgggtggatcacttgaggtcaggaatttgagaccagcctgaccaacatggtgaaacctcatctctactaaaaatacaaaatgagccaggtgtagtggtgaacacctgtaatcccagctacttgggagactgaggcaggagaatcgcttgaactcgggaggtggaggttgcagtgagccaagactgtaccactgcactccagcctgggcagcaataggaaaactccatctcaaaaaaaaaaaaagaaaactgaattagaataccaaagaaaacatagtgtatcacacaaggaaactgcaattactgtcctgtatgcattcttgcctttcatttttttttttttattcctcattgaaccctggtatttactatgtgccaggcaatatctaggcactggggttacagccatgaataaaacatccctaactttctgaggatagacagccaataagcaaatacacatgtatgtacatgtgctacatgtaatgtatttcctattgtagggctgccatcaaaaagtctgaaagctgttgtagcaaaagatgttatcctgtggaaacaaattaatagacattaagattatgtatgaagagtttctaccatcacagtgacatgatatacagaaaaacatgtcatgtacagtttatatatagtacaatctcaactgtacagaaaaaaagatgtgtaggaaaaaactggaaggtactaagccaaaattgtaaatgaaatcattcaaccaactaatatttattgaacagctagtatcagccatcatccataggcacagaagataaaacagtacacaaattgccttcatggagcttaaatactgttgtctctttttttttttcttgagacgaagactcactctgtcaccaggctggagtgcagtggcgtgatcttggctcactgcaacctccgcctcctgggttcaagcgattctcctgcctcagcctcccgagtagctgggactacaggcgcataccaccacgcccagctaatttttgtatttttagtagagacggggtttcaccatgttggccaggctggtcttgtactcctgacctcgtgatctgcccacctcagcctcccaaagtgctgagatggtctcgatctctgaccttgtgagacgcccaccttggcctaccaaagttttgggattacaggcatgagccactgctcccggccgctgttctcttttttataaactttcctaccaggaacatgcattactttatatgtatcatacatatatacacgtgataaaacatgctatcagagcactccgtgaaagtcaggggaaagctattacagtctctcactctggtcagctatggtgggtggcaatccaaaaatgatttttgacaaacactcaagcctcaaacatttctcagtaccaagggagaacagtatgaacgactaattcaatatactgtgcgatatattatacaacacagtgatttttaaaaatcacttgacaaacttttattgctacagtcccactgatgcagctgcacagctgaaggaaagtaactagactgacactctagtgactagagcaggcatcaaacaccaaggacactggtatgccctcactttctgaagccctgtcctgctgacatgtgaacagatggcagccctcagaggctctcctaaggcctctgatttggtgaaaaggaatattctgtcagatcaaacccttaacaaacaactgctagtactaccggaagaagaacaacttaggatgtgtgacacagagaataccaggtccgcaacagattctaaggcattattaataagtgctcgcatacctgtaacctcattccttaacaaactgctcaagctgaggaagttatggtgcaaaaccagtaagaagagagcaacagccaggaccaagatgatgatgtttactgaaatagatagggaaaacctatgttatacctctttatctttgaccaggtataaaaacaacttaacttgtagaaagagcatacctttacggaatgacatctttttcttctgtcatataaatattagtttttaaccctacaaaacaaaaacaagcccccaaagtcagtaagcacatgagaagggacatcaaaatgccctaacactttttttttttttttaattcaggaagaaacaagaggcatatacagtattccgccagaaactcattttgaattcacagttcccaagaacccaatttgggatctgaaatttttgtggtactcattaataaaaaacttaaaaataagttggagaaacagccttagccttgtacattatacatcacaagatgaaaagcaaaagaaacatttaagaattaagtttcagccaggcagggtctggcctataatcccagcactttgggaggccgagtggggtggatcatgaggtcaggagttcaagaccagcctggccaagatggtgaaacctcgtctctactaaaaactgcaaaaaaattagccaggtgcagtggcaggggcctgtaatcccagctgctcaggaggctgaggcaggagaatcgcttgaacctgggcaacagaggttgcagtgagccgagatcatgccattgcactccagcctgggcgacagagtgagactctgtctttaaaataaaaaattacataacataattaagtttctacttaaaattcctaaagtagacatggattcacgttgtctatgaccaagtaacctgaggtcttagcctcatcagtaaaaacatgcctgttcagagttgtatcccattcacctttaacatgagtgtcctcagagaaaagaatattatccaaattcacttgacaaacccacagcacagaaaaagctacaaaaattcacaaaatccaatcgatatcaaaagtgtggagtacatttctagccattgtaactagcaaaaaaaaaaaaaggtttattttagtttattattttttgaaacggagtcttgttctgtcgtccaggctggagtgcagcggcatgatctcagctcactgcaacctctgcctcccgcattcaagcgattctcccgcctcagccttcccaatagttgggattacaggtgtgcgccaccacgcccagctaatttttgtatttttagtagagatggggtttcaccatgttggccagactggtctcgaactcctgacttcgtgatctgcccacctcagcctcccaaagtgctgagattacaggcgtgagccaccacgcccggccaaaaaaacatttaaggtgctattctcaaaaaccatctctgttagctagctattcatctcttaagaaggtggtgtctaattgtcacaatgtcctggttggtcctcctcagctcatctgaccttcactttttcaaaacaattcagtggaaacaagatagtaggtggaactaaatttatttaaaaaataaattccttcaacaagctctggataaaatgtttccttaaagacattttaccaaccaagatatcgtgaacctaccttttaaccctttcttacttcatcttcacccatagtagtacccaacccttacataaggctattaattttacaaagcactttcaaacatagcgtattgcaatgcaagttagttcatttgtttttttagacagggtctcaccatgttgcccaggctggcctctaactcctaggctcaagcaagcctcctgcctcagcctcccaagtagcagggactacagacaaagtaagtttgaattaacttcatcctgggaaaattgtgtgcctaccaggcacttaatttctcaaggcctttgtaaagaagagaaatatgttgaaaaactgtttaaaaaattgggggctgggcactgtggctcatgcctataatcccaaaatgaaaacaacaaggctaacgcgggcagatcacctgagctgaggagttcaagaccagcctgggtaacattgtgaaagctcatctctacaaaatatacaaaaattagccaggcatggtgacgtgcatctgtagtcccaagcatttgggaggctaaggcaggaggatcccctgagccagggaggtcaaggctgcagtaagccatattcatgccactgcactccagcctgggtgacaaagcgacaccctgtctcaaaaaaataaaaaataaaaagcaataaaaactgtggatcagccaggcactgtggctgatacccataatcccaactattcaggtggctggggtgggaggctgcctgagcccaggagttccagaccagcctgagcaacatagtatgaccatcccccaaccccatatctaaaaaaaattttttttaaaaatgggatcacaggccagattacaaattagggggaaaatacacatctttctttctttccttttttttttttttcgagacagagtctggctctgtcagccaggctgcagtgcagtggtgccgtcttggctcactgcaacctctgcctctcagattcaagcaattcttgtgcctcaacctcccgagtagcagggactacaggtgtgcgccaccacgcccagctaattttaatagagagagggtttcaccatgttggccaggctggtctcgaactcctgacctcaggtgatccacctgcctcggccttccaaagtgctgggattacaggcctgagccaccaggcccagcccacacacacctttccaaagcagtatatatgaagtacaacgtgtcagtgaacttcttctcatatacatcagggcgccgtggctcacgtctgtaatcccagcactttgggaggccaaggcaggtggatcaagaggtcaggagttcgagaccagcctgtccaagatggtgaaaccccatctctactaaaaatacaaaaaattagccaggcatggtggcaggtgcctgtaatcccagctatttgagaggctgaggcaagagaatcccttgaacccgggaggcggaggttgcagtgagctgagaccgtgccactgcactccagcctgggcaacagagtaagactctgtctcaaaaaaaaaaaaaaaaaaagagaagtatatacatcagtatataccctaagtcatatgcctctatcacattatgggctgaccttatctacagaagctggcagaggggagctgttcggacaaagccccaacatctgcctgcgatgaggcaacttccaccaccactgagaaaacgatcttgcactcaaataaatcccacttaattaatggtacaagagataatgtttttagtttcttgacttccagttagcagttacgggatcaagaggcacacttggctggaaacaagaaaaacacaattctatcaagtatctgacatacttaagtagactggcaaggcagaaaccagttgctcctaaaacttccacagttacctacatgcaaaacgccagttatcatggagtacgtctaatccatattgtctttcctggggctattcctggtaagagagctttcctgatctggttagaaggaattctcaaaacgaaattgcacacagacgctggatctgtaatagttaactacattttcgtaagagtatataattgtgtacaatttgattagcaacacagttggtcctcagtatcagtcggggattggctccaggactccccatgtatacaaaaattcacggatgctcaagtcccttatgtaaaatggcatattacagtcagccctctgtatctgtaatttcagtccgtggttggttgaatccaaggatacaaaactgtggatacaaaaaaaaaagaccgcactggccgggcgcggtggctcatgcctgtaatcccagcactttggaaggccgaggtgggtggatcacttgaggtcaggcgtttgagactagtctggccaacacagtgaaaccccgtctccactaaaatcacaaaaattagccgggcgtggtggcgcatgcctgtaatcccagctactcagaaggctgaggcaggacaatcccttgaacccaggaggcggaggttgcagtgagccgcgatcgcaccactgcactccagcctgggcaacagagcgagtcttcgcctcaaaaaaaaaaaaaaaaaaaaaaaaagaccacacagagatatatctatttatacacacaacagaaagtctcttcaaacacaccaagaaatacagagcatgagaaggaaacaggaataaactcttgcccatccctctttctgccttctacacgtcctgagtccttctgaggtcagaaaagtgtcaaacgtgtctgcattttactgtttggtctctgccacgtgcaaggatgaaagggcactgaggatatacaaacactttctcctaccctttcatctggctggctcccacttggcattcaaaggtcaaggtagcctcctccaaactccacgttgagctgcacctcccctgagctcccacatctgggcctccctctcccagggctaatccagctgtcatgtatttctggcgtgatgtggctgtctcccttgacacgctctgggctcttccaaggcaacagcctggtcttggtaacaaccgtgtcctcggtctgctgtctggcacaaacaaggtgccgtgaatatttgctggttgcatgaatgaggacagcagtcccaccctgtcccgggagtgcctagaattccactgtttgtggccaacccagaatacataacctgggggccggagagccagctgggacccagaggcccgggttcctcagaacggtttctctccaaaacgtgggcatcccacctggctgacggtaacggaggagggtctaagatttagagatacaccagccttgaaagagaggctgagtgaacctttggctggcctctatcgggagggcccagcctgggtctgtgagggtcagtaaagccggccacaatgtgagagggctgagttcgggagcccccagatgagggactttctacgcggatgagagggacagccgagcaccagggtcccctctccaagggaattctctctgttgtggatgccgcctagggtagcccccctaaattccaagggtcagtagggccccccttacactttgaagtgatcggaaagtgatgtgacgctccggggatcccaccaggctcagagatacccctggttagggctccgacaagtcgttcccctcaaaggctcgccgcggccgcccttactgcaggcgatggaggagatgcggatgcagcccgcgccccgacccgccctgccagctcagcgcccgcgccgcaggccccggagcccagcccgttgtctggccgcccgcgttccctgcacgctgggccgagcacacttgccctctagctccgtggcagccgcgcagccccactacgcccagccagcccgcagcggtaaccgctagagcgtcgcgccaagcaggcgccgcggggcagccctgccgccggggtcctcgcagggaaaaaggccgtcgccatggagacgcgggggcgccggcggccgttgggccgcgcaagtactgtcaaggacagttttcgggacgggggacgcggctccaggcacccaacagcactgacggcgaacacttcacgggcgcgcgatgcctcgacaaggcggccgccaccaccacctcagctgccctcgcgggcagcacggcgcggcaaaagcgcacgtcgcctagcgatggcgcggggcggggacacgggctgtaccggcccgtcggagacttccgcttccggggccgccgccatcgctctcccgggcttagaaggcccggctactgacgcgcagtgccagaccttacccctcacggtccttaagtctcggtcgccctcgcctcgcagcctgccacccgcgctcagctgcccgcctcctcagccagccatgctggagcatctgagctcgctgcccacgcagatggtgagggcgcaacccggggacctctgcacgccgttcttgtgcctggcagcttcgaagcccatgttggagcaccgacccggtgctgcgctgttccgggcccggatggttaccgtccaccctctttcccgaattgcctcctgggtccccttctcttctactccgcgagaatctcctgtccattctccgtgagggtgtttcagttcctcccgggaagcccagaatttaatatcttgcccaggcccttaggagagcgggagaccctgatgttggggttaccctgtgccagagttgtgaggtcagggcaggaattgtatgttctcggcggtggaaccaattctttttttcctctgcttcaccccaggattacaagggccagaagctagctgaacagatgtttcagggaattattcttttttctgcagtaagtattggttttacatttaatctccgcccccgcctccctcccaaccctcagtttgagtgtgtttaatatacttcatttgtctctagatagttggatttatctacgggtacgtggctgaacagttcgggtggactgtctatatagttatggccggatttgctttttcatgtttggtaagaaatttgtgggtattagtggcagcttgggttttgtgagtcgggttggtttggttagacctactcagtagtgagacccaaagccaacgtttccctcatccttccaaacagcgtttccctttgctatcattggaaaagtagaatgccaaaatagtgtcagatggtgcgaactatataaaaggacacagcttatttcctttggcggctactctggctaataatcttaaggtcaaagccagcaggagttttcatggtgctcacgttgtcccttcaccttttatttatttatttatttaaattttttgagacggagtttcactcttgttgcccaggctgcagtgcactggggcgatttcggctcactgcaccttctgcctcccgggtttaatagattttcctgcctcagcctcccgagtagctgtgactacaggagcccaccaccacacccagctaatttttgtatttttagtaaagacagggcttcactgtgttggccaggctggtctcaagcaatccgcccaccttggcctcccagagtgcttggattacaggcgagagccaccacgcctggcccccacctttcttttaggtcttaaagccatttgtataggcagtgagcctgttcccatcatcatacagtattttgcatggatggtggcacagagcctttataggaatatggatttttttttttgtttttttgttccctcagcataggagtcatttgggaacctggcattatacgtaatgattttttaaacttttaatagctataatttatgcatttcctcttttctggcccagctgacacttcctccatggcccatctatcgccggcatcctctcaagtggttacctgttcaagaatcaagcacagacgacaagaaaccaggggaaagaaaaattaagaggcatgctaaaaataattgaggttttcatgattcagcacctgcttttgtttctgtgagatgagctaaattgctttcataccccagataagagctaaaaccacctaatgctcttatggcacagctgtgtatagatttagttctctttatacttcatttctagcccagttgggttttgatttatataagtagtttagaccttctcttcataatcttgctctgagatggggaacagaacacacaagtatgaagtttctttcaggtgtaaataatgaaaaataaatgcctcataaatgatagtacaatgtaactatcaaagttttataattcattatgagttaaccattttaatgtttccaattaaacctcatagtgcaagttctttgtctaaagggtcttctgttgattattctgcaaggaagataattaataaaagcctaagttagaagttcgtgcttctggccaggtgcagtggctctcacctataatcccagcacttgaggaggctaaggcaggaggatgacttgagcccaggagtttgagacatttcatggtatgtaattaatagttgtcattagaacattagttccatgagaacggggactttgttttgctcactgctgtctacccagtacatagaagagtacacgatgcattgttaagtacttaagatttattgaatgagaactgcattgtacaatatggtgccactagacacgtctatttaattaaaattaaaatataaaactctaaaactagccatgattcaaaggttcaatagctatatgtgactagtggctaccatataaaacatttccatcacaaagttccatttatcagatcttatatagaaccttgaataaaatttaatagacaagtgattttgtatttaacatttcacctttattgaatgcctataaggccatttgaataacggatcatgtacaaagcaacaggaaaaaaaaaactgcaagcagtaaaggttgtgcaggtgatattcagtaacactgcagtgtagccagagcaaggacataaaacttccttagctttgtaagtctgtggaaatcaaaacttctaaaagagaaaaccgaaatcagaattactgacactttaggccaggcatggtgcctcaagcctgtaatcccagcatttagggaggccaaggcaggcagatcacctgaggtcaggagttcaagaccagcctggccaacatggtgaaactccatctctactaaaaataacgaaaatcagccaggcatggtggtgtgtgcctgtaatcccagctactcgggaggctgagggaggggaacttgaacccaggaggcgtaggctgcagtgagccaagatcgcaccactgtactccagcctgggcaacaagaagactccatctcaaaaaaaaaaaaaaaagaatgattgacattttagaaccaatgccaaaagagtaacacatcaaagtctctgaactgtggccaaaggtatattcggaagaaaattcacagtcttaaagatgagtttttaaattaatttaggaagatgaattaagcactcaagtaaaaacgataaaagtgggaagaaaagatgtttaaacaaaataaaaatatacagtatggtaattaataagaaagtatgggggaagtcaggtgtggtggttcatgcctataatcccagcactttcagaggccgatgcaggaggactgcttgaatgcagtttgagaccagcctgggcaacacagacttcctctccacaaaaaattttaaaaattagccaggtgtggtggtgcatgcctgtggtcctagctacttgaggggctgaggtgggaggatcacttaagcccaggaggtcaaggctgcagtgagctatgatcacctcactgcactccaggctgggtgacagagcaagaccctgtctcaaaaaaaaa

SEQ ID NO: 2943 - DNA, 322 bp, Homo sapiens
gcactgtaaaagggcaggaagtattgttttattcaccactatatccccagctcctggcagagaacctggcacacagtaaactctaaataaaaatctgttaagtgtgccgggcgcggtggctcacgcctgtaatcccagcactttgggaggccgaggcgggcagatcacgaggtcaggagattgagaccatcctggctaacacggtgaaaccctgtctctactaaaaaaatacaaaaaaattagccgggcatggtggcgggcaactgtagtcccagctactcgagaggatgaggtaggagaatggagtgaacctgggaggcgg

SEQ ID NO: 2944 - DNA, 1087 bp, Homo sapiens
gatgtggctgtctcccttgacacgctctgggctcttccaaggcaacagcctggtcttggtaacaaccgtgtcctcggtctgctgtctggcacaaacaaggtgccgtgaatatttgctggttgcatgaatgaggacagcagtcccaccctgtcccgggagtgcctagaattccactgtttgtggccaacccagaatacataacctgggggccggagagccagctgggacccagaggcccgggttcctcagaacggtttctctccaaaacgtgggcatcccacctggctgacggtaacggaggagggtctaagatttagagatacaccagccttgaaagagaggctgagtgaacctttggctggcctctatcgggagggcccagcctgggtctgtgagggtcagtaaagccggccacaatgtgagagggctgagttcgggagcccccagatgagggactttctacgcggatgagagggacagccgagcaccagggtcccctctccaagggaattctctctgttgtggatgccgcctagggtagcccccctaaattccaagggtcagtagggccccccttacactttgaagtgatcggaaagtgatgtgacgctccggggatcccaccaggctcagagatacccctggttagggctccgacaagtcgttcccctcaaaggctcgccgcggccgcccttactgcaggcgatggaggagatgcggatgcagcccgcgccccgacccgccctgccagcgcagcgcccgcgccgcaggccccggagcccagcccgttgtctggccgcccgcgttccctgcacgctgggccgagcacacttgccctctagctccgtggcagccgcgcagccccactacgcccagccagcccgcagcggtaaccgctagagcgtcgcgccaagcaggcgccgcggggcagccctgccgccggggtcctcgcagggaaaaaggccgtcgccatggagacgcgggggcgccggcggccgttgggccgcgcaagtactgtcaaggacagttttcgggacgggggacgcggctccaggcacccaacagcactgacggcgaacacttcacg

SEQ ID NO: 2945 - DNA, 322 bp, Homo sapiens; identical to SEQ ID NO: 2943

SEQ ID NO: 2946 - DNA, 308 bp, Homo sapiens
aaagagatgtttttgctctcttacctacattagttactatgaaaattacttttggtatatgcagaatattaatattaaataattttctaattggtcatgcagtgaaggcagctaatgaaaaaacagattttttttcattttaattggttatttcacatggtgtttgtgctacacctgtgcttataatgagaatggagaattaatctaaccttctgctcacatgattccagttttcatggtttatacaagataatgataacctgatttgcaacacaatttgttgtagacctgtgttttaaatattttta

SEQ ID NO: 2947 - DNA, 241 bp, Homo sapiens
aaacagtgcagccatcaaaattttcaatttacaaaatgttcacagtcatgcttcttccttgactaaacactggggttgctgccagtggtaattggcttgaaaccagctaatttttatatatctatttagtctggatattctagatgagtggcactatagttgcggtgctctagtcactgtgccagagcaccagggaggagggtgcttgctaccactgacagctgtgtgtcatttagcaaat

SEQ ID NO: 2948 - DNA, 486 bp, Homo sapiens
ggaactattttccttcctgaagtgggcagatttacaaactagaattcatactggactatggatcctttaatcattaatagagccttattaaacttttcattgtattttttatgtcctgctcagatttgatctgagttgggaactaaaaggaatttactatttcagaatctaatatgtcctcttcattttctggatttgatacgtaatttttaatattatgcagaacaaacggatcttaagagaatctcatgcgtatgactctggagagcgtatattaatacttttttacatgtcagtgacttgtcacttttggagaggctacaaaaataattgtacaaaactatcttattaaggcacttaaagtaacttaagtgccttaataagatgtttataaattttcagtactagctggagaaagcaaaactataagttcaattactgtatatctgtgaccttgccttgacctcagactttacataaagagca

SEQ ID NO: 2949 - DNA, 323 bp, Homo sapiens
cttgatttttgcctcttagcccacaaagcataaaaatacttactatctggaccttcacagaaaaagtttttccgagttctgatctggggcttttgggtgactttcttaaggtcactgtgtttaatggcgtcgggaccctaacttcatgttttgattcctgaattcttttatttattcatttcaaaaatttttaccaggtgcctactctgattggtactatgtcagggtccgaggaccctggcaaacaaagacattcctagtccctgtcagtgggagctcatggtacagtgggggaaaggatgttaacagttacgtcatttaaa

SEQ ID NO: 2950 - DNA, 5031 bp, Homo sapiens
cacctggaggcagtgcagaagatgaaagccaaggaggagaggcgagtgacagaactgaaggtgggtgaatgttctcgacggggctgatgggcagtacagtcgaggcaaggaaggtagggcttcccactctcacagggagtgacttggtcccctgaggaggggacagctaaggcctgggagaggggtagatgctttccctaggtgctgaggagagcggggccttagagaatcaggaggcatgttcattcctggttccaaaatggagtggaaactgaggcctggattggagggcctaggtgcctggcccaaggctgcagaacaggctttctacccgacaccagagcctgaagggggcaaagcaaaacccacatagcagccatcagagaagctgccggccccaggatccatgcaggcactgggcagagcagccctaagcatgaggcggacactgtcctgggacacttgctgtgtcctgagagggggccagtgtgtttaagctggggcaggatttagtgtatgttagcactgcagagacctaatatttcctagtctagtgttttctcagcacaccccgacccccccgctttttttgttgtttttttccattattgctcgcccttctccaaggagtcttttaagatacattttccatccccacctcccgcctgttttcataaccccagcaggtcctgctgggatgggctggcactgtgagcttcatagaccaagccaggacctccccttctgtccctcttccctcctcccttcccagccagtgcctgggccttgccactacccagggcccatgctcactgccacctgaacgttagggactctgctgctggcgactgctaggcactgaatggtaggatctgtctgggagtaggaagtcatcgtgcttctggccagctgcccaagttgatacttttgggctctcctgggtatagaggtaacaggagctgtgtgcccctggcatagagtgaagctgactgtggcggctgttccctcacgcgtctggtcagttgggaccctcctctggcctgctgctcacagcgtctgcagccgatggtagctgtgtgaaaagtgtgcctaccacccaggaagggccatccctggcaaatagggtgggactgggcaggagttttttctgttacaggatattaagtccctacataatatccttgatttttgcctcttagcccacaaagcataaaaatacttactatctggaccttcacagaaaaagtttttccgagttctgatctggggcttttgggtgactttcttaaggtcactgtgtttaatggcgtcgggaccctaacttcatgttttgattcctgaattcttttatttattcatttcaaaaatttttaccaggtgcctactctgattggtactatgtcagggtccgaggaccctggcaaacaaagacattcctagtccctgtcagtgggagctcatggtacagtgggggaaaggatgttaacagttacgtcatttaaacacaacgtttcaatattatatgtgccacagagagatacagtgatatttgtggggatggtcccgatttagatctggagaggagggaaggcttgtcttggaatatttaaggttggacctgaaggatgagtcaacttaggtagagtcaggtggagaggagtgttccaggcagaggttagtgagtttgagaccactgtgctgggagcaagggggtggtatctggtaaggctggtaggggatgagcctctttccgggactatcttggacctggggagtgtagggctcctttgccttgcattgagaagtagtagttgcaaaactggaggttatcttcgtacgtgttgaggtggtgtctgccatcccctttgcaccattccagagccagatgaagtcagagctggcagcggtggcctcggagtttgggcgactgacacggtttctggctgaagagcaggcagggctggaacggcgtctcagagagatgcatgaagcccagctggggcgtgcgggagccgcggctagtcgccttgcagaacaggccgcccagctcagccgcctgctggcagaggcccaggagcggagccagcaggggggtctccggctgctccaggtgagcaatgtcccctccctgttcccccagcattctgtgttggctgtcaggcagtgcttaccaaacgcctgtccagagctgcctcttttctccctgggaggaacccacagtgattgaacctgaagaccaaaaacatgttttaaagctggaaacagagttaatgtcgaatgtggtatgtgtggcgattatacccagtgaaaagcatgaagattcggttgtaggagaggtttaaatgacagttgaggaaagtctttttgacagtgacatcctgaaaaaggtgagcaagtcgtattgtggaaatgacagtatccctgggctcacagcaggatgaggcgagttaggtatggcgaggcatggggtggttgaaatggatgtgtgttcattgagggccgtgagggtgctgcttctcccttcctgctcaggttcagtctctgactggagatcggggaacgctgtccctgtgcagctgacactctctttatctctttctccctctccctctttttgtttctcttattcccaggacatcaaggagactttcaataggtgtgttcccagtctttgcccttcgtgacccagtggcatctggttccctgtccctgcttctcttcggtatccctctcctctccttccttccccaggacctgagtttccatctcctggaccctcctctccttcccctcagcttttgcttttccctctgggaatatcgtggtcccaccccctgcccggtccccttcctccaggtgtgaagaggtacagctgcagcccccagaggtctggtcccctgacccgtgccaaccccatagccatgacttcctgacagatgccatcgtgaggaaaatgagccggatgttctgtcaggctgcgagaggtagggaggtcacctccacgaccttcctttgcctttcccttcacagacctgagactgggtcctgagggaagttgggccccagggaaactgtggggcttgagatggagcaggatccaggcagccactctgaggttgaggtttcaagccatgagcaggtagacctagtgcaggcaggcctggagggtggggtggggtggagtggcaggaagagccaggctgggggaagacctgtcaggtatcctaggaacaagagtgaggagcaagatgagcctgcaggaatctgaggctggcctctgggatggtgtggggagctggattcagggagaaagggggcccaatctgtggagttggctgctgacagggtgaacagccgttccagccctggcgtatttgtcctccctccctcccaagtggacctgacgctggaccctgacacggctcacccggccctgatgctgtcccctgaccgccggggggtccgcctggcagagcggcggcaggaggttgctgaccatcccaagcgcttctcggccgactgctgcgtactgggggcccagggcttccgctccggccggcactactgggaggtagaggtgggcgggcggcggggctgggcggtgggtgctgcccgtgaatcaacccatcataaggaaaaggtgggccctgggggttcctccgtgggcagcggggatgccagctcctcgcgccatcaccatcgccgccgccggctccacctgccccagcagcccctgctccagcgggaagtgtggtgcgtgggcaccaacggcaaacgctatcaggcccagagctccacagaacagacgctgctgagccccagtgagaaaccaaggcgctttggtgtgtacctggactatgaagctgggcgcctgggcttctacaacgcagagactctagcccacgtgcacaccttctcggctgccttcctgggcgagcgtgtctttcctttcttccgggtgctctccaagggcacccgcatcaagctctgcccttgattatcctgccacccgcaggggcccctctgtcagcacttggggggtgggtggtggagggtggcccgtaagtttgagggctcaaaggctcttcccactgcttgttactgtgttgcttcccactcccccttgaccccaggcccctgcttctccctctaggagcctaaagaaccctcctggcctccagctcagccttctctcacctactatgtctgtccaacaggtctgcatgggtccctgataatgagaacagctgcctggtcttctctcccagtctgcctagcccagccctgggactggaatttgagtaggggatgaggggaaattgtaatttcattccttaacttccttttccccacccctgctcttcaacctctttatcagttctgaggctggagggtttgggcaaggcaacatccccattccaattccattttctgatgcagattttagctgagggatttggaagccatttggggaggcaggctgggccaaagggtagagctgggtaataaatgtctattctcctggggaggagggattctaaactttccttccgtcctcaatttctacctccatagaccggccagaatttagcttcacttgagagagatctggaatggtcgccatgattgaaaccacgcaccattacatcatcattacattaattacatcaacataaattatttcttcccccttcccttttccagcactcaaccaaggagcaaagctcatcccaccccacacccctcccaggtctgctcactgccaggctcctctcccctttgttcagtggagctggcttttctcccagcccctttccatgcctttcactccatttggcaagctctgagggggagcctggggacgggtttgggtccccaggaggagagccttgggtataatctatttttctaggagcctcttgccttgtcacttgcagctttcgccctctgctttgatggctgaggtgaactcatgttctttgggaaaagggaaggcgtgctgtggaaataaaatgtttatttgcttctctt

SEQ ID NO: 2951 - DNA, 11553 bp, Homo sapiens
atgcgggatgaagatacgagggtgacatggaggaggagttcgaggaggaagaagagggtgtgttctggaccagtggcatgagcaggtccagctgggacaacatggactatgtgtgggaggaggaggacgaggaggaagacctggactactacttgggggacatggaggaggaggacctgaggggggaggatgaggaggacgaggaggaagtgctggaggaggttgaggaagaggatctagaccccgtcaccccactgcccccgcctccagcccctcggaggtgcttcacatgccctcagtgccgaaagagctttcctcggcggagcttccgccccaacctgcagctggccaatatggtccaggtgattcggcagatgcacccaacccctggtcgagggagccgcgtgaccgatcagggcatctgtcccaaacaccaagaagccctgaagctcttctgcgaggtagacgaagaggccatctgtgtggtgtgccgagaatccaggagccacaaacagcacagcgtggtgccattggaggaggtggtgcaggagtacaaggtgagagaagtacagagagaagatgggagtttagtggggggatggagaggaagtaaggggacctgggaaaaggaaacatctcttcacccaccaaagaacctcatggtattggtgagccaagtttgcttatctaagcacttactgccaccaaggtggattagaatgagaaggattctgtacacagagcagatgcagtgaagacgaccagggaaggatggcttcctcaaagcaaatagagcaaagccggtgatgccagatcaggtctctagggctttaccagaagtctcgttttctttcgggtgagtcttaagtctgtccttgacggagacacctagagatggaaagaactgggggcttcaaaggacaagaaaaggctcagaagcaggaacacagagataactgctagtgtcagtgtcagacccaaatgctctgcacttgcctcccagtgggttccccacctaccacgatatggcttggttctgtcttcaaggactttggttggctctgtgtcattcttatgcactgactagaaagcaggagcttttcagtcagaagacctggctctgcaagttgcattgtcaaatcttgattaagtctgtgagtgtctttggactttaatttgtccaggattgatagttaatattcactggacatttatatgtataccaggcactgtactaggcacttttcatggactgtctcgttaaaacccagacaacactgagtttgatatgttttccattcccattttatagattgggaaacaaagtcagagaggctttaagtaccatacagagggccacagagcttcagtaataattgacttagttatttactgtcccttcccctggtgtatactaacaacgccaccaccatttggatgtctgttgtttgacttttctgatgtgactttcttggagtctgattctagtttgacaaataccttgcccctacttctcattttgactcttctttggacataggtaaaggagatttgtttgcaaggcagccagcacaaatagcactacttagtgaaggcctggatgggtttgaagcagtgggaccaggaggaggagggggtagcctctgtgtggtctgcacagagctttttttgttttataactcatgttttcagaccttctcctgattcctgctataacttcatttaggtattattttcgttaccccaattttagagtaatgtgtctagggtttctcagctctgagtggtacagctagacatacctacattacctcatcacaagtaacaatttcttttacagagtggccttttttttttttaattttttgagacggagtctcactctattgcccaggctgaagtgcagtagcatgatctcggctcactgcagccttcacctcccgggttcaagtgattctcctgcttcagcctcctgagtatctgggattacaggcactcgccaccacagctggctgatttttgtatttttagtagagatggggtttcaccgtgttggccaggctgttctgaaattcctgacctcaggtgatccgcctgttttggcctcccaaagtgctgggattacagacatgagccactgtgcctggctacacaaagattgttaaacctgcctgattgttggaattactaggggaggttttcaaaaatacagtggatcctaccactagagtttctgaatcagtgagtaggagaatatctttaaaaagcccagtctagcatggggatcactgcattggtaacattgcctagctgttagtccctgcatttttagcagagattgtgaggtcctgttgtcctttccatctcctcagttcctagttaaccatacccatcatatcatgtgtggtcactttgtgaacaggaacccaggccaaactatccatgggcattccaccctttctctttcacctccccctgtaggactgctccaaggagcttctgaaactggattttaatttgcattagccaaatttgttcaatgccagctgcctgaaatcccgtattaggtcctgaagtaggtgaggaattaaaaaaagtcataatctcttttcttttccccccttttttttttttgagacagaatttcactcttgttgcccaggctggagtgcaatggcacaatcttggctcaccgcaacctctgcctcggattcaagcgattctcctgcctcagcctcccgagtagctgggattacaggcatgtgccaccacacctggctaattttttgtatttttagtagagacgggatttctccatgttggtcagactgatctcgaacgcctgacctcaggtgatccgcccaacttggcctcccaaagtgctaggattgcaggcgtgaaccactgcgcctggccatactctcttttcttgatctgtttactgcgctctgcagtttgggaggccatatacacatatttaatctgacattaagtgatgagtaaatgtaaatacatagttttattgtataggactaatttgagtgattccctttctgacttaataggctattttacaagtgggtcatttatttttttatttttattttttttgagatggagtctcgctctgtcgcccaggctggagtccagtggcgtgttctcggctcactgcaagctccgcatcccaggttcacgccattctcctgcctcagcctcccaggtagctgggactacaggcgactgccaccacgcctggctaatttttttgtatttttagtagagacaggatttcaccatgttagccaggatggtatcgatctcctgaccttctgatttgcccgtctcggcctcccaaagtgctgggattacaggcgtgagcaccgcgcccagccacaagtgggtcatttattcttttcagatatgtacatgcagtaaccagtagcttggcaaaatgttttgtaaaaattttttttgttgaataggtaataacacacaaatgatatgtaaatatagttcctgaacagttacatgtttgttttgttttttttgagacagggtctcactctggccaggctagaatgcagtagcatgatcatagctcactgcagccttgaccttctgggttcaggtgatcctgagtagtagctgggactggaggtgtgtgccatcatgcccagctaattttttttttttttttttcgtggagacagggtcttgctgtgttgctcaggctggtcttgaaccactggcctcaagcaatcttcccattttggcccctcaaagtgctgggattactgtgtctgcccgacagttaaatgttttgaaagttggccgggcatggtggcgggtgcctgtagtcccagctactcgggaggctgaggcaggagaatggcgtgaacccgggggcggtggagcttgcagtgagctgagatcacgccactgcactccagcctggacaacagagcgagactctgtctcaaaaaaaaaaagaaaaaatgttttgagaatttctcttataactggctggctgtggtggctcacgcctgtaatcccagcactttgggaggctgaggcaggtggatcacttgaagtcaggagttcaagaccagcctggccaacatggtgaaattccgtctctactaaaaatacaaaattagccagcatgatggcatgtgcctgtaatcccagctactcgggaggctggggcaagagaatcgcttgaacctgggaggcagaggttgcagtgagccaagattgtgctactgcattccagcctgggcaacacagcgagactcccatctcaaaaaaaaaaaaaaaaaaaaaaaggaaatatatcttaaatagaactctgtttgaatttgtgcttattaatttttgtttttgtcagcaatttagggtcccggcacggtggctcacacctgtagtcccagcactttgggaggcagaggtgggcagatcacttgagggcaggagttaagaccagcctggccaacatggtgaaaccctgtctctactaaaaatacaaaaattagccaggtgtggtggtgggcacctttaatctcagctactcgggaggctgaggcaggagaattgcttgaacccaggagttggatgttgcagcgagccgagatggcactgctgcactccattctaggcgacagagcaagactctgtctcaaaaaaaaaaaaaaaaaaaaaaaaacagtaaatggtaaatttaagcgttataaattctgaattaatggagaaattattgactagaaaagtagaaagttatatcagaaggccaaattttgtgtagttcatgctattgtcacgagttgactataattccattattactgtaattttgtctacaaccacttatcctgtgcagcaactgctgtttgcactctggcttggtaaactctttagttcaggggtcattatcaggatgtcactggcagcttaaggtatagggaacaaatattagataacatttactgatcttctgctacatgccaggcactgcagtaagtgtgctatccatgaggtccattctcttcttatttgaagctgaggaaactgaaagcatggcttgcctgaggtcacttcacttccctctggtcctgactggagtcaggctggagctctcctaccctatattctctctcaaagaaaaggagacaggctagtagaagacatagaaaaggtaagagcaaataggtagggcttattccactcattctgggctaacagccctttaaagaaaagtatttggctacaaattgtagaaacacagagctcgtgtgcctattggctataacagttacaacctttggaagaggggtttcggtgtcctttgccatttagcaagtaattgagcaggagagaaagcagatgagcagaaagaagcaaagaagttgaaataagtagagtgtgggcagggactccgcagtgtcctggaggaggcacacctgtcattggtgccctgggaactcatgtattagatatttcttgggatcacagaggatgttgggggtggggaggatcagggccattttcagggagctgttttaaaggaagaataccttgggccaagtggagaaaggcactcccagacagagggaacagcatggaattatactcaggaaatgacaagtaattttatgtggtcaaacgtgttaagagtctgtgtggaaggcgttgagtgtagaggtgaggctggaagtgtggggtcaatgttttggaagtggtggtgacccatggaaaggttttagcataggaaaaaaatcatcagaaaagtatttagagagaagagttctggggaagatcgcctgtgaaggggaaggggaccaaaggtgagggcacccctggaaagactctggtgcggggctcaagccacttcccctcagctgtgagcgtgggagctctctagtcttgaggctcctacctttagagaatacacacagggccggccgggcgcggtggctcacgcctataatctcagtactttgggaggctgaggtggacggatcacgaggtcaggagattgagaccatcctgggtagcatggcgaggtgaaaccacgtctctactaaaaataaaaaaattagccaggcgtggtggtgggcacctgtagtaccagctactgggaaggctgaggcaggagaatcgcttgaatccgggaggtggaggttccagtgagccaagatcgtgccactgcactccagcctgagcgacagagcgagactctgtctcaaaaaaaaaaaaaaaaaaaaaaaaaaaaaatacacacagggcttctgcagacgtgcacagagggattggaggcttttgtcatcatctgaaagaagaaagtggaggaaggtataatactcacttgacacccattttcgggggtagggatcaggctttgacccatcttgctatagggaggattgcagaggtaggctctgaagggcaggtgcctctcccagcccccacttttctttttctgtttcctcaggccaaactgcaggggcacgtggaaccactgaggaagcacctggaggcagtgcagaagatgaaagccaaggaggagaggcgagtgacagaactgaaggtgggtgaatgttctcgacggggctgatgggcagtacagtcgaggcaaggaaggtagggcttcccactctcacagggagtgacttggtcccctgaggaggggacagctaaggcctgggagaggggtagatgctttccctaggtgctgaggagagcggggccttagagaatcaggaggcatgttcattcctggttccaaaatggagtggaaactgaggcctggattggagggcctaggtgcctggcccaaggctgcagaacaggctttctacccgacaccagagcctgaagggggcaaagcaaaacccacatagcagccatcagagaagctgccggccccaggatccatgcaggcactgggcagagcagccctaagcatgaggcggacactgtcctgggacacttgctgtgtcctgagagggggccagtgtgtttaagctggggcaggatttagtgtatgttagcactgcagagacctaatatttcctagtctagtgttttctcagcacaccccgacccccccgctttttttgttgtttttttccattattgctcgcccttctccaaggagtcttttaagatacattttccatccccacctcccgcctgttttcataaccccagcaggtcctgctgggatgggctggcactgtgagcttcatagaccaagccaggacctccccttctgtccctcttccctcctcccttcccagccagtgcctgggccttgccactacccagggcccatgctcactgccacctgaacgttagggactctgctgctggcgactgctaggcactgaatggtaggatctgtctgggagtaggaagtcatcgtgcttctggccagctgcccaagttgatacttttgggctctcctgggtatagaggtaacaggagctgtgtgcccctggcatagagtgaagctgactgtggcggctgttccctcacgcgtctggtcagttgggaccctcctctggcctgctgctcacagcgtctgcagccgatggtagctgtgtgaaaagtgtgcctaccacccaggaagggccatccctggcaaatagggtgggactgggcaggagttttttctgttacaggatattaagtccctacataatatccttgatttttgcctcttagcccacaaagcataaaaatacttactatctggaccttcacagaaaaagtttttccgagttctgatctggggcttttgggtgactttcttaaggtcactgtgtttaatggcgtcgggaccctaacttcatgttttgattcctgaattcttttatttattcatttcaaaaatttttaccaggtgcctactctgattggtactatgtcagggtccgaggaccctggcaaacaaagacattcctagtccctgtcagtgggagctcatggtacagtgggggaaaggatgttaacagttacgtcatttaaacacaacgtttcaatattatatgtgccacagagagatacagtgatatttgtggggatggtcccgatttagatctggagaggagggaaggcttgtcttggaatatttaaggttggacctgaaggatgagtcaacttaggtagagtcaggtggagaggagtgttccaggcagaggttagtgagtttgagaccactgtgctgggagcaagggggtggtatctggtaaggctggtaggggatgagcctctttccgggactatcttggacctggggagtgtagggctcctttgccttgcattgagaagtagtagttgcaaaactggaggttatcttcgtacgtgttgaggtggtgtctgccatcccctttgcaccattccagagccagatgaagtcagagctggcagcggtggcctcggagtttgggcgactgacacggtttctggctgaagagcaggcagggctggaacggcgtctcagagagatgcatgaagcccagctggggcgtgcgggagccgcggctagtcgccttgcagaacaggccgcccagctcagccgcctgctggcagaggcccaggagcggagccagcaggggggtctccggctgctccaggtgagcaatgtcccctccctgttcccccagcattctgtgttggctgtcaggcagtgcttaccaaacgcctgtccagagctgcctcttttctccctgggaggaacccacagtgattgaacctgaagaccaaaaacatgttttaaagctggaaacagagttaatgtcgaatgtggtatgtgtggcgattatacccagtgaaaagcatgaagattcggttgtaggagaggtttaaatgacagttgaggaaagtctttttgacagtgacatcctgaaaaaggtgagcaagtcgtattgtggaaatgacagtatccctgggctcacagcaggatgaggcgagttaggtatggcgaggcatggggtggttgaaatggatgtgtgttcattgagggccgtgagggtgctgcttctcccttcctgctcaggttcagtctctgactggagatcggggaacgctgtccctgtgcagctgacactctctttatctctttctccctctccctctttttgtttctcttattcccaggacatcaaggagactttcaataggtgtgttcccagtctttgcccttcgtgacccagtggcatctggttccctgtccctgcttctcttcggtatccctctcctctccttccttccccaggacctgagtttccatctcctggaccctcctctccttcccctcagcttttgcttttccctctgggaatatcgtggtcccaccccctgcccggtccccttcctccaggtgtgaagaggtacagctgcagcccccagaggtctggtcccctgacccgtgccaaccccatagccatgacttcctgacagatgccatcgtgaggaaaatgagccggatgttctgtcaggctgcgagaggtagggaggtcacctccacgaccttcctttgcctttcccttcacagacctgagactgggtcctgagggaagttgggccccagggaaactgtggggcttgagatggagcaggatccaggcagccactctgaggttgaggtttcaagccatgagcaggtagacctagtgcaggcaggcctggagggtggggtggggtggagtggcaggaagagccaggctgggggaagacctgtcaggtatcctaggaacaagagtgaggagcaagatgagcctgcaggaatctgaggctggcctctgggatggtgtggggagctggattcagggagaaagggggcccaatctgtggagttggctgctgacaggggaacagccgttccagccctggcgtatttgtcctccctccctcccaagtggacctgacgctggaccctgacacggctcacccggccctgatgctgtcccctgaccgccggggggtccgcctggcagagcgccggcaggaggttgctgaccatcccaagcgcttctcggccgactgctgcgtactgggggcccagggcttccgctccggccggcactactgggaggtagaggtgggcgggcggcggggctgggcggtgggtgctgcccgtgaatcaacccatcataaggaaaaggtgggccctgggggttcctccgtgggcagcggggatgccagctcctcgcgccatcaccatcgccgccgccggctccacctgccccagcagcccctgctccagcgggaagtgtggtgcgtgggcaccaacggcaaacgctatcaggcccagagctccacagaacagacgctgctgagccccagtgagaaaccaaggcgctttggtgtgtacctggactatgaagctgggcgcctgggcttctacaacgcagagactctagcccacgtgcacaccttctcggctgccttcctgggcgagcgtgtctttcctttcttccgggtgctctccaagggcacccgcatcaagctctgcccttgattatcctgccacccgcaggggcccctctgtcagcacttggggggtgggtggtggagggtggcccgtaagtttgagggctcaaaggctcttcccactgcttgttactgtgttgcttcccactcccccttgaccccaggcccctgcttctccctctaggagcctaaagaaccctcctggcctccagctcagccttctctcacctactatgtctgtccaacaggtctgcatgggtccctgataatgagaacagctgcctggtcttctctcccagtctgcctagcccagccctgggactggaatttgagtaggggatgaggggaaattgtaatttcattccttaacttccttttccccacccctgctcttcaacctctttatcagttctgaggctggagggtttgggcaaggcaacatccccattccaattccattttctgatgcagattttagctgagggatttggaagccatttggggaggcaggctgggccaaagggtagagctgggtaataaatgtctattctcctggggaggagggattctaaactttccttccgtcctcaatttctacctccatagaccggccagaatttagcttcacttgagagagatctggaatggtcgccatgattgaaaccacgcaccattacatcatcattacattaattacatcaacataaattatttcttcccccttcccttttccagcactcaaccaaggagcaaagctcatcccaccccacacccctcccaggtctgctcactgccaggctcctctcccctttgttcagtggagctggcttttctcccagcccctttccatgcctttcactccatttggcaagctctgagggggagcctggggacgggtttgggtccccaggaggagagccttgggtataatctatttttctaggagcctcttgccttgtcacttgcagctttcgccctctgctttgatggctgaggtgaactcatgttctttgggaaaagggaaggcgtgctgtggaaataaaatgtttatttgcttctctt

SEQ ID NO: 2952 - DNA, 448 bp, Homo sapiens
agcagccatcagagaagctgccggccccaggatccatgcaggcactgggcagagcagccctaagcatgaggcggacactgtcctgggacacttgctgtgtcctgagagggggccagtgtgtttaagctggggcaggatttagtgtatgttagcactgcagagacctaatatttcctagtctagtgttttctcagcacaccccgacccccccgctttttttgttttttttttccattattgctcgcccttctccaaggagtcttttaagatacattttccatccccacctcccgcctgttttcataaccccagcaggtcctgctgggatgggctggcactgtgagcttcatagaccaagccaggacctccccttctgtccctcttccctcctcccttcccagccagtgcctgggccttgccactacccagggcccatgctcactgccac

SEQ ID NO: 2953 - DNA, 446 bp, Homo sapiens
atatcttaacctaacttactaactgttcagtctacttagagatgtttgccacacgtagttgaaactgaagccagaaatgcctcatcaccattataaattgaggggagtaggaagtggagggtgcatgtgggccttcaatatgctgtagttgcttagcacagaaaattgcaagggtagtggggtctcagccgcatgttgaaccattccatccctgtactgaggtttctattggaaactgtaattgtagtttaatggctcacttctggcctttcacaaggcatctatcctcatgaataaactgtgtttgtgtgtagggggattgagggccaggttatagtagcagttgaaatgtttagtagggccaactttatggttctatttatgaatgcttccagaccaaccaccccaaaacttttgacctgaggaataaattagttttgaattaa

SEQ ID NO: 2954 - DNA, 446 bp, Homo sapiens; identical to SEQ ID NO: 2953

SEQ ID NO: 2955 - DNA, 9615 bp, Homo sapiens
gcagcgggggtcggggcgctgggagcccgttgggccgcgaacgcagccgccacgctggggccgccgagatcgggtgcccgggatgagcctcatccggaaaaagggcttctacaagcaggacgtcaacaagacagcctgggagctgcccaagacctacgtgtccccgacgcacgtcggcagcggggcctatggctccgtgtggtgagacccctgggccgctggggggcggggggcgggcgccaggctctcccctttccgcccagcccgccctgggctggcccctcgccagcgccaccttgaccgcggacctcaaggcccagcgccctccccggggccacccagcggccatctcccttttctcaccgagtggctgagtgaggtctctgggggttgagttgggactgggcctggttctccaggactgtacacttgcaagaccccagagttcatcgggcagatcctcactgttacagacgagtacaccgaggccccaagagggggaggtggctcgccaagttgcagacagagtgagactcccgccctgccgtggatcccgtcgcaatgagacgttgctgcccctggcgctgtgcccctctctcagctcctgcctggcttcctactccctgccctgcgtcccgcggctcccccatattctaggtggtgggcctagtcccctctcagcccagctgcccagtgggaggggtcagggcggtctgggagatacggcccaggaggagagcctcgcctgctgaccggcctgtgcccgacagctcggccatcgacaagcggtcaggggagaaggtggccatcaagaagctgagccgaccctttcagtccgagatcttcgccaagcgcgcctaccgggagctgctgctgctgaagcacatgcagcatgagaacgtaggtggtggctgccccggggagggggtgggggctgccctggggagtcaggggcaggcgcaggcggggcctcccggtatggagagctcgggacagtctcctccctgctcccctgacggtgcctctcgcctcactattgaaaggagggggtgccgagaccttccctgcccactttccaggaagaggtcaaagggtatttttggcagaatgcactttgtgaggtacagactgtgttatcctacagaggaaattggcacaggggaactttgtaattggttccatgtctgagagcttgtggccagctgggactagaatcctagttagcgttgtgtccacgtgaccctgataacaatagcaatatacacatattgagcacttcctatgttctaagagctctgcatacactaacttgtctagtcctcatgatatatgagtactactgcccccatgtcacagacaggaaactaaagcacagcaaggctcacagattagatggttagtcagtagcagagctggggtttcaatctcggcagcgaggctcccggtctgagcacatgaccatcagattgtcttgtctgatagaagcagctgggaaaaccaggggcccagctcagggcctggcagccaggctttgctgcaggatacctagattggagggcagacatttcaaagaatgatttcaaaatgttatgtacattttaagcccatccttctccagcaaacccctcccctatggcctccagccagggtgatcttgcccttggctctgaaccagccctgtggcaggcaaggatggatgtggctggagacccaaggtcaggggcagggagtttgctggctgaaaagctccttctctgttccctcctttttcccttccaccctccccttatgctttcctgctgcctaggtgagttgagagtgggtttgtgttgcttgccctgacaccagacttgacagcaatgagcacacatcattctccccaccttcccttctccccagcctgactctctgtcatgatttattgcaaactccctccaaatccaggggattcctctaggcctctgccctttttactgcttccaagaaggttggagacatgcctcctgctggaggtggtgtattaggaaagggtggatggccctgtgcatggccagggcccaggaggaggtgggaggagaaggtagcgtctgtctagccctcacaggtgacttcttccccaggtcattgggctcctggatgtcttcaccccagcctcctccctgcgcaacttctatgacttgtgagttgggctgcactgggttctggggcatttgcaggccttacatgccgctggggagcaaggtgggggagggtctagggtttctattccgggtgtggcggggagagcctccttccctggcagtcctgtgcctttgcctgtcaagtgtgattctctctggaaagatgcttttagccaaaggcaggcaggaagaggcaggaaggactttgtggggtgcttgcctggcagggggcagtctgcacagctgctttgctttttacccagctttaacaccatgaagacacatctgccagtcctcacagggttagcaccaactcacctttcctggggacacagatgtgagtctggaccttggagctctttctagcatgaagcaaggattaagaagccttggctgcctctggctgatgggggtgtttgacagaatggcagaaaaccagaatatttagctgcaaaatgtatagctttgcctgtgcagtgtctgaatgagactggactatttggacaagatggagaagtcagtgtggcacgtggaggccagcagctggcttggtcaagctgaatctggactgaccctacaggcagcctcaagacctggggactttgagccgggaggtgatatgttcagatgggatttgggggatgcacactggcagcagcaagaaaggagtaggaagcagctcggaggcagagggggagagcctggaggtcagtgttagtgatctaaagtagggatctaaagcagaggtgatgggatgccaagagcagacttgaggccccatttgggaggcagggccgacacaatgttccatctgttggggtgcagtagctgagtgaggtggcagaggtggaggaatgggcaggttcctgcttgaaatacacggtagaggaagaacagatcttgggggaaagataacgaactccattttggacactttacttttaaagaaactgtgaacattccaatgtttaatcacagttgcaaataaatatgaacctcaggagacgaaggtctgggctagggatgtggatttgtgctggaataatcaccgatgggttatagctgacacccgggaacagataattgtagaatgtggtaagatagtattgattcagatatcaacatgaaagagaagatccaagaggatgagcagatggaagaagctgagagggcctgataggaggcagaggagagtcagcaaagaattgagagggagtttcagacttggtgaaaggttagatcagaagaaaagggagtcatggtgtgtttgtcgggtgttcactggtgaccttgagctgagcagtctggcagtaggagggaagcagaaaccaggttaactcaggactgggaggtaaggcagtgggatccaggagtgtggaccgccctttctagaagtttggtggtgagagagggagaaggggtggtcagttgaagaagcaaagtcaagggaatgtggttctagcacagagaggcttcaggaagcatgttgccaagatgaaagaaccagtgcccgagtggaggggaaagacacaggaggggactgggcatggagaggcccccaagggaggtgtgtggtccggcaggagagggctgccaaaatccagagtctcctggagatgcctccagcatgtcctttcaaaaacaacaacaacaacaacaacaaaaaacacaacctattacataattgtttaaggtaacattcattttaaaaaagttttaaatttattatattctagagatagggctgggttgcccagactggagtgcagtggcacaaacacagttcactgcagcctccaactcctaggctcaagccatcctcccgcctcagccccccaagtaggtgggactacagatgcatgccaccatgtccagctttttgttttgttttaatttttatagatatggggtctcactatgttactcatcctgatctcgaattcccggcctcaagtgatcctcccacctcagcctcttgagtagctaagactaaaggtgcatgccaccacacctggctaatttttttttttttttctgaaaggtggggtccaggccgggcatggtggctcacgcctgtaatcccagcactttgggaagccgaggcaggcagatcacctgaggtcaggagttcgagaccagcctggccaacatggcaaaaccccgtctctactaagaatacaaaaattagctgggcgttctggcgtgcacctgtagttgtagctactcagggaagctgaggcaggaaaatcgcttgaacctgggaggtggaggttgcagtgagccaagatcacgccactgcactctagcctgggcgacagagcaagactccatctcaaagaaaaaaagaaaggaagaaagaaagatgggtccctatgttgctcaggctggtcttaaactcttcgcctcaagcgatcgtccagcctccatctcccaaagcactgggattggaggtatgcccctggcctattttataatttttattattttttgtctttgtcctggtctttgcttttactgtaacagttacattttgctggccttatcctgttgtgcaatcccctaagaggctgcaggagcctccccatctccctcttccaccctcctggaaactgttgtattgtttccttcttggaaaggtagacatattgtttgtttgtggagccatctcagctgggcatgaccctctgagggatcaaatatttggacagaagccgaaggaaatactggcagatgtttctaactcctagctgtggctttccctggggtgtggaggagggcaaggagagagtacctttgaagagcgggaacacagttccatgtggctttcctgagcgcgctccaactgcagcgcttactccgagctctgccagctgggcggcccgccacagggagactgggagccaggagcccagaggcccgtgtggtgatctggctggctgaggtggagttgagtttttgcacactggagggtgtctctatgacccctgttctgccctgaggtccctcctctgagctctgacctggggctgggtgggacccggcactgttccaagaacccctcatgccttccagctacctggtgatgcccttcatgcagacggatctgcagaagatcatggggatggagttcagtgaggagaagatccagtacctggtgtatcagatgctcaaaggccttaaggtgggtggggacttggaggctggcagaggggacgccttgctgtctagacctgaggtttggggaggctggagggagcgcactgttacaggtcggccagcctgaagtgcctggtgtggaagctgggccatggactcacccttctctctctcccacatagtacatccactctgctggggtcgtgcacagggtgagtgctttctctgccatggtcctcagaggcccctgtcccatccctgggtatggggttctctggcaatcaaggagtgggaaagttggagggaggggacactgcccaggagcacagaatgtggagttttcacacccagccacggcccaggaaggcctgctcaaaagagtcactgtgtcccaggggacttcatggggaattgctgcagacaaagtgagccctgagctgagtgtttcaggcttcaagaatcaggaacattttagagctgggtgggccctgagagaacacctagtccaaccctcattttacacatgaagaaactgaggcccagaaggggaaggggcctggctgaggtcacacccctgggtggtggtggagctaggacaagctccatctctgcctcagcctagcatgcattctctgtcctccccccaggacctgaagccaggcaacctggctgtgaatgaggactgtgaactgaaggtgagtgggctgcaggctcagcccagaggcgggataggccctcccccagggaagcccctggaagccgctcccagagcctcctcccctcagcaagttccttttctatttatcccctgtgccatagattctggattttgggctggcgcgacatgcagacgccgagatgactggctacgtggtgacccgctggtaccgagcccccgaggtgatcctcagctggatgcactacaaccagacaggtcagtggtcaatgcctgagagggcggtcctggggccatctggtcactcggtgctgactgactgctgggccccagacagtccaggtgacactctccctccctctgcagtggacatctggtctgtgggctgtatcatggcagagatgctgacagggaaaactctgttcaaggggaaagattgtatcctttgctggaaaagccaaactccatctagggattccttccttcaacagacactttatttaaataactgtcttttttttcttaatgtgagagtgatacatactccctgtagaataatttgtaaatgcagataaggctggacgcagtggttcatgcctgtaatcccagcactttgggaggctgaggtggaaggatcctttgagcccaggagtttgagaccagatgtggcaacatagggagaccccatctctaaaaaagttttttaaattagccagacatgggcctggcgcagtggctcatgtctgtaatcccagcactctgggaggctgaggcgggcagatcatgaggtcaggagatcgagaccatcctggctaacaaggggaaaccccgtatctactaaaaatacaaaaaattagccaggcgtggtggcaggcgcctgtagtcccagctactcaggaggctgaggcaggagaatggcgtgaacccaggaggtggagcttgcagtgagctgagatcgcgccactgcactccagcctgggtgacagagcaagactctgtctcaaaaaaaagaaaaagaaaaatcccagctacttgagaggctgaggtgggagggttgagcctgggaggttgaggctgcagtgagctatgattgtgccactgtactccagcctgggtgacagagggagaccctaactcaaaaaaaaaaaaaaaaaaaacaaaatgttgggtgggcatggtggctcacacctataatcccagcactttgggaggccatggcaggcggatcacctgagattaggagttcgagaccagcctggccaacgtggtcaaaccccatctctaccaaaaaatacaaaaattagccgggtgtggttcacgcctgtaatcccagctactcgggaggctgaggcaggaaaatcgcttgaacccaggaggtggaggttgcagtgagccaagactgtgccactgcactccagcctgagtgacagagtgagaccctgtctcaaaaaaaaaaaaaaaaaaaaaatgtagataagcaaaatgatgaaaaattctaccactacgtggaaaatacattttggcacggcacacattaactgagtacctgtgtgtgcagggcaggcctttggtgagaagacgaggaaacagaaaagagtcactgggatgaaggctgagaagtccacatccatttgttgggtagggacccccctcagcctggcacgttggaaagctctccagagccctgagccctgaagaataagcctcctcctgagagcaggaggtggttaggcagggctggagcctggatgatcagttgccatggtgcccgggtgaagtgatggtggggtcgcaggaagggcagtctcagacccaccaggagagcaaggctaagccttaacctgccaccaagacctggaccagctgacccagatcctgaaagtgaccggggtgcctggcacggagtttgtgcagaagctgaacgacaaagcggtgggtggtaaatgggacctaggctggcctgggctgtgtgcttgcctgacgtgggcccagtgggctgcaggcctttgtggaagaaggctcaccagcaccttcccacagcatcctcctaccctggcaggcactcttgtcttaatctcaccgtggaccctgacctgaactttcagccctgctctgaggcttttctgaaatccctgctctacacgctgaggccagagccctaaggggtttgatgcttttctgtcttccaggccaaatcctacatccagtccctgccacagacccccaggaaggatttcactcagctgttcccacgggccagcccccagggtgagtctcagagcccgctccccaggggcctctcagcgtatcccagagggcgggctctcccagcccctggtgtgaggctcttggctctgcccctgcagctgcggacctgctggagaagatgctggagctagacgtggacaagcgcctgacggccgcgcaggccctcacccatcccttctttgaacccttccgggaccctgaggaagagacggaggcccagcagccgtttgatgattccttagaacacgagaaactcacagtggatgaatggaagcgtaagagctggggcctcgggcttcctcgcctccgcctgcagcctctcttccttgcttcctccatctttgtgcctggcctctgccagccctacctgccacctccttcttggtgggcattgtctcctgggtgcttctttctccttgagctgacttcgctctccatgctgtctctgaaggggggtggactttctcgccacagcacctctttacgcaccttaaaccatgctgcctttctcagagcacatctacaaggagattgtgaacttcagccccattgcccggaaggactcacggcgccggagtggcatgaagctgtagggactcatcttgcatggcaccgccggccagacactgcccaaggaccagtatttgtcactaccaaactcagcccttcttggaatacagcctttcaagcagaggacagaagggtccttctccttatgtgggaaatgggcctagtagatgcagaattcaaagatgtcggttgggagaaactagctctgatcctaacaggccacgttaaactgcccatctggagaatcgcctgcaggtggggccctttccttcccgccagagtggggctgagtgggcgctgagccaggccgggggcctatggcagtgatgctgtgttggtttcctagggatgctctaacgaattaccacaaacctggtggattgaaacagcagaacttgattcccttacagttctggaggctggaaatctgggatggaggtgttggcagggctgtggtccctttgaaggctctggggaagaatccttccttggctctttttagcttgtggcggcagtgggcagtccgtggcattccccagcttattgctgcatcactccagtctctgtctcttctgttctctcctcttttaacaacagtcattggatttagggcccaccctaatcctgtgtgatcttatcttgatccttattaattaaacctgcaaatactctagttccaaataaagtcacattctcaggttccaggtggacatgaattccagggggaaatgattcaactcactacagacagctgggagggagggg

SEQ ID NO: 2956 - DNA, 903 bp, Homo sapiens
gagagctgcagctggtgcgattgcattcaggttattttgggtgagtgataagcaatcaagatatgaaacaacagcaggctcggagactgcgagctgcacaggcagaaatgggctcttgcctggcttgatggcaaaccgttctgctccctttgggagatggcacagctctccagagctttgacctgacagtggctagaacctctctgtttttatctgagaaactttggcagaacaaatttccatgtgcacaagctgtcgggcacagtgggtctcaaatttccttgtgcaccaggggacttgttaaaatgcagattcctgggccccaccccagggcttgtgactcagcaggtctgcagttgagaccttagaatgtgcatttgaatgaggacctctcgccctgacccaagcctagtgattctgatggatatcagaccatagttcgagacatttagtggatttcagtcatacttgatttgttgggaggcctaaatcaaaaacctataggaggagactggggggcttcagatggagtttcacactcatcttacaggtgttaaaactgaggctcagaaagcttttttttgtttgtttgtttgagacagggtctggctctgtcacccgggctggagttcagtggcacaattacatcttactgcaacctcagcctcctgggctcaagccatcctcccacctcagcctcctaagtagctgggactacaggtctgtgccacccaggtgcaccaggactgcaggtggctaattaaaacattttttttcttttttgtataggcggggtttctctatgttgcccaggctgatcttgaacttctggactcaagtgatcctcccactttggcctcccaaagtgctgggattataggcatgagccaccctgcaggccca

SEQ ID NO: 2957 - DNA, 2534 bp, Homo sapiens
ctgagcataccactttctttcaggtgaagttataggactgttaggacacaatggagctggtaaaagtacaactattaagatgataactggagacacaaaaccaactgcaggacaggtcagtaaaacgtacaggaatatggtcattagtgctacctacaaagaatattgatggcaataatagactatgtagttgatccataatcacttagtgtgatttatgcattgaataaagaagattgattaaaaatttatatacttaattccaaaaacagtttgtttctgagaagggctacatatcatatatactatgccttttattgagtgaaaaataaagattttaaaaggaaatatatcttccttaaagtcagatatctttgctttattgatttatgcatcccatgaactttgtcgaatttaatgccctcacccagcatgacaccagaaaccactgtcagaataatgacaactcctgcctatgtggttgcagagccatgagtcttcatatttaatgactgtcctctagctatatgctataattaaagattatgtgtgacttgtgtaacaataagagtccattagcgagtaaaacctcataggtctttaagaaggtatataccacagaaactttcctacaattattgaaacatttcttggccctgatgatgtaatgtagtgatagagcagttgagggtattattgcagatacactgaaattcttgaaggacaatggtgattctgggctaatggtaaaagatccaggatttaagacaagagaaatcagatttaatgaaaaaaaaatggataattatctaaattgcaaaacaaaagctagaataatatatgagtaccatttagtggtatgtctaggccaagtttgggtaaaatgatggacagaagccaaaggaccacaacttccaagaggaaatgctattgaccttgaacatgagctcaatgtcagagggagtgtttatgaaggaaggtcgcacagtggcgttcaatgctacagaggtttcctgtccttccatttccactcttgcctcacactgcagcaagaacagtccttaaaaatgcaaatgaggtccgggcacggtggctcctgcctgtaatcccagaactttgggaggctgaggcaggcagatcacctgaggtcaggagttagagaccaatctgaccaacatggagaagcaccatctctaccaaaaatacaaaattagccaggcgtggtggtgaatgcctgtaattccagctcctcgggagactgaggcaggagaattgcttgaacccggccgggaggccaaggttgcggtgagctgagatagcgctattgcactccagcctgggcaacaatagagaaactccatctcaaacaaaaaaacaaacaaacaaacaaacaaacaaaaaaaaacgcaaatgaggtcatgtcaatctcccatgtacaacctctcacttagaattgatccaaaatctttaccatggctgcaaccagcccagcatgatgtggtctgttgaccgcctgctcacattggccttgaggcaccttctcgctgtgggatctttgggtttgatcttcctgtggctagagtgcccttctgttggctcctcatgtgcttggctgtctccttctcatcgcttaaaaatttatctccccaaaatgccttttcctaactacactgtcagctaaattaaatcctccctgttattctttagcatatctatttccttgaaagcacaaggcagaggttataaattgttcacttacgtgtttacttactacttatattttatgtttctttctccaaaatgaaagctcaatgaggcaaggttaactagctctctcctttgtactggggggagacaatatagcatcaaggtcaaggacttggattctgaaggtggatcccagcttcaagtccgagatttaccttgttgtgaccttgtacaagtttcataatccatgcttgtgataattttctgtatgtaaaacatcaatgataaaacaaacacctaacacatacaggggttctgtaaggataggataatgtaattaaaaatatattatatgcttagattctggcacataggaagcactgaggacacattagatgttcttattattgtaaagcatagcctggctaataaaaataataaatgctatcatgtgtatattggttcctacgggctagatacagtgctaaaagttttttgtttatttcttagttcagaatttctcaacctcgatattatggacttgataatgtcattttgctgtggggagctgttctgtgcatagtaggatgtttggcagcacccttggcccctacttactagatgccagtaatactgttttcccaatgcatacacacatgaattgtgacaaccaaatgtgtctccagacattgttaaatatcccctaggaggaggattcccctggctgagaaccactgccttattgcaagataaatcctataattataactatcactggcgaaacagaattctcaacaagtatctattcctttgaatgtttggatcaa

SEQ ID NO: 2958 - DNA, 6112 bp, Homo sapiens
gattggctctctattcattttttctgaggtaagtagttccacttctgtctgagggtcatgaaatgtgtggtcatttgagaaagccatgaatattgcaaaaatatagatagagtcctcagctgtgcaaagtttaaaagtctctgtctttggaaagtcagttctcttgccacgcatggataaggggcatgttctgattcagtaggaagccagctttggtttatgacaagtcaaaggcaactccaggagagtggaagtttagttctcatgataactctcactgctgggaaccctactgggaggccaaagagatgccccttttttgttaagttttggatatgttaggtttgagaaatgtcaagtagccagttagatacatgagtcaggaattcaatgtgtcagggtgtgtggagatgggggttaaagctagatatttgagattgatcagtttataaatggtatgaaaagccatgcgacaataatatgacctacgcggtgagtagagatagaaataaaaagaaggccaatgacatgaccttaaactccaaaatttagagattggaaagcaaatacatgatcttgaactccaaaacttagagttggtgaagaggaggagccagcgaatccatttgagatggagccagggagataagagaacaaaaatggtagccttctgtgtgctggaggctcttctcagacgctcataagggtgtgtgccagatggcaataaagaacatttcaagaaggagggagtgattaaaccatcaaatgctattgtgagttctagaaagatgacaactgaaaagagaccattggctatgactacacgaacgtcattggtgagcttcacaaggtcgattttaatgaaagtgtcaatgcaaaagcacagtaagagtgaacttagtagaaaatgtgaggggaggatgtggtgactgtgagtacaggcaaatatttctaggagatgtggcaaaaagcgtagcagaaaaattcaagaataaatgaatagggagggtagatttttgtctgtgctaagaaggaaaatactatgctgatgttagagaaactcatgctggaaaagagagatagaggttacctcatgagtcaagtccatgaataggtgagaaaaaatagcgtaaagtccacaagtggagggggtgctgtccataaaagcagggacattccacatgcttaatatgaaattataatcagagaatatgaacataggaggcagagagtttagtggctttgctggtagaaagatgagatgattctcttctgactgattctaccttttttaggaaagtaagaggggaagtcattaacttggccaagggggcttgggatttggagaaaaaaagatgtgaaaaactatttcagaacgtaggtcattaggatggacagacagtgccgaagaccctctgccctacttttcagcgaagtcagcaaagtagagagtttctcttattacagcctgcttttaaatgcagtttaggaaaggcagagagttgggttcaatcagggttggacacttggcaggcaaatttgacaaagaaaagaatatgtgagcagtagttctatataaaaaggaattgaagatataatggattctaagctagaaaatgaagttaaggacatgagggtgattatggacagtggaaaaggagttggtgggttagaggttctccaattccaaattatggagtaagaacactagcataaggatgccaaaaaactaaaatgtactggcagaggccaggtgcggtggctcatgcctgtaatcccagcactttgggaggccgaggcaggtgaatcacctgaggtctggagttcgagaccagcctggccaacatggtgaaaccccatctctactaaaaatacaaaaattagcagggcatggtattgggtgcctgtaatccaaactactcgggaagctgaggcaggagaattgcttgaacccaggaggcagaggttgtagtgagccaagatcatgccactgcactccagcctgggcaacagaacaaaactctgtcccataaaaaaaaatatagtatcagcagagagagtagagatctgggagccagaggttcagtttggatgaggtgcaattattgaaagtgggcaactggggcacctaagaaaacaaaatcatttgaaatgatgtcaaggtcgtgcacatcatccaatgtggaaaagtcatcttttctagatggtggatggctgtgatagttagaaatctactgcaaagcgtttaaaattgctcaggaaacttgttggtaaatatagctcaagaaacaaaattgtccttttaccttttatttgcaaaagagtggggaatgttggaaaaatgcacttatatgtatacgtgtgaaactctaggggaagaactttgtcttcagtttgaaaagattgtcataattactctcaaaagtggctgtaagagggcaagagcaatataaagattccagggcccttgggggcataatcgagggaagagcacaaatgaagacagaaatacaggtaaggttaggggagagggtttgtcttaagacagacttggcattgcttcaaaggatcctgccagcaccagcccaggattctcctaacagagcaactcctgctgactcacagtgttacatacaaaggcatcccggcctagagacacactggaagcaaagaagacatactgcacagtccgaaattaacttttacatgatacccaagggagcatcaggtcgaatggttgtaaggccattgaataggcatcagtttatcttaagtgggataaattccatgaataaataaagaaggttcacctgaatacacttactgctcattttacagatttctcctgattccatggattacttaggagcttcagaatctgaaattgtatacctggcactgctaatagtaagaagactttttttttcaacattcttgcatgagggaacacaacttttgtatgttttgagtttctctgaattgcatcaaattaagaaggtttggacattttaggcatttgaagcaacacacacatgcacatgcatgcatgcgtgcacacacacacacacacgatggcttttaacctggacccccccccttttttttttttgagacagagtttcactcttgttgcccagactggagtgcaatggcgctatctcagctcaccacaacctccacctcccgtgttcaagcaattctcctgcctcagcctcccaagtagctgggattacaggcatgcaccaccatgtgtggctaattttgtatttttagtagagatggggtttctccatgttggtcaggatggtctcgaacttccgacctcatgtgatccacctgcctcgtcctcccaaagtgctgggattacaggcgtgagccaacgctcctggccctggactcctatctttacaataattatctgtcatgggtagtactggtttcacttgctactattatatttctgttaggctctctctgaatagcagtgaggctaactttgacagtttcaaagaatattacaggttgtctttcagccttgtaaaaatgaatgctatcaaatcgaatttttatataatcaaactctttaaatcaattccaatattgaaatcattgcatttatagtgatactaattgtgattgtctttctttttccctagccttaccttcattttctcatttttcttttcattctgcgatgcctagaaatgaactgcaggaagaaactaatgagaaaggatcctgtgttcaggttgagaaaatcaaatcgaatttcatgtttcattttgatattcattctttaaggactttttaatgtgctgaattaattaagtaaaagacacttcacaggatggtttttaaagactgtgatatacaaaattcttataacccataatataggaatatatactgagcttacaatctagagagagaaaccatattagcacacacgagacactggaaaattaaggcagaccataattttactatagaggaaagttatgtgtaagaggtggaatctctaaaataatgggtaaatatagataagcattgggaaagttaatccaatccgggaaggaagaatagtttgtgcaataaaaccaaggatgagatgaaggcaccaggagctcctttgtaggcttatgttgggggatgatgaaaaatgaaagtgaggctagatattggaggatcttgaaacagaaaagtataggaaaggttttgcaaattacataatgtgaaaccaagacaccaatgtgtcttgaacacttagccttccatataaaatataaaccaagcttaagtctaatgtttgtggtagcagagaagagtgacaagatgacagccatgttttaggaaaccaacaggcaaccagaatgtcagagcgtggcatgagggagagataaaagaatgagcaggaatcaatggtgggatgatgaaggcaagaacgagtctgtagcagagaggaaagagtgattctgtcacacattcccaagaagtgactgtgctcagtaactaattaggcattggtatggtgattagatatcctggattctctgggacacatccttgattccaaatctttggactcatggctctcacaaagacctcagaattccaaaatatctgttgtcaaaactatagttcctagattcctttcctcatgcaactctgcttcacaatcctttgccagagggtgtataccactttcttctttgaaagaaaactgtcaccatcaacagggaggattaagctttggtaaaaagcgaagatgatataaggatatcattactctactcactgaaggaaactagggtgtttgaaaggcggatggtgcaagtagaagaatagagaggatgttgtgctctgaatgaatctactccaaaaattggaagtatagagaaaattcattaattttgatacaagatttttaacccgaagtttatcattatcacactgttttgatttcagaatttctccaagaagcaacgctatttttccaaacccagaagagcctgaaggagaggaggaagatatccagatggaaagaatgagaacagtgaatgctatggctgtgcgagactttgatgaggtagaactcagaaatgttcttcgtcaactatttttttttctgacagataaagtgagaaactttctaagtttagttttcgaaaaacacttggggttctttcattcttacacatacagcttattacttgacttcagcaggtatgcaaggcccacaaatgtaagagagcaaagaaaacacacacaatgcactttgggaggctgaagtgggaagatcacttagggtcaggtgtttgagaccagcctgggcaacaagtaagatcccatttctacaaaattaaaaataaaaaaattagatgagcctggtggcatgtgcctgtagtcctagctactcagaaggctgaggctggaagctcacttgagcctgagagttcaaggctacagtgagatatacttgcaccattgcaccctagtttgggtgacagagcaagattctgtctcaagaaacacatgcatgtgcatacacacacacagatattgacttgtattgatttatttttcagggttgtggttttgataagtacagctaaacattacaaaacttaagtaagattttgtgttttataaccaaagtgaagcttactgcaagtcactgagagagagcttgtctgcggtgcgtgtgtgtttgtgtgcatgattgtttatgggagtgtgtgtcttatcaaatctgttggttcagtgactgtctctattcctgctctccaaagaacaaatcccaggatatggtgcaaatgccctttccttgcaggaatgtagactgtaagagttcacttgaaaatggcagtttctaggggaagaagtggtttgattcatgattttttataaggaaaggtttggtgacaagagtgtggaacaccctctcagttcaagatgcgaataaagtcccgttgttatttacttgtctttacagacacccgtcatcattgccagctgtctacggaaggaatatgcaggcaaaaagaaaaattgcttttctaaaaggaagaaaaaaattgccacaagaaatgtctctttttgtgttaaaaaaggt

SEQ ID NO: 2959 - DNA, 476 bp, Homo sapiens
agtaaaagacactcaaatcagcaatcttgagttcaatcacggtcatggaattggtagtaaagtctacactacaatggataaccatggaatgtctgccttttaaagtgggcttttaccaccttttccccaaagttaagtgattactgatttgcatttgtgcacttagcacctgtgtgtgtgaagagaagggcatctctgaagtacggcttacatgcatatacatatacgtgacatttgggatagaatctaagaatgaacttattttgcataggtgattttgaaagggagcggtggaggggaacccctgggcttcctggggtactgccctcaggagaatgcgctgtggcccaacctgacagtgaggcagcacctggaggtgtacgctgccgtgaaaggtctcaggaaaggggacgcaatgatcgccatcacacggtacctgggactggggggcactcccctttgctggaggggatgtt

SEQ ID NO: 2960 - DNA, 304 bp, Homo sapiens
ataaagcataccgcctgggcggcgatgaattcgctatggtgctctatgatgtacagtcggaatctgaagtgcagcagatatgttcagcactgacacaaatctttaatctcccgtttgatcttcataatggccatcagaccaccatgacattaagcattggttacgcgatgaccattgagcacgcctctgcggaaaaattacaagagcttgccgatcacaatatgtatcaggccaaacaccagcgtgccgaaaagctggtgagataacaaggatatatcgatatgataaagcacctggtagcacc

SEQ ID NO: 2961 - DNA, 1998 bp, Homo sapiens
gtgaccaggagtcgacgtgtgcagaagtcctggtaatctggtccttgttcccgtctggataccagcttccttcagcagcgcaggcggtggtccctgaggcccgtggaaggagtcaaacttgcgggaattttgcaggttggtgtcactgtaggtgttgactggggatttctagtgtgggggggtttaaggcagagacttgtgggagtgccggtcaggtccgtccctccaccctccacctccaggtctacgggaactgatgacccttgggaaagggactaggggtcctaggagaagaacagggagacctgtggtagtttaaaaataatcatcctctgctatctaagactgctttccggacccccaccctcctcccgaaccccgcctcagtcttaaagatagtttggaaataatctgctttctcactctttgtctgatgggaaaaacgaactgacttgcatgcactgtggagagggggtgaactaggggaaacaaaaggtgggaaactttccatatccgaaaccctaaaggaggaaagctacgtgtgtcagtctctggcgctggtcggcccaccaagcgctcgccccacccccaccgtcccctcccgtttccagtttatctgcagggctgttgtttccagcaagacccaaagctagaaaaggaggaggaagaaactgacccgatcagtgccaggtaggtgagaggaatattataaagtctcctggggtggagacaaaggttgtaagcgccaccgttcctgccggctcccttccaccccacccctttcccctcttcttttctctcccccttctcctttcccctcttcctctgcctgccagccacctttctcttttctggcctggtccctgtgttaggccctatgggggaaaaaggtctggggagggctggacggcggaaaggagggccttggaaaaggttagagggaaggacaagagagaagtgaggaggtggaaagtggaggtaaaaggagtggggatagtgaagctctgattgctgactgggcttcttaggtggaagatattttataacagctctgaataaaaaaaattaaatgctaaggcctctgtccacagcacctgtccactcaccaagtctttaacttactgtcttctttttgctttctagaagtcattgtattcaaagaagaataagcaagaaagaaaagaaggaaggaagagaggtagacagatacaagatgaaatcctgtcaaaaaatggaaggaaaaccagaaaatgagagtgaaccaaagcatgaggaagagccaaagcctgaggaaaagccagaagaggaggagaagctagaggaggaggccaaagcaaaaggaacttttagagaaaggctgattcaatctctccaggagtttaaagaagatatacacaacaggcatttaagcaatgaagatatgtttagagaagtggatgaaatagatgagataaggagagtcagaaacaaacttatagtgatgcgttggaaggttaatcgaaaccatccttacccctatttaatgtagtttaccttgatttttatctgatattaacaataccatatagcttgctttttattagcatttcctgatattcctttgtccatatttctacttataacctgttgctattaatggttttagatgtatctcttgttatctgcatctcattgtttattgtattttgaaccaatctacaagtctctgtcttttaataaaagaactttacacatttgtaaaaaagaggttcttggtaagatataaaatggaaaaaggctaagtaatatgtgaatatcatatttttgaaaggtaaaaagtacatttgtatattacatatatggacataacttgtgaaggatgaaagaaagtacagcctctcggtggtgggattatgaatgatttttctccttttgcttgtttgtattttctatattcctaaaattaacacacattattattgctagaataataaaagttttataaaaaagaagcaacaa

SEQ ID NO: 2962 - DNA, 273 bp, Homo sapiens
acattgggaggccaaggcgggcagatgacgaggtcaggagatcaagaccatcctggctaacatggtgaaagcccgtctctactaaaaatacaaaaaattagccgggcatggtggcaggcgcctgtagtcccagctactcgggaggctgaggcaggagaatggtgtgaacccaggaggcagagcttgcagtgagccgagatcgcaccactgcactccagcctgggtgacagagcaagactccgtctcaaaaaaaaaaaaaaaaggaactgtgag

SEQ ID NO: 2963 - DNA, 5217 bp, Homo sapiens
tgcttaaatgcagccatcgacatttacacagacatggtaagacattgcattgcttgagtggctgtggggtggagtcttgagatggcttagagttctatctttcttttttatgttcccaaactggcattcagataggtaaaatcggtgtgtgactgtttcttgttttttcccctagggaaggtttacaattgcagccaagcaccacattactattgcagagatctatgagactgaacttgtagacattgagaaggtaagcagtgggcacacttcctcagatgtgaagcaggcagataagctgactcaaagaactctcctctcctcagtctgagagtgatcgtaggtgtagagtggtcatagatggccttgcctggagactttctggcaaagtctactagctggctaagtagatgggctgttttcctggagtggacatctaagacatgagagctgattaagatttacagagatcacctgttgtttccactctctctgattcatgtcagaacattagcattgccaaaagaaccttcagctgtattgcttagtactctaaggcccagtgaagaaagtgtaagaggtcacctctgtacactcagtcagcatcacagctttaagtatctgtgtgccagtgactcagaaatctgactgcagcctagacctctctccaaatgctagattactgtatccacctgcctgctgacctctccactttgtccagcagtcatctctaacccaacatgtctgggactggattctcagatgtccccaacccagtgttccccgctaaactacaggcttccttgccttttctctttctctacaacctgtgagcaatttttgtgagcggtgtccttcctgctcccaagtcttggcacaactcactaccttgtctctcagctcacacttgatcgctgcaggatccttcaaaccggtctccctgcttttgctctccctaccttgccaaccccacatccccatgccacagagtagccagagtgagccttctaagcattgcatcatactctgtttctctactgctgacagtcattagacccctttcactaagaggaacagctggagctgtgcagagccttcatgggtccactgaattgcttcctcccagccccacactccccatgcatctgtgtggcctggcctctcctcttttctgttattctcctcctcttgcataccctgcatggccatcctggcctccttgctgttccgcacacatgccagatgagcgctcctgcctcaggacctttgtatccacgatttcctctgtctgcaaagctcttccccagatgtccacgtggctgactcctcacatctttcaagtccacatggctaacttccccgtgcccttccatttttgctcatttattacctatttccatgattaactattatgaccccctagttaatttagccccccaggaagacatagtagatccccacacacctcacttaacttcttgtattgctgagcagatgtctccttacaatatgccctctcatatgcttgctcatcattctcattttggttgtctctctccctccgccagattgggcacacgtgtcagcagagagctttgtctctgctttgctgatgtgtcccaagagcccagaactctgggacctagtggggtctaaatatttgctaaataaacaaatgctacccctacctccaccataccaaatggagtcttcctggtctggggaaggatctgctaggcgttactgaaattggactggcattgttaacgttcactcttttgactgtgtgacctccacctgttggttattcagcacaaaatttgctcatatttgttacataaaatttattatttgaccttttttttttataattgccatacttttctgaggatactccctgatcttgatcaagtcagggccaccctgtgcattgacgtgtgtgtgagccttctctttggaaggttatctgtggatcctggaggcaggtgatggagctggatctgaacctcctttgttccctggtgtggaattgatgatggaatgggagggagatggatctggtgtggctggggtatttatttggtcagggtgtctgggatggccacagtatctttatttaggtttgagtgagtcttgcggggatgagcactgtgcgcagagcatctttgccagcagaggctcctgttccagcttcctctttcacagtggtcagaagggcactctggggcaggagcctgcagtgctgtgtcatttctgctgcccaggcatggtctccaacacatgggtctccataaacttgagagcagataaaatgaaatgtgacatactctttttttctcttgaaaaaaaaaaggccaggtacagtggctgatgcctataatcctaccactttgggaggccaaggcaggaggatcacttgagcccaggagttcaagaccagcctgggcaacatgagaaatccccatctctactaaaaatataaaaaaaaaaactatccaggaatggtggcgtgtgcctcattctgttccacaggctggacaggttggagtggcatgaacacagctcactgtagcctcagcctcctgggctcaagcgatcctcccacctcagccttccaagtagctgagactacaggcatgtgccaccatgcccggctaattttttaatttttcatacaaatgaggtcttttcatgttgcccaggctggtctcaaactcctggactcaagcagtcctcccatcttggcctcccaaatgctgagattacagtcatggaccatcatgcctgaccttcacggaatactgaattttaaaatgcagctataaaagaacaggtgtactatggttctctttttgcaaatacttagtcacacacagaaatagtctggaagaaaatatttctctggaagaaaatatttctttggaacacctgtcagagctgtcatgtacacacatgtgagattacctgatgaaggtacatctcctccctctaaaatgtgggctctgtgagggcagggcccatgactgttccgctcaccatcacagccctgagcctagcatgatgcctatttacaaagtgggtgctcagtaacagatgctaagtgaatgaagacaaagtgcatcacaaatgaaagctgcctatagttccatggcctgttttgttttatttgttttcttgtccctgcaaatctcttctaactcactaggagctgccttgaagccacttaactaatgggcttgggcagaaaggcagcacctttaatctgattttcagagactgctagctccctcatttgcatttgctgtgaaacctttgtcattcaagcatcctgcaaacccaccacctgcttctgtatgtttgcatgctaaaaatggtttttacggtttttaatccttgagagaaaaaagcattttgcgacgtgtaaaaattatatgaaattagaaatttcattgttcataaatatagttttattggaacacaaccacacttattcatttatatcttgtgtatggctgcttttatgctaccacaagagagctgagtagttgcaacaaagatgcacaaaacctaaaatatttcttgtctgacctgttagagaaaaactttggctagagccctggtttaaagagctgctcatacttatctcttgttatttggggtatagaaggttttttcaatcttatgagagctttatttctaaggctgtctaccaccgtctacaaaccagctgattctttgcagagttcagctcttacaaaactgtgctaaaaacagcagcacacactatcatctgactcttctcagccattttgcttagttttggactccggtagacacttatttttttgtttgtttgtttgtttgagacagagtttcactcttgtcacccaggctggagtgcaatggcgcgatctcagctcactgcaacctctgcctccccggttcaagcagttctcctgtctcagcctcccaagtagctgggattacgggtgcccacaccacgcccggctaatttttgtatctttttagtagagacagggtttcaccatgttggccaggctagtcctgaactcctcaggtattccaccctcctcggcctccaaaagtgctgggattacaggcatgagccaccgcacctggccgacaccagttcttttttctgagttgtcacgtgcttgatttcactaacttctaccacagcatgacaaggacttctagctttctggcctgtgatctctgtttcttctccacttgatgccatatattttagattgacggcaacacccttattctaggtgacacttaaggtattagtgtgtgtagtctgtgctgcaagtcatagacgtaaggtgtaattagggcttcatagctctctaacaatccagtgtggctgctaagggtttgacagtggtagagacactggggttggaggtaccttgtgtcctttgtaattacttaggaacctgcctgacagttctgccattttggtgtctagcttacagtgtcactctggacttggtcatagccctcctagctcatgggaagtggaaggcctggaggaggatgcaaagtgagatatatggcccaagcctgggagtggcccccaacatgtctgtttacattccactggagagaactagtcataggctgcccctcactatggaggaagctgaggaagtggtgtagctgggcatatgccatgtggggagggggaaacagattttgatggtcagcaagcattctgcttccagaggtgcatgctttcttgtatttcctaaagaaagtaggccgagttgtgaaaagtttgctggtagagtaggtttatttatggaaaaatacctatgcaaatgtagttttaaaatgcagctctccaaataaattgtgtgtgaataaaatatgtatgttttcaggctattgcacattatgaacaatctgctgattattacaaaggagaagaatccaacaggcaagtattacttttcttaatatgatttaatgggttttattatgtgtgataaaaaaatacttctttatactttgtgagtgtatttgactataccaaatgaagatgtactgaggcccagtgcacatcttttatttttccattgacttgttactcactctgctttggttcttgatttcagctcagcaaacaagtgtctgctgaaggtggcagcatatgctgcccagcttgagcagtaccagaaagccattgag

SEQ ID NO: 2964 - DNA, 5217 bp, Homo sapiens; identical to SEQ ID NO: 2963

SEQ ID NO: 2965 - DNA, 6250 bp, Homo sapiens
gaggaaacacaagaatagaagaggcttgtgaaatgtataccagagctgcaaatatgttcaagatggctaaaaattggagtggtatgtacaaagtttttgtttgctttttaggcaaatggtttaaaatcactttgaagggagaaatgactgttttccccttgaagagcaagactattggccccagagacagatgtcagtgctgaataactgatgtggctgctactgacatatggagactaaaggggtgtgctctaagtgaatgaagctggaaagcctggcttaagtttaagcacagggacagtgtctgtcttagtttctataaacttcttaatacagtaggcatgtggtaacttaaaatagttaaaattacttggaattagagtaatctttgcttcttactaatatgttcaaataaacacagtgccataaggaatgaaagttggaataaaagtcattaaaactagtgggataaagagaattttctttacctgaacattggttgagaatgaccattccctgctacgcaataactgattgtgattccactgagaactgaaagtggggtttggggggagggggatggatttacattaacctcaatagactcttggttattttttaaagtaatgctttctacccagtgagaccgggcataacaaaattcacaggattattattttcattggtctgagatgggatggctctttgagagaaattcatccctctcccttcagcgaaagagatctttcatgccttagtgatgggatatttctgtagtgaaaatggagaccaccgttgaccagagcaggggacgtgggtgttgtgctctggctcacagctgctgtgggattggaagtgggactcgccctctacaagctgtttcaaggcagacactttaaaatcatttcaaaggagaaaatgcttttgagctagatgattctaaaaggtctcttctggctttaaagatctttgtaagaagtttagttttagctaaggctttagatatgctatttttcaaaacacacctacgcctgaattatattgtatttttaaaatggtggagaaaacagtttgtttcacattccctcttttattttgttcaggtcttataagtaaaaagtgatcttacctgaagagatcacttacttacttatttatttacttacttaatttgtttatttatttatttattcgagacagagtctcactctgcagcccaagctagagtgcagtggtacaatcttgactgactgcaatctctgcctctggggctcaagcgattcttatgcctcagcctccctcgtagctgggactacaggcacgcgccaccacgcccagctaattgtttgtattttagtagagacggggtttcaccatgttgcccagggtggtctggaactcctgagctcaggcgatccacccacctcggcctcccaaagtgctgggattataggcatgaaccactgtgcccggctgagaccacttattacttattgtatctggtgatgaggtattctaacctttggaaattccatttcagagaggccactgatcatgtatgtaactaaggaggctttgtatgtgcaccccgcgtcatctgttgcctggggtgatgctctagcctcctgacattgtcatactgctgcacttttccagtctgtttccatttatgtctgaggttgcaattttttgaattttggaaatcagaccttggcgatgaccttgagcagtaggataggatataaataactcccacgtgcctagcgttccagtgaaggaacactaggcataaatgtgttaatgaagtaacgtaacacaagttaagtaaggtcatatcattccaaataagagctgacgtctctgtagtggccctcaaagactatccccttccttgtgcacccagctcccacttcagagcctttgcatgtactgttccctctgtctccctactctttccccaaacagaatgttgctgggtccctgcttccttcagctccctcttcacatgtcaacttattggtgaggtcttctctggccaccccttttaaaaataacaatcttgtccttcctggaaacttttttttttttctttctccaacactgttatcaccatctagcaaaaataaattacataatgttttattcatttatatttacatgtttttattatatggtgattctcattagaaagtaaaccttggaaggccatgtttgtgtgtttttatctctgctgtatctccaggccctggattattacctgcaaagtcataggtgctcagtatatttgttgagtggatgaatattagactccttgaagttctatccatgttgcattggtgatgatcataacagcattgcatctctttatagttttaaaagttctttcataatgactaagctaatttgtttgatactcagcttttgagagatcatcctcacaggtattataccagttttgcgggtgaggaaatttagcctaagttgtgtggcttcccagagaccatttaatttaatatatgatcctttaaagacagttccaagttccccctccacctccgagaatggagtcttgctctgttgtccaggctagaatgcagtggtgcgatctcagctcactgcaacctccgcctcccgagtttaagcgattctcctgcctcagcctccggagtagctgggattacaggcatgtgccaccacgcccagctaattttgtatttttagtagagatggggtttctccatgttggccaggctggtcttgaactcctgaccacgaggagtgcctgatccaccctaagtgctgggattacaggcatgagccactgtgcccggcccaacacttccaagtttagatagaccgagctagcatttgctgtcagtgattggaatgaatagtcagagtgaaaaagtaagccagcaactcgttttggaatgtgggaatgtgaaaatgtaaaattaaagcgcttactgttgtctggagaaatggaggtagcccagaagagcctgggtgttgtggtattactgagcaagaaaaggatggcccatgactgattctgagacaggaaacatagataagttatcaaaaatgaaatgccagcaggagagcaaggatgtagattgtaaaaaaaagatggcatttcaatatgccaaaccacagatatgatctaaggctagatttgcatgtaataatgaaagtggccaccgtgtgtaatgtgagtcaggcccttctaagcactttacttgcgaagtccaagctattactacgttcttctgaggcagagcccattaaagctcccacttagccagatatgttcctgagttgccacttcatggttaagtgctgccccaagtaccccaggtgcctggccactgtcctggcagtggcctttgccccttctggatacccaccagcctctcatgattcacaaggggccagcagggcttcttcagttccagctctagccctgaggctggcatgtactctgattgttcagtgccttggtttcttcctgcggctataacaaaataccttagtgtaatttataaagaaaatgaacgtattgttcagagttctggaggctgggtcgtttaagatcaaggtgccagcagatcccgtatttggtgaggactgttctcaccttccacgatggcgccttcttgctatgtcctcacgtggtggaaggaacaaggcagttctcttcaacctcttttataagggcactcatcccatttatgagggtggtgctctcatgactttatcactcccccaaaggccccacctcttaatactgtcaaattggatatcaggctccagtaatacaaattttggggggatactgccattcagatcatagcactacccatgtcatgctggtggttacatatttttcaaagatgcctgggtactctttttaatcagaaactgtggtacagagcaagaattgaacctgggcaggtgggctccagagtttgtactgtccctttgccctcaggttcagaaacccacatgagaactgtgcatttcctctggggagagggagttggaacaagagatgcagctgaagctttagcagaattggatgtttacggccaggtataatcatctgtaatcccagcactttgggaggccgaggctggaggattgcttgagcccagaagttcaaaaccagcctgggcaacatagcacctgtctctacaaaaaaaaaaaaaaaaaaaaaaaattttttttttgagacaagagtcttgctctgtcacccaggctggagtgcagtgacacagtctcggctcactgcaacctccgcctcccggattcaagcaattgtcctacctcagcctcccaagtagctgggattataggcacctgccacaatgcccagctaattttttgtatttttagtagagacagggtttcgctatgttcaggccaggctggtctcgaactcctgacctcaggtaatccacctgccttggcctcccaaagtgctgggattataggcttgagccaccaaacccagccaaaaaaattttttaaagaattaaaaataaaaaatagccaggtgtggtggcacatgcagctactcaggaggctgaggcaggaggatctcttgatcctgggaggtggaggttgcagtgagctgtgatcacgccactgcactgcagcctgggtgacagattgagaccctgtcttgaaaaaaagaaaagaattggattttttttcctcacaaaaaaaatttatagcaaatgtttaatatcagcagtgagtactgctttatgataatttttttagaaacctaaaggctttgtgatattcttaaccatgcttttcctggtagatcagattctttcctctccatttctgctgtactgacttccccaatgtgactcatttttcagaggcactctgctgtgttgctttctctgaactcaggaagtttcgcatgttgatgtttaaaccctctgggaagtggcctgatgcagcctcagccttgatttccactggcctcctccagtcagggcaggcttgtcactggcctccacttccagccctttcttaccttcaagcatttcttctgtgttcctgtgactcctctgctagcgattccttccctctttcttttccagcactccagaatccatggtccctgatccaaaaccttttctgaaaaagattagttcatgtaccttatatgttgtactgtgtcccagttggagacctgggtggtaccccacaaccagatccatcagtgattctgcagggaaatttgtaaattctcacactaaatggggtaaaatagattaaacctcatataaatttcagtcagattttgctataaagtaaagaaaaaaatttggatttttagacttttctggatttcaaaattgtgggcctgattttcactttttaggaaacttactttatccatgaagccttcattagcagtttcttccacaccgacagctaagtgtaggagacactaagatagaaaagtgagcaaatatctttgcgctcagtgttttacctttctttaatcatttgtggcttgaagcccttagctgatgtttattatatgttagtggaattgaattgagtagcccaagacttggctactggtattgaatggacagatcagggaatagtggcttagtgcccagggacacttggaaagtctgctggagctgaggtggagaagctttcatcgctgtttgacttgattctggttatttttatatttgcccgaggtgcactggaccacatggatttttgcttctgactagaatgcttcttttcagtggaatataatttttctagggaggtccagtgcttacagcatgggctgctctgggggggacttgttcctctgtgtttaattgtagtgtcttcttcagctgcaggaaacgcattttgtcaggcagccaagctccacatgcagcttcagagcaaacatgactctgctaccagctttgtggatgctggaaatgcttacaaaaaggcagatccccaaggtaagacagccaggcatgtagcatgctatctctgtgtgtaactaaccagtcagtacttccctcaacgttaaggtcagtgttggtgtgctttcaagtcctggtaaaaaggaatttttgtattttggaataatagagaattttgataaccttagggatttttcttttttaatcatttgggggcttttatgaggagaaattatgttaaatttatactggctgtttactttatagcatcatttaattaaact

SEQ ID NO: 2966 - DNA, 714 bp, Homo sapiens
gatcagcttgtcaatctctgcaaagtagccagcttggattttgatagggattgtatggaatgtgcataccaatttggagtggttttagggttttctagagaaacagaaccaataagaggtgtaggggtgtatgtgtgtgtgtttgtgtgtgtgtgagtgtgtatgtgtgtttagagagagaaattactggagggaattgattcgcttgattatataggctgagaaggcctaagatctgcattctgaagacccaggagagccaatggtatagctccagtccaaatccaaaggcctcagaaccaggagagttgatgatgtaatttctaatctgagtccaagtctgaatcaggagaataccagtgtcctggctctaagacaggcattgagaatgaattcttccttttaaccttttattttattcaggttttcagtagattggatgaggcccacccacattggggagggcaatctgcttattcatcctactgatgcaaacgttaatctcattcagaaacaccccacagacacactcagaataacaccaaatatctgggcaccctgtagcccactcaaggtgacacataaaatcagtcatcacagagagtattgccatcttaacaatactaagtctgacagtcgatgaatacaggttccttttatatttatttggatcttctttcattttgctcaacaatgttttgtagtttttggtgt

SEQ ID NO: 2967 - DNA, 714 bp, Homo sapiens; identical to SEQ ID NO: 2966

SEQ ID NO: 2968 - DNA, 6251 bp, Homo sapiens
gaggaaacacaagaatagaagaggcttgtgaaatgtataccagagctgcaaatatgttcaagatggctaaaaattggagtggtatgtacaaagtttttgtttgctttttaggcaaatggtttaaaatcactttgaagggagaaatgactgttttccccttgaagagcaagactattggccccagagacagatgtcagtgctgaataactgatgtggctgctactgacatatggagactaaaggggtgtgctctaagtgaatgaagctggaaagcctggcttaagtttaagcacagggacagtgtctgtcttagtttctataaacttcttaatacagtaggcatgtggtaacttaaaatagttaaaattacttggaattagagtaatctttgcttcttactaatatgttcaaataaacacagtgccataaggaatgaaagttggaataaaagtcattaaaactagtgggataaagagaattttctttacctgaacattggttgagaatgaccattccctgctacgcaataactgattgtgattccactgagaactgaaagtggggtttggggggagggggatggatttacattaacctcaatagactcttggttattttttaaagtaatgctttctacccagtgagaccgggcataacaaaattcacaggattattattttcattggtctgagatgggatggctctttgagagaaattcatccctctcccttcagcgaaagagatctttcatgccttagtgatgggatatttctgtagtgaaaatggagaccaccgttgaccagagcaggggacgtgggtgttgtgctctggctcacagctgctgtgggattggaagtgggactcgccctctacaagctgtttcaaggcagacactttaaaatcatttcaaaggagaaaatgcttttgagctagatgattctaaaaggtctcttctggctttaaagatctttgtaagaagtttagttttagctaaggctttagatatgctatttttcaaaacacacctacgcctgaattatattgtatttttaaaatggtggagaaaacagtttgtttcacattccctcttttattttgttcaggtcttataagtaaaaagtgatcttacctgaagagatcacttacttacttatttatttacttacttaatttggttatttatttatttattcgagacagagtctcactctgcagcccaagctagagtgcagtggtacaatcttgactgactgcaatctctgcctctggggctcaagcgattcttatgcctcagcctccctcgtagctgggactacaggcacgcgccaccacgcccagctaattgtttgtattttagtagagacggggtttcaccatgttgcccagggtggtctggaactcctgagctcaggcagatccacccactcggccttcccaaagtgctgggattataggcatgaaccactgtgcccggctgagaccacttattacttattgtatctggtgatgaggtattctaacctttggaaattccatttcagagaggccactgatcatgtatgtaactaaggaggctttgtatgtgcaccccgcgtcatctgttgcctggggtgatgctctagcctcctgacattgtcatactgctgcacttttccagtctgtttccatttatgtctgaggttgcaattttttgaattttggaaatcagaccttggcgatgaccttgagcagtaggataggatataaataactcccacgtgcctagcgttccagtgaaggaacactaggcataaatgtgttaatgaagtaacgtaacacaagttaagtaaggtcatatcattccaaataagagctgacgtctctgtagtggccctcaaagactatccccttccttgtgcacccagctcccacttcagagcctttgcatgtactgttccctctgtctccctactctttccccaaacagaatgttgctgggtccctgcttccttcagctccctcttcacatgtcaacttattggtgaggtcttctctggccaccccttttaaaaataacaatcttgtccttcctggaaacttttttttttttctttctccaacactgttatcaccatctagcaaaaataaattacataatgttttattcatttatatttacatgtttttattatatggtgattctcattagaaagtaaaccttggaaggccatgtttgtgtgtttttatctctgctgtatctccaggccctggattattacctgcaaagtcataggtgctcagtatatttgttgagtggatgaatattagactccttgaagttctatccatgttgcattggtgatgatcataacagcattgcatctctttatagttttaaaagttctttcataatgactaagctaatttgtttgatactcagcttttgagagatcatcctcacaggtattataccagttttgcgggtgaggaaatttagcctaagttgtgtggcttcccagagaccatttaatttaatatatgatcctttaaagacagttccaagttccccctccacctccgagaatggagtcttgctctgttgtccaggctagaatgcagtggtgcgatctcagctcactgcaacctccgcctcccgagtttaagcgattctcctgcctcagcctccggagtagctgggattacaggcatgtgccaccacgcccagctaattttgtatttttagtagagatggggtttctccatgttggccaggctggtcttgaactcctgaccacgaggagtgcctgatccaccctaagtgctgggattacaggcatgagccactgtgcccggcccaacacttccaagtttagatagaccgagctagcatttgctgtcagtgattggaatgaatagtcagagtgaaaaagtaagccagcaactcgttttggaatgtgggaatgtgaaaatgtaaaattaaagcgcttactgttgtctggagaaatggaggtagcccagaagagcctgggtgttgtggtattactgagcaagaaaaggatggcccatgactgattctgagacaggaaacatagataagttatcaaaaatgaaatgccagcaggagagcaaggatgtagattgtaaaaaaaagatggcatttcaatatgccaaaccacagatatgatctaaggctagatttgcatgtaataatgaaagtggccaccgtgtgtaatgtgagtcaggcccttctaagcactttacttgcgaagtccaagctattactacgttcttctgaggcagagcccattaaagctcccacttagccagatatgttcctgagttgccacttcatggttaagtgctgccccaagtaccccaggtgcctggccactgtcctggcagtggcctttgccccttctggatacccaccagcctctcatgattcacaaggggccagcagggcttcttcagttccagctctagccctgaggctggcatgtactctgattgttcagtgccttggtttcttcctgcggctataacaaaataccttagtgtaatttataaagaaaatgaacgtattgttcagagttctggaggctgggtcgtttaagatcaaggtgccagcagatcccgtatttggtgaggactgttctcaccttccacgatggcgccttcttgctatgtcctcacgtggtggaaggaacaaggcagttctcttcaacctcttttataagggcactcatcccatttatgagggtggtgctctcatgactttatcactcccccaaaggccccacctcttaatactgtcaaattggatatcaggctccagtaatacaaattttggggggatactgccattcagatcatagcactacccatgtcatgctggtggttacatatttttcaaagatgcctgggtactctttttaatcagaaactgtggtacagagcaagaattgaacctgggcaggtgggctccagagtttgtactgtccctttgccctcaggttcagaaacccacatgagaactgtgcatttcctctggggagagggagttggaacaagagatgcagctgaagctttagcagaattggatgtttacggccaggtataatcatctgtaatcccagcactttgggaggccgaggctggaggattgcttgagcccagaagttcaaaaccagcctgggcaacatagcacctgtctctacaaaaaaaaaaaaaaaaaaaaaaaattttttttttgagacaagagtcttgctctgtcacccaggctggagtgcagtgacacagtctcggctcactgcaacctacgcctccgggattcaagcaattgtcctacctcagcctcccaagtagctgggattataggcacctgccacaatgcccagctaattttttgtatttttagtagagacagggtttcgctatgttcaggccaggctggtctcgaactcctgacctcaggtaatccacctgccttggcctcccaaagtgctgggattataggcttgagccaccaaacccagccaaaaaaattttttaaagaattaaaaataaaaaatagccaggtgtggtggcacatgcagctactcaggaggctgaggcaggaggatctcttgatcctgggaggtggaggttgcagtgagctgtgatcacgccactgcactgcagcctgggtgacagattgagaccctgtcttgaaaaaaagaaaagaattggattttttttcctcacaaaaaaaatttatagcaaatgtttaatatcagcagtgagtactgctttatgataatttttttagaaacctaaaggctttgtgatattcttaaccatgcttttcctggtagatcagattctttcctctccatttctgctgtactgacttccccaatgtgactcatttttcagaggcactctgctgtgttgctttctctgaactcaggaagtttcgcatgttgatgtttaaaccctctgggaagtggcctgatgcagcctcagccttgatttccactggcctcctccagtcagggcaggcttgtcactggcctccacttccagccctttcttaccttcaagcatttcttctgtgttcctgtgactcctctgctagcgattccttccctctttcttttccagcactccagaatccatggtccctgatccaaaaccttttctgaaaaagattagttcatgtaccttatatgttgtactgtgtcccagttggagacctgggtggtaccccacaaccagatccatcagtgattctgcagggaaatttgtaaattctcacactaaatggggtaaaatagattaaacctcatataaatttcagtcagattttgctataaagtaaagaaaaaaatttggatttttagacttttctggatttcaaaattgtgggcctgattttcactttttaggaaacttactttatccatgaagccttcattagcagtttcttccacaccgacagctaagtgtaggagacactaagatagaaaagtgagcaaatatctttgcgctcagtgttttacctttctttaatcatttgtggcttgaagcccttagctgatgtttattatatgttagtggaattgaattgagtagcccaagacttggctactggtattgaatggacagatcagggaatagtggcttagtgcccagggacacttggaaagtctgctggagctgaggtggagaagctttcatcgctgtttgacttgattctggttatttttatatttgcccgaggtgcactggaccacatggatttttgcttctgactagaatgcttcttttcagtggaatataatttttctagggaggtccagtgcttacagcatgggctgctctgggggggacttgttcctctgtgtttaattgtagtgtcttcttcagctgcaggaaacgcattttgtcaggcagccaagctccacatgcagcttcagagcaaacatgactctgctaccagctttgtggatgctggaaatgcttacaaaaaggcagatccccaaggtaagacagccaggcatgtagcatgctatctctgtgtgtaactaaccagtcagtacttccctcaacgttaaggtcagtgttggtgtgctttcaagtcctggtaaaaaggaatttttgtattttggaataatagagaattttgataaccttagggatttttcttttttaatcatttgggggcttttatgaggagaaattatgttaaatttatactggctgtttactttatagcatcatttaattaaact

SEQ ID NO: 2969 - DNA, 696 bp, Homo sapiens
gataccgccgatgagtttgatgatgaagatgatgaccccaatgatggtggagctgtggtcaatgacatgagccatgacaatcattgtcactcccaagaggagatgagcccaggcatgtctgtgaaggacttttctaagcataacaggacccggtgcatttcaaggactgaaataaggagggccgacagcatgacttctgaagaccaagaacctgagcgggactatgagaacgagtctgagtcttcggagcccaaactgggcgaggaatccatggaaggggatgagcacattcacagcgaagtgagtgaaaaagtcctgatgaatagtgagaggcctgatgagaaccacagtgagccctctcaccaggacgtcatcaaggtgaaggaagaatttacagaccccacttacgacatgttttacatgagccagtatggactgtacaatggtgggggtgccagcatggccgccttgcatgagagctttacatcgtctctgaattatggcagccctcaaaagttctccccagaaggtgacctatgttctagcccagaccccaaaatctgttatgtgtgcaagaagagtttcaaaagctcctacagtgtgaaacttcactacaggaacgttcacttgaaagagatgcacgtctgcacagtggctggttgcaatgctgcattcccctctcgccgaagccgagac

SEQ ID NO: 2970 - DNA, 241 bp, Homo sapiens
cctccgaagtcgtaatcgccacagtgcaaaccccaatcctcgccttcacatgcctatgctaaggaataaccgagataaagatttaattcgggccacctcaggagctgccacccctgtcatagcaagtacaaaatcaaatctggcactcacaagccctggccgacccccaatgggttttaccactccccctctagaccctgtcttgcaaaatcctctccctagccagctagtattttctggg

SEQ ID NO: 2971 - DNA, 246 bp, Homo sapiens
cgggtgcagtagaatctatctactccatcctggcgctgcgcgatcaggctgttccgccaaccatcaacctggataacccggatgaaggttgcgatctggatttcgtaccgcacgaagcgcgtcaggttagcggaatggaatacactctgtgtaactccttcggcttcggtggcactaatggttctttgatctttaaaaagatctaagttgtcattttccacccttataaaaggtccgcttgcgggc

SEQ ID NO: 2972 - DNA, 583 bp, Homo sapiens
gtacccagcaaacgctggagacatgccctgttgaatgccattgctcattttattgatagctaccagcgcaaactgcgctagctgatcgcgatttctgtgatcctgccacggcttgttgacccggacaggggcaaaattcattacatgccgcatattcaggtagaaaactgggggctggtagaagctctggaagaacgttttaaagtgacctgtttcgttggtcacgatatccgtagtctggcgctggcggagcactacttcggtgatttcaccggcaataacaattttttgcggattaaataagttgatagcaatggcgatggttttacccagatgacgaccgacatactcaattacttccgacgccagactatcgcctttgttcgcggctttgcagatagttttgatggtgcagtcgtccagcggcacgcggctctggtagccctgctttaacagattcaacacccgttgttcaatggcagcgttggcagcgatagtttccaggcagccaaagttgccgcagtggcagcgtttacccagcggttgcccctgaatatggccaatctcaccgacgttgccgttg

SEQ ID NO: 2973 - DNA, 548 bp, Homo sapiens
aaagcattgtttggcgacaacaccaccaaagggatggatcagtacgctgagcagctttataccgatgtggtcgatttgcaaaaacgcatcagtgaactggctttcccaccttcaaaagtggtcggcggcgcagccggactgattgaggaagtggcagccagcaaaattagcggtgaagaagatcgctacagccacaccgatctgtgggatttccaggctaacgttgaaggctcgcagaaaattgtcgatttgctgcgtccacaactgcaaaaagccaacccggaactgctggcaaaagtcgatgccaactttaaaaaggtcgataccattctggcgaaataccgtactaaagacggttttgaaacctacgacaaattgaccgatgccgaccggaatgcactgaaaggaccgattactgcgctggcggaagatctggcgcaacttcgcggtgtgctgggactggattaagcgttatgcagtataaagatgaaaacggcgtgaatgaaccgtcacgccgacgtttactgaaagtgataggtgcactggcg

SEQ ID NO: 2974 - DNA, 428 bp, Homo sapiens
gtgaaaccccacacatcatagtcttgttcctgttgaaaatgcaggaatataaagcccagtaccagagcttcccattattcaggcctaggctcctggttcctgggctgtctagtgggtgagggcccagggcctggaggtgtttcaggatcctcaggcctgatttggtggacaggaccatgttcaggggaaaatgtggggatagggctgcatgcttgctctcaggagactgggctcttttttctgagtgtccctgagaaaccatccttaggtattggtactactcacagggttgtgcctagcttcctggctttggaacttcattcacttcctcccacccttcccagcccttccattccccctcccaaaaggctgacacccactcctcctagaaccctaccataactcaccatcctacaagagcttccttc

SEQ ID NO: 2975 - DNA, 422 bp, Homo sapiens
gctccagccttggccagcccagaaaggggctcccacagtgcagtggtgggctgaagggctcctcaagtgccgccaaagtgggagccctggcagaggaggttccgagagcaagcggggctctgaggactgccagcacgctgtcacctctcaatagtatggggctcccggtggcggtggtatctgcaaaagccaagactttcttgagttatacaggaaggaaacaacagtgctgggatttgaacccaggaatgtctcgatctagaatctgtgctctaaaccagtaggcgtcactgcctgagactggtgggagaattgacatgtgctccacagccttgtaggtccaccaacaaactcccagcccacccacaggctcatcaacatcaccttggatcaaagatttccatgaatattggaaagacata

SEQ ID NO: 2976 - DNA, 384 bp, Homo sapiens
gtagagacggtctcgccacattgcccagactggtctgaaagtcttgggctcaagagatcctcccgcttccgccttccaaagcgctgggataacaggcgtgagccgctgcccgggccatccctcgaggaagtttcatcaggtagacattaattctttcacgaggatcacggatcgagctctttactggaaacctgcgccccgccttagttctccacctcttcgtgcggctccaggcaactgccaacagatggcgcccgcccgcctatttctctccttgcggctttgggcctggaggggaggtggggagagtcccaatagcagaggaactggtgagcccgggccaaaatttcatctggcatccggaatgcattaaaaacaacccac

SEQ ID NO: 2977 - DNA, 1110 bp, Homo sapiens
cgtcgagcgtgagtgaccctctgtgtagattaaacctgcgctccctgtttcccatttccacagccgatgtccagggtcgatacggcccttaaaatccccgcacactccaccccaggtgaatacaggcctcgcagtgtgggtccggagtcgcttccctttgggttgaagtcgctttgaggctgctccccgtccccggccttttgcttcttcctcccgcttaaaaccttttcctgaccccctcccccatccccgggctttttaaagtcttcacccaagaggtgtattcccgtcctgggtgcctcccagcctcgccctcgtcggcccctggagcgcagcgccgcagctgcagccgcagtcccggggagccttgcgtcctctgcctggtcctgggatcctgcagaccccacccctgtctgaaggcgctgtcgcgccccacctccctcctcctcgtgccgggccccgctgctccccaggcctcccctgagcccgcgctggggaggtgctcagggcctgtcctgtgacacccgatgttcttgcctgccctcctccaccccctggaaaatgcgctcctccaggatgcaggcgtcttaccccaaaccgtcctgtgaatgtgtgggccaaagggatcgagggacagagagagcagtagaaaacctgagacaggaaggaatgaggcaaaccaataaacagatggcaaagtagaggatggttagagattttcagagacagtaagagtggaagaagaagccgagaaagtagcagggagagaaaagtaactagacacatttcgagaaaaagcacagtatccagagagatgaaggacagccaggtagggagaggggcagcaaaggaggaggctcctcagacagagagtgggggagagcagaagggatttggagccagggcagacagggcagtgtggtactgggacagcaagagggggcagccgatgacaaggagaagcagagggagaaccacagcacggggaggcctgggatctgggggtgccaaagagtggggacaacggtgtgtaacagggaagagggaatttaacagggagtgctgaaatggggaagaaagagccagaaatatgtggagactgggacaatg

SEQ ID NO: 2978 - DNA, 1110 bp, Homo sapiens
cgtcgagcgtgagtgaccctctgtgtagattaaacctgcgctccctgtttcccatttccacagccgatgtccagggtcgatacggcccttaaaatccccgtacactccaccccaggtgaatacaggcctcgcagtgtgggtccggagtcgcttccctttgggttgaagtcgctttgaggctgctccccgtccccggccttttgcttcttcctcccgcttaaaaccttttcctgaccccctcccccatccccgggctttttaaagtcttcacccaagaggtgtattcccgtcctgggtgcctcccagccttgccctcgtcggcccctggagcgcagcgccgcagctgcagccgcagtcccggggagccttgcgtcctctgcctggtcctgggatcctgcagaccccacccctgtctgaaggcgctgtcgcgccccacctccctcctcctcgtgccgggccccgctgctccccaggcctcccctgagcccgcgctggggaggtgctcagggcctgtcctgtgacacccgatgttcttgcctgccctcctccaccccgtggaaaatgcgctcctccaggatgcaggcgtcttaccccaaaccgtcctgtgaatgtgtgggccaaagggatcgagggacagagagagcagtagaaaacctgagacaggaaggaatgaggcaaaccaataaacagatggcaaagtagaggatggttagagattttcagagacagtaagagtggaagaagaagccgagaaagtagcagggagagaaaagtaactagacacatttcgagaaaaagcacagtatccagagagatgaaggacagccaggtagggagaggggcagcaaaggaggaggctcctcagacagagagtgggggagagcagaagggatttggagccagggcagacagggcagtgtggtaccgggacagcaagagggggcagccgatgacaaggagaagcagagggagaaccacagcacggggaggcctgggatctgggggtgccaaagagtggggacaacggtgtgtaacagggaagagggaatttaacagggagtgctgaaatggggaagaaagagccagaaatatgtggagactgggacaatg

SEQ ID NO: 2979 - DNA, 320 bp, Homo sapiens
attttataattatggcatcagaagttagcttccacttgcaatccctgttaaggcagagggaagtgacttgactcattaattccacaggtcatcctcttccccttccctggcgttggggcagggggaggggaagggggagtgggagagtaaagctgggcagaaagtgaaagactgtcactacatagtgtctctctaaagcaggggtgtccaatcttttggcttccctgggccacattggaagaagaattgtcttgggccacacataaagtacactaacactaacaatagctgatgagctaaaaaaaaaaaaaaaaaaaaaa

SEQ ID NO: 2980 - DNA, 320 bp, Homo sapiens; identical to SEQ ID NO: 2979

SEQ ID NO: 2981 - DNA, 952 bp, Homo sapiens
gccgacataattaacaaatggtagcgtcacacctgccgtaacaaagcctgccagactggcaaaaaaacgcggataaggaaccagttgttcgcgctcacgtttatcgagcgtgatggttggaaccagcgaccagaagggaatatccataatggtgtaagtcatgccccagaggatgtaggtcacgcaaacaaagacaatctgagtagtaccttcaaacagatgcgcactaaagaggagaaataagattacagagtttgccaacgtaccgatcatgatccagggtttgaacttaccccatcgcgatcgcgtagcatttacaatccatcccataatcggatcgttaatagcatcccagatcctcgccaccagaaacaaagtaccgaccaaacccacagacagcccgacgacatcggtgtagtaatacatgaggtacatatacacaatgccgatcgcaaaatccttcccgaacgctccaaatccataactgagttttgtagtcattgaaatgctcatagggtatcgggtcgctgttaccaacgcccgccttctgttattggtatcgtcagaggtgtgcgccggaataaatcccccggcgcagtagcgtttattcgcgttttacggtgcaaccagcctggcagccagtcgccgtgggcggcaatcaggtcgtcaacaagagcatatatttcgtcaatgcccagcacggcggcagtatgcgggtccatcatcgcggcgtggtaaacacggtcgcgattttccgtaagaatagcttcggtcagcagcgtctgtacgttgatgttggtttgcatcagggcggccagatgcgaaggtagcgtaccgactttggtcggctgaatgccattagcatcaaccagacaggttacttccacgcaacatccttgtggcaggttatcaatcaaaccatcgttacggacgttgccgtaaatcacactcg

SEQ ID NO: 2982 - DNA, 1003 bp, Homo sapiens
ggttttattcatagcaggggcttggccctgggaatgggtggaggaataacagggacataacaaggctttttgtagaacacgtttggtgttggcaattatagattgtgtttgtgtatacttgtacatgtaagtttacatgtgaaaacatctgaaggcctgaaggcttgcgtcctttccattggcttatatttctagagacactgttctctctctcaaccatcttttaaaatttaaactgtctataatcttacactattatgttagtcacattgaatgcaagataaagcattttattctaaagatgaggtccagattctaatcaggagatgagtcaagctcagaaaaggaaatctgatttagagttctctcagtcttcctggcttatgtcttagttcattttcagtctgcttttgtgcttgtttgatgtagtctctgtacaaggtatagtcaccatgtagttgcatgttcactacatgaaggggattgtgctagattcttaatagattattacttgatatcctgtagtaatttgtaactgttacaaagatcagaaaatgtagtgccatcaggaggctgaggcaggagaatcgcttgaacccgggaggcggaggttgcagtgagctgagattgcaccactgcacaccagcctggttgacagagggagaccccgtctcaaaaaaaaaaagaaaaaagaaagtgccagaatcagaggcctaaaaacatctctaacaacagaataaaccaaacaaaatagaaaaaaggagataatacaggtaagaactaacacctgtgaaataaaaataggtacaatagatagtaccaaaaaagtccaaagatgatttcaaagaactaacagaacagataaaccctggttagattaagagaaaaaggacacaattaaataatataatgaccaaaaaaagcagtacaactatagataagcagaatttaaaaaggtaataaggcggggcacggtggctcacacgtgtaatcccagtacttt

SEQ ID NO: 2983 - DNA, 262 bp, Homo sapiens
agaacatgaagtcagaactggaagccatatttggggtcagtgataaatttgttgattttcagatgaatttattgaatttgaaatgtcaggataatgggcaaataaaaatactgaaccagcagttgaggatttaggatgggagtagctgaagcaccgaagagaggatgggactggaaatagagacgtagagtttaaccacacacacacatcttgcatgcctgtgactgtatccatgtgcatgtccatcactaggtgtacctgt

SEQ ID NO: 2984 - DNA, 87 bp, Homo sapiens
ctcacacctgtaatcccagcactttgggaggccaaagcaggtggatcacgaggttgggagttcgagaccagcctgaccaacatggtg

SEQ ID NO: 2985 - DNA, 554 bp, Homo sapiens
gctggagcccccgggctctactgttgctgtgacttttctattcagggaaatttccagcttatttgagccatattagcaaagtgacaggaaaccagccctatgtacccatccctggagcaagcgtgtccatcttatgtgtcctccacacctccaaatccccacgctggtgttgtggcactcattctagcctaatttcatccattattgtttccctatctcaaggagataaaaactgttaaaaggaccataaaaccaccatcccaccacagaattccaaatatcccatcgatgttcaaatcttcctaattgccttataaattgcttcatgttttaagtttgcttgctggaacccggcagcgtccgtgtgacctttacgacatgacctttctgtctccctgacgccgacgctcttttcttagttcagctgaagaatgggcttgtgtatcctgcactctgccgaccggttacctgtggttttgcgtgttctgctccatccttttgagaggtggtcagaccgaggccgcatcaggctcccctgcaattccgtttggcgg

SEQ ID NO: 2986 - DNA, 554 bp, Homo sapiens; identical to SEQ ID NO: 2985

SEQ ID NO: 2987 - DNA, 3586 bp, Homo sapiens
ttcatttatggagtctgattcattctaagacaatcactcctggttgtgaaatttaaaaaacaacattgtcccattttgctcctgggattcctagttattacttacatctttgatacaactggaatttctttagattacagatgccaatttttctatttgcataattgtacaaacatcatttacatcactggttttccagaaacgaaacgccgtctatgttgcttgtgaacgtgcattaggcacctggcagggccaaccctcatggcgtgtgcgtgaacacatccctaaaccatattctaatttatcctatttttgcacttcatgtgatcataatccagagtctgtgttctcgcatctggctttcactccacgagcttggggtgtgtgcgtatcgctgtgcatggtgtggactttctccacgtcccgtgtgcaaacgccaccccacccagaggccacgccaggacccaggcctgtgggcagtggttcccggtttgcccttgcaaggacgctgtgtcctcctgcgtgagcatccctgcctcgggtctaatcctgggagtggaaggcaggtcgtgggtgtggctgcatcctcagcttctctggatgatgcccaggaacatgcccagagccagagggcccagctgctcggctccctcacactgggctgggcacttggtcgccagccgtttggggagtgtgttctcatggtggtttcaggtgtgagtctgaccaacaaccccccgtgcccgctggacactggagttccttcctctctggcggtgtttctcatcagggttccccaccggcctactgcacgctgcatctctcctgacctgtaggagtcccctacacctctggctgctcgactttgttggtttaatgttttgcaaatgtcttcctccattttgtggtttgccttttcattctcctaatggaacatgttgctttacagaagcatctagttttaacagagtcttgtttaagacggtgtcaacacgcactgggctggcctggtccctgaactcaggtgtgtttcctttgcaaactctagagcagagagacaagggaggaaggacagatagcggcagagtgtgtggaaatgttttccaggaaggatggctttgagtgacagcatcatttgagtgacagcagtggtaggtggtgtaatggattctgatgtggtgggggtaaggggcgcagccaagctccgattcctcctgctgggcccaaggaccaaggactgtgacaggaatgcatagtccctcctctgtcctgccagaggccagagacttgtgtccaccactctgccgggctgtcttcaggaacttgttcaggaggtgctggggtgcagggcacgtctgaaaggcatttctggacacctgctgtggcctcatacaggagagtaggtgacctggccaaggccagcacacaggacaagattaagcatccagggacccggggtcacagccctcactccattgcaggggtggggatgacagaggccagaggggatcagacaggggcagctgttgatggttctgagatgcagtttctgtctgaggggcctcctcccactcctggcctgtgcagaggggtgggtgtgtggagggaaggtgggtctgccctggtcaaacagcagaggcattgcctgttagtctcattccattccgagtgcccccagggagagtcagccaccttatgtagagaggcaaggccagaaggcagggggggcctcccctctggtgaccaacagggcctgtggtacaagcagtgccggctgctgccctctctggcctttgtctccttccagcctctccgctattagcagaggagcagaacacttgacaggtggacacaggccacccccaacccctggccctggaggaggctccacagtggcctcctagagccaggagaccggactgagctgaatctgctgctcctgacaggacctcacagggggcgcctttgaggacaacctgaggtcactgcacttgcaggagggccaggacttccttcacttcagctgacggacccatggcagctgctcccaggtgggtcttttcaccgaagaaccatctgggtttgtttctttattatgtttcatttccttttcattctgctcttattctaattttctttacagttagtcctctgcttatgttcagctcattaatttccagcctttcttctgtaatgtataattcacgacttcagaatcgcttaagcaccactttaggtgaattctatctgttttgattaacttttatctttcattatatattttataattttcattatttcttttaaagagatgtttttaaaaacatttttaaaatttctgtgtacacacacacacacacacacacacacacacacacttgggttctgtaactgtccattgggtcaagtttttctccttcaaccgtgccttatgacactttattgaaatgtaccaattcaataaaatacactatggtagtaggtgatcaatttcttcttgaatgtttgctttaatatcttctaagactgtgttacaaatgtaggaaagttctatcaatcatcttcctgttgaactgagcctttaatcatcatatagtaatctattcctaataacactatttgccttcctttaactggagaactttgtcattaacagaggttttaatccattcacatttattgtgtcccaaaatatttatttctaattgtgtgtgtgttttgcagcttgttctgccttttcctcttgccattcttgcatattttgatagtgtattttttattcttgttccatttctctcctactagtatagaagttatcttccccatacattaactgtttgtgtgtgactaaatacttcaacatgcacctagccaagctgataactgaattatctgcactctgttccaggagaacatagacttaagatgctctaaattcagccaccaactctgccactgatttatatgctgctgttgtccattttaagcaattctacgtgctttaaaaaaaaatccacatataagccatctttctatgtttttatggtcacagtttattgcttcccttgctccacattcctccaactatccaactgcgatcatttccctcctgcctaaagtttatccactaaagcagtggttctcaaccaggggcacccccagaagatatttggcagtgtctggagacatttttttttctttttgtcacagctgggtagggggatgctgcttccatctgggatgttgctgaacaccctgcaataaacaggacagctctcaaaacaaatgactcaaccccaaatattaagccaagattaaaaaaccaaacagataagaatggcatatttttatctaaatgacttaattgtgttctcttctttaatgttatgctgtgggcacaattcaagcaacttgacagctattttctctcagcataatgaagaccttggtctactcactgctcaactccagtgctgctgctgggaaattggtagtcgtttatatcactctgtccttcttacagttctgcagtttcactgtggcaggtctaaatgtgagactgttaggcttctgtatctggggactg

SEQ ID NO: 2988 - DNA, 7550 bp, Homo sapiens
ttcatttatggagtctgattcattctaagacaatcactcctggttgtgaaatttaaaaaacaacattgtcccattttgcttctgggatttctagtttttaattacatctttgatacaactggaatttcttttgattacagatgccaatttttctatttggataattgtcccaacatcgtttacatcactgcttttccaggaacgaaatgccgtctatgttggttgtgaacgtgcatttggcacctggcagggccaaccctcatggcgtgtgcgtgaacacatccctaaaccatagtctaatttatcctatttttgtagttcatgtgagcagaatccagtgtctgtgttctcgcatctggttttcactccacgtgtttggggtgtgtgcgtatcgctgtgcatggtgtggactttctccacgtcccgtgtgcaaacgccaccccacccagaggccacgccaggacccaggcctgtgggcagtggttcccggtttgcccttgcaaggacgctgtgtcctcctgcgtgagcatccctgcctcgggtctaatcctgggagtggaaggcaggtcgtgggtgtggctgcatcctcagcttctctggatgatgcccaggaacatgcccagagccagagggcccagctgctcggctccctcacactgggctgggcacttggtcgccagccgtttggggagtgtgttctcatggtggtttcaggtgtgagtctgaccaacaaccccccgtgcccgctggacactggagttccttcctctctggcggtgtttctcatcagggttccccaccggcctactgcacgctgcatctctcctgacctgtaggagtcccctacacctctggctgctcgactttgttggtttaatgttttgcaaatgtcttcctccattttgtggtttgccttttcattctcctaatggaacatgttgctttacagaagcatctagttttaacagagtcttgtttaagacggtgtcaacacgcactgggctggcctggtccctgaactcaggtgtgtttcctttgcaaactctagagcagagagacaagggaggaaggacagatagcggcagagtgtgtggaaatgttttccaggaaggatggctttgagtgacagcatcatttgagtgacagcagtggtaggtggtgtaatggattctgatgtggtgggggtaaggggcgcagccaagctccgattcctcctgctgggcccaaggaccaaggactgtgacaggaatgcatagtccctcctctgtcctgccagaggccagagacttgtgtccaccactctgccgggctgtcttcaggaacttgttcaggaggtgctggggtgcagggcacgtctgaaaggcatttctggacacctgctgtggcctcatacaggagagtaggtgacctggccaaggccagcacacaggacaagattaagcatccagggacccggggtcacagccctcactccattgcaggggtggggatgacagaggccagaggggatcagacaggggcagctgttgatggttctgagatgcagtttctgtctgaggggcctcctcccactcctggcctgtgcagaggggtgggtgtgtggagggaaggtgggtctgccctggtcaaacagcagaggcattgcctgttagtctcattccattccgagtgcccccagggagagtcagccaccttatgtagagaggcaaggccagaaggcagggggggcctcccctctggtgaccaacagggcctgtggtacaagcagtgccggctgctgccctctctggcctttgtctccttccagcctctccgctattagcagaggagcagaacacttgacagtggacacaggccacccccaacccctggccctggaggaggctccacagtggcctcctagagccaggagaccggactgagctgaatctgctgctcctgacaggacctcacagggggcgcctttgaggacaacctgaggtcactgcacttgcaggagggccaggacttccttcacttcagctgacggacccatggcagctgctcccaggtgggtcttttcaccgaagaaccatctgggtttgtttctttattatgtttcatttccttttcattctgctcttattctaattttctttacagttagtcctctgcttatgttcagctcattaatttccagcctttcttctgtaatgtataattcacgacttcagaatcgcttaagcaccactttaggtgaattctatctgttttgattaacttttatctttcattatatattttataattttcattatttcttttaaagagatgtttttaaaaacatttttaaaatttctgtgtacacacacacacacacacacacacacacacacacttgggttctgtaactgtccattgggtcaagtttttctccttcaaccgtgccttatgacactttattgaaatgtaccaattcaataaaatacactatggtagtaggtgatcaatttcttcttgaatgtttgctttaatatcttctaagactgtgttacaaatgtaggaaagttctatcaatcatcttcctgttgaactgagcctttaatcatcatatagtaatctattcctaataacactatttgccttcctttaactggagaactttgtcattaacagaggttttaatccattcacatttattgtgtcccaaaatatttatttctaattgtgtgtgtgttttgcagcttgttctgccttttcctcttgccattcttgcatattttgatagtgtattttttattcttgttccatttctctcctactagtatagaagttatcttccccatacattaactgtttgtgtgtgactaaatacttcaacatgcacctagccaagctgataactgaattatctgcactctgttccaggagaacatagacttaagatgctctaaattcagccaccaactctgccactgatttatatgctgctgttgtccattttaagcaattctacgtgctttaaaaaaaaatccacatataagccatctttctatgtttttatggtcacagtttattgcttcccttgctccacattcctccaactatccaactgcgatcatttccctcctgcctaaagtttatccactaaagcagtggttctcaaccaggggcacccccagaagatatttggcagtgtctggagacatttttttttctttttgtcacagctgggtagggggatgctgcttccatctgggatgttgctgaacaccctgcaataaacaggacagctctcaaaacaaatgactcaaccccaaatattaagccaagattaaaaaaccaaacagataagaatggcatatttttatctaaatgacttaattgtgttctcttctttaatgttatgctgtgggcacaattcaagcaacttgacagctattttctctcagcataatgaagaccttggtctactcactgctcaactccagtgctgctgctgggaaattggtagtcgtttatatcactctgtccttcttacagttctgcagtttcactgtggcaggtctaaatgtgagactgttaggcttctgtatctggggactgttgcatgtcagtatggaatatctgcatcacttcatttcattctgagaccccaattacccaaaggttagacattcttcaatgtctcttgatgttgctgttatatcttccagttctctggataatgttttcagatcttccagttttctaattctctcttcagctgtgtctaagctatccattgagcttttcatttcacttcttacatttctaggggctctgtttttttctaatctcttcttgatcatttctagcccttttcaaaaatgtactcatattatagcctacattctaccagagaggttttgtatttgcatcttctgcccttgtctgggaataccactggtcagggccaagtcaatcaaattttccactttaggagttttggggatcatacaggtagtattaattcaggccacttcaggggagatagattgagataagagtcttgctgctgttcctttgaaaaagacttatttagggtcccagctttatatagcggtccattagatctggccctgggccttaaattctctcatccattctgctatcaaaatagcgtgactagattccagggctcagcagaaaccctcaggatctccaaggtctctgctctcacatggagggtttctggttagcacctagaacgtgtttgtgggtacacaaatcccacatcagctccccggtcccagggatactggcttcttgctgctctctaaactcacaaagcttgctccacttctgggaccacaagcattctcttttctgccattggacacagtctggacctctgcccaaatgctgccccttcagagaggttttctgaacaccttctcggagtcaacacccaacatgccattccattgcccactttatctttgttcatagcactcagtgttgcctgccttgatggtgcttgcttgttcatttgctattgtctgccccagctatcatgtgagcaaggggttccttgccaaactctatcacctggaccctggtgggctccagaaacggctgctgaaagagggctttccaggccaccaggtgtctggtgagcacaagtgccccagtgatggatgggatccagtgggaaagaggcagtggccagtggagtgatccactttcctcgggttgctaagttagaccgacattaaaagaagaactgctttgccacatagtgtcactgatgggtctgggtgggtaatcgacctgcctccatgtcttaaaatgccatttatctggaatcttcttttaattgcactaagaacagttcatcatgtttttctcagaagccacttgttccttccatcctcagtgcatcccaggccagcaggagctttgtgagctgcaggcatggcgatggtgcgcctgttccacacccagcaggcgcaaccagagtctcgtgtgtgccgaccacaggagccaagccttttccactgtgtggactcatgtggccaaggctaggcctggtcacccaggaccctcaccacgtgaccccagccaatcgggacagttcaaggaggaggagacccctattacacaggttggaataaaatatttaaatctcgtaaaaatgtaacccaaggctcttttagggtataaagaccattggccaccaggtcaaacacaacaacagtagtgtgttaaccccacactcctgtgtggccaggtcgtcacacacatcccgtgaagagctgtctgctaaacacacagcacggactgtcacagtcctggtcttgtggtcctggtgacctcacaagcctcacagatgcggtggcacctcccagttcttggcctgcccatgttcctgtgtccaggccccatccccacctgagagcaggccagggagccaccctaatctacaccacgcacatggcacccctgggctcctcacatagggaaagggttgctcacccaagcccttggcctctgagtggccacacctggggctgctttggtgctgctggccgtggttctgcacctcaagccctatgagcacagcacaggtcccagagatgggtgtgggttgctaccacagtgaaatttttatacacgttcccctcaccagctttgggatggatcagcacgagctcagacacagagacaaaggtagcctcctgccctttgcctaaaaacccaagtgtggactctgcccaggctctcctaagacagtgtaattatttcaagaatggtatttatttcccacattactgtagaggcacacattggactctgacgattccccttgcagcagacatttgtgaagctgctggtcggcacacccatcaatcagtgactcctgcactgcagaggggccacatgcacgatgctcacgtgtgcacaggggggaggacagcacccccaccaggcagacgggcccagaaacagcatctgcccagcactccagaccatgcctgccaccagggcttctcagttctctagcatttgaacctctgatttaacattcatctctctccaagactgggtggggcactgcctgtggccagacgtctcccacagcagggacagcaccaggcaagaagggggcctggtctccaggcaggaggagtgcagcccacctcccctctggctgacccctgggcagtgagcctttccatcacccctacacacatcaggctcagagacaaaaggcaggaacttcttggtacatgattttataggaagcacatttgtgttcaagtgaaggcagaggcgtccaccccaagtcaccagagcgcaggtgcagagaggaaaagctgtcagctagtgccagcctccaagggccagcgctacccttcaacagctggaggcaccactgtgcgaggctttccacaccggcctccctcaggaacaagacatcctcaccaggcaggggtgaggtatgggctccaggactggcttcagcaggcaccaggctgaagaagagacaagacaagctcaggctggtcagctccaacacacaccattcccagccaggggaccctcacccctctgggccctgtgtggggactgacacggttcctgcaggaaaccatttgtgccgtttcccacacacccggcagcctgagctatgtggctgacaggtgctcatgactaacgtgtcctcggaagggcaccccatctggggagcgggaagggaggttcactgcactgctcttaacctgcattcacacgtttgaaatttttcctaataaaaatgtaaaaagcacatttaattccaaagtctgctgttgagttcagcctttacacacacagaaatgggggaggctgtgtcctgatgctcagcccatccccactgcccccatgtatctggacatggttctcctcctccctctcagatataacctcctgccggaaggaggctgagaggaaggagccaaccctggtaactagagagacagcacagcaaccctgggccccagcccccgtgagaactgaggtacttgtttttgttactttagaagaagagtgacgggctggtgaggtgcacaggggcagcttctgggggcctctcacccagccccggccccactcatgggaagcagatgaggaggggtagggtggcactcttggcacttggagcacaaacagaccccagggccaggcatgaggagcctggatcaagctggtgccagctccacccactccccggccccccaaacgccccagagcaagtggcctggatgccacaggggcccacaggtgtgggcagtggccagagaaggcagctctgctggtcccgtaatcccaggggtcctgacatgagacgagggaacgggccgtgtggacgtgctggcagaagctaagcacagccgctggccccagaacattccagagctcagggaagcacaggcacctcatgctgtgaaggtgacagggttacctggggcaccagctggggcctgggtacgcccagaaggtcacacagacggttgcgctgctctctcaccactgcagatccgcgtccc

SEQ ID NO: 2989 - DNA, 464 bp, Homo sapiens
acagatcaaaccagccacaacattcccttaagccaaagcctaatacagagcgaggtcccaactctcttcaattctgtgaaggctgaatgatgtgaggaagctgtgaacataagtttgaagctagcagaggttggcccacaaggcttaaggaaagaagccgtctccgtaatatgagtgtgaggtgaggcagcaggctctccagaagatcctgctacggtcacaatggaggtggccgcactcaaccacagatcttcagtgtagaggaagcaaccttgaactggaagaagacaccatgcaggcctttcataggtagggagaagtcaatgcctggcttcagagcttcaaaagacagtctgactctttgccgtgactttaaaacccatctatgcctagtgttccattattggaacgctaagcatgtgcaagtttatattctgcttaaggtcactgccaagatctgattg

SEQ ID NO: 2990 - DNA, 464 bp, Homo sapiens; identical to SEQ ID NO: 2989

SEQ ID NO: 2991 - DNA, 366 bp, Homo sapiens
tgtcagatggttgccaataaagccattcaccccgaggatgagtacccgggtacggcgtcgggcggtgcaggcaggctggctattcaagcgtgaaccttgcaccaggcccagcgtctgcgctaattgcgagccctgcatagtaatgccgtcgcccgcctgtccggtgacgatttccagcgcgccatcgccacaggcaatcagcagtggcgcaacagaaatcacgctccccggctgtgctttgctggcatgaggatgaacacgcgacgaccagacggtgaatttctgattgccaacatagctgaaggcacccggccacggatcggcaacggcacgtaccatgttgtgcagtacggatgccggtttatg

SEQ ID NO: 2992 - DNA, 342 bp, Homo sapiens
aacctgtaactgtgaaacgaaagaatgaaacttttgcccccaagcatcccgatcatattttcttgtaaagccactcggaacagtcagagcgtgttgacgccctgcgggaagattcacggctggtgatcctgtgggcggggtatcccttctcgcgcgattacaacaagccgcgtggacatgcttttgctgtgaccgatgtgcgtgaaaccctgcgaaccggtgcgccgaaaaacgctgaagatggtccgctccagatggcatgctgcagttgtaaaagcccggatgtggcgtgtctgatccagaaagacggcggagatggctactttcacggtaaatgggcgc

SEQ ID NO: 2993 - DNA, 433 bp, Homo sapiens
aacctgtaactgtggaagcgaagaatgaaacctttgccccgcagcatcccgatcaatatctctcctggaaagccacctcggaacagtcagagcgtgttgacgccctggcggaagatccacggctggtgatcctgtgggcggggtatcccttctcgcgcgattacaacaagccgcgtggacatgcttttgctgtgaccgatgtgcgtgaaaccctgcgtaccggtgcgccgaaaaacgctgaagatggtccgctaccgatggcatgctggagttgtaaaagcccggatgtggcgcgtctgatccagaaagacggcgaagatggctacttccacggtaaatgggcgcgcggcggtccggaaatcgtcaacaacttaggttgtgccgattgccataacaccgcctctccagagttcgccaaaggcaaaccggagtt

SEQ ID NO: 2994 - DNA, 433 bp, Homo sapiens; identical to SEQ ID NO: 2993

SEQ ID NO: 2995 - DNA, 257 bp, Homo sapiens
cagggcgagatgatcgctttaactccgtttgaatgttgacgggatgaacataataagcaatgacggcagcaataaactcaacaggagcaggaaagcgagggtatcctacaaagtccagcgtaccataaacgcaagcctcaacgcagcgacgagcacgagagcggtcagtagcaatccaaactttgttactcgtcagaaaatcgaaatcatcttcggttaaatccaaaacggcagaagcctgaatgagcttaatagag

SEQ ID NO: 2996 - DNA, 407 bp, Homo sapiens
ccttctctcactcaggcagaggaaactgaggccgggaaggtgtctggatactcctgcattgctgggtattctggggcaccgccggtcatacgtgggcttctgggtgagccagatgctggtacacgtgcaggtactcacatcctctgtcctcctccagtagagaagcagtgctccagccttgtctggtcccatctctgcccacatgcccccttcccttccagcgtgtcccccataccctctgatgtagcttctggctgctcacccatttttcctcactaggactccagacccactcactcctgaccagagctatagtgaggctgggacccctgcctaggcacctgccaccaggcatcaaagaacccaagttcaatcctggtttgctcttaaatcccagagtcaagggg

SEQ ID NO: 2997 - DNA, 413 bp, Homo sapiens
ccttctctcactcaggcagggaaactgaggccgggaaggtgtctggatactcctgcattgctgggtattctggggcaccgccggtcatacgtgggcttctgggtgagccagatgctggtacacgtgcaggtactcacatcctctgtcctcctccagtagagaagcagtgctccagccttgtctggtcccatctctgcccacatgcccccttcccttccagcgtgtcccccataccctctgatgtagcttctggctgctcacccatttttcctcactaggactccagacccactcactcctgaccagagctatagtgaggctgggacccctgcctaggcacctgccaccaggcatcaaagaacccaagttcaatcctggtttgctcttaaatcccagagtcaagaggcaactcc

SEQ ID NO: 2998 - DNA, 390 bp, Homo sapiens
tgggcatgtcaccttctctgcccatcaatcttccgctgtgtacaatatcgtgggggaggaggatcttgagaccttgcctccttcccagggctgttataaaatgagactccaggccgggtgcagtggctcacgcctgtaatcccagcactttgggaggctgaggcgggcggatcacgaggtcaggagatcgagaccatcctggctaacgcggtgaaaccccgtctctactaaaaaaaatacaaataaattagctgggcgtggtggcgggcgcctgtagtcgcagctactcgggaggctgaggcaggagaatggcgtgaacccaggaggcggagcttgcagtgagcgcagatagagccactgcactccagcctgggcaactgagactctgtc

SEQ ID NO: 2999 - DNA, 390 bp, Homo sapiens
tgggcatgtcaccttctctgcccatcaatcttccgctgtgtacaatatcgtgggggaggaggatcttgagaccttgcctccttcccagggctgttataaaatgagactccaggccgggtgcagtggctcacgcctgtaatcccagcactttgggagcctgaggcgggcggatcacgaggtcaggagatcgagaccatcctggctaacgcggtgaaaccccgtctctactaaaaaaaatacaaataaattagctgggcgtggtggcgggcgcctgtagtcgcagctactcgggaggctgaggcaggagaatggcgtgaacccaggaggcggagcttgcagtgagcgcagatagagccactgcactccagcctgggcaactgagactctgtc

SEQ ID NO: 3000 - DNA, 254 bp, Homo sapiens
cctgccagtgggatctgatcaccataggggataggccagattggcccgctcaccctatcttctcccactttccaggggtagagcgcccccctcctcatgctttccaaccactaggcccccaagacactctcccgcccgcctctcggcccccatcccggtctggtccactcccacccctccaaccccatgccggccactgcagtactcacaccgcacgcctgggctctgcctctggcccgggttgggggcggccg

SEQ ID NO: 3001 - DNA, 366 bp, Homo sapiens
aacgctggcaaaaatcagactgtgcttcacggtgtagcggaacagttcagattctcggcccaccatgcccgtcgcggcgcacgccacggcgatagattgcggggagatcatcttgccagttacgccgccgctggtgttagctgccaccaccacggtgtcagagacgttgatttgctgccccgtggtcgattgcagtgaacctaacagggcgttagaggaggtgtcctatccggtaatgaatacacccaaacagccgagaaacggtgagaagaacgggaacatcacccctgtgcctgccagtaccagtgcccacgggggggacctgcccaaatatttggtgaccaacgccaaccccagccgggtgcc

SEQ ID NO: 3002 - DNA, 439 bp, Homo sapiens
aacgctggcaaaaatcagactgtgcttcacggtgtagcggaacagttcagattctcggcccaccatgcccgtcgcggcgcaggccacggcgatagattgcggggagatcatcttgccagttacgccgccgctggtgtttgctgccaccagcagggtgtcagagacgttgatttgctgcgccgtggtcgattgcagtgaaccaaacagggcgttagaggaggtgtccgagccggtaaggaatacgcccagccagccgagaaacggtgagaagaacgggaacatcacgcctgtacctgccagtaccagcgccagcgtggtggacatgccagaatagttggtgacgaaaggctaacgccagcaccatgcccatcgacagtatcggccacttcaagctaattagcgtttcggcaaagacgccattccctttcttggtcccaca

SEQ ID NO: 3003 - DNA, 408 bp, Homo sapiens
gagctggccttcagtgtgtgccagcagaatagaaatgtgatggcacagtctgaggaaaagccacgaaaggccaggagactgggagctcagccttgggtgggggagaaggggtgggtgactgttcctcctgtggaggatgtggtgatagaggttgggaggagtgggaattcggaggactggtgtggatttcactggttcagagcttggagtcagcttagctggttttgtcacttgccagctatttgaccctggccaagtcacctggctcaatttcttcatctgtgaaatggtggtattagttgtccctatttgtcatactgtggagggaattaaatatgatgatacatggaaaaaactgctttaccacagttcctggcacatactgagcccacaataagagttagttgt

SEQ ID NO: 3004 - DNA, 408 bp, Homo sapiens; identical to SEQ ID NO: 3003

SEQ ID NO: 3005 - DNA, 214 bp, Homo sapiens
accaacatggagaaaccccgtctctactaaaaatacaaaattagccatgcgtggtggcgcatgcctgtaatcccagctactctggaggctgaggcagaagaatcacttgaacccgggaggcaggggttgcagtgagccaagatcgtgccattgcactccagcctgggcaacaagagcaaaactctgtctcaaaaaaaaaaaaaaaacaacagag

SEQ ID NO: 3006 - DNA, 214 bp, Homo sapiens; identical to SEQ ID NO: 3005

SEQ ID NO: 3007 - DNA, 231 bp, Homo sapiens
ctttcttttttttttcttttgagatggaatctcgctctgttgcccaggctggagtgcagtggcgcgatctcagttcactgcaagctccgcctcccctggttcacgccattctcctgcctcagcctcctgagtagctgggactacaggcgcctgccaccacgcccagctaatttttcatatttttagtagagacggggtttcaccgcgttagccaggatggtctcgatctcc

SEQ ID NO: 3008 - DNA, 231 bp, Homo sapiens; identical to SEQ ID NO: 3007

SEQ ID NO: 3009 - DNA, 176 bp, Homo sapiens
gacaggagaccggaaatgccttttaaacctttagtgacggcaggaattgaaagtctgctcacaccttcctgtatcgctcacccgcgctgaaaacggcccgctcgcgtctgctgggtaaagtattgcgcgtggaggtaaaaggcttttcgacgtcattgattctggtgttcagcgaa

SEQ ID NO: 3010 - DNA, 281 bp, Homo sapiens
gacaggagaccggaaatccttttaaacctttagtgacggcaggaattgaaagtctgctcaacaccttcctgtatcgctcacccgcgctgaaaacggcccgctcgcgtctgctgggtaaagtattgcgcgtggaggtaaaaggcttttcgacgtcattgattctggtgttcagcgaacgccaggttgatgtactgggcgaatgggcaggcgatgctgactgcaccgttatcgcctacgccagtgtgttgccgaaacttcgcgatcgccagcagcttaccgcc

SEQ ID NO: 3011 - DNA, 276 bp, Homo sapiens
gacaggagaccggaaatgccttttaaacctttagtgacggcaggaattgaaagtctgctcaacaccttcctgtatcgctcacccgcgctgaaaacggcccgctcgcgtctgctgggtaaagtattgcgcgtggaggtaaaaggcttttcgacgtcattgattctggtgttcagcgaacgccaggttgatgtactgggcgaatgggcaggcgatgctgactgcaccgttatcgcctacgccagtgtgttgccgaaacttcgcgatcgccagcagctt

SEQ ID NO: 3012 - DNA, 672 bp, Homo sapiens
gacaggagaccggaaatgccttttaaacctttagtgacggcaggaattgaaagtctgctcaacaccttcctgtatcgctcacccgcgctgaaaacgggccgctcgcgtctgctgggtaaagtattgcgcgtggaggtaaaaggcttttcgacgtcattgattctggtgttcagcgaacgccaggttgatgtactgggcgaatgggcaggcgatgctgactgcaccgttatcgcctacgccagtgtgttgccgaaacttcgcgatcgccagcagcttaccgcactgattcgcagtggtgagctggaagtgcagggcgatattcaggtggtgcaaaacttcgttgcgctggcagatctggcagagttcgaccctgcggaactgctggccccttataccggtgatatcgccgctgaaggaatcagcaaagccatgcgcggaggcgcaaagttcctgcatcacggcattaagcgccagcaacgttatgtggcggaagccattactgaagagtggcgtatggcacccggtccgcttgaagtggcctggtttgcggaagagacggctgccgtcgagcgtgctgttgatgccctgaccaaacggctggaaaaactggaggctaaatgacgccaggtgaagtacggcgcctatatttcatcattcgcacttttttaagct

SEQ ID NO: 3013 - DNA, 678 bp, Homo sapiens
  SITE (478): n equals a,t,g, or c
gacaggagaccggaaatgccttttaaacctttagtgacggcaggaattgaaagtctgctcaacaccttcctgtatcgctcacccgcgctgaaaacggcccgctcgcgtctgctgggtaaagtattgcgcgtggaggtaaaggcttttcgacgtcattgattttcccttggggtggtttccagcgaaacgccaggttgatgtactgggcgaatgggcaggcgatgctactgcaccgtttcgcctacgccagtgtgttgccgaaacttcgcgatcgccagcagcttaccgcactgattcgcatggtgagctggaagtgcaggcgatattcaggtggtgcaaaacttcgttgcgctggcagatctggcagagttcgaccctgcggaactgctggccccttataccggtgatatcgccgctgaaggaatcagcaaagccatgcgcggaggcgcaaagttcctgcatcacggcattaagcgcnagcaacgttatgtggcggaagccattactgaagagtggcgtatggcacccggtccgcttgaagtggcctggtttgcggaagagacggctgccgtcgagcgtgctgttgatgccctgaccaaacggctggaaaaactggaggctaaatgacgccaggtgaagtacggcgcctatatttcatcattcgcacttttttaagct

SEQ ID NO: 3014 - DNA, 196 bp, Homo sapiens
ctggtgcttgagttctcgaagccaattatcgagccgctgagcaaagcctatgatgcatactccttccatgtgctgccgcgtattggctcactggtcgcgaacgacgccgacagctaccgttatctggcagaatccatccgtatgcatcccgatcaggataccctgaaagccatgatgcaggatgccggattcgaaa

SEQ ID NO: 3015 - DNA, 198 bp, Homo sapiens
ctgctggtgcttgagttctcgaagcccattatcgagccgctgagcaaagcctatgatgcatactccttccatgtgctgccgcgtatggctcactggtcgcgaacgacgccgacagctaccgttatctggcagaatccatccgtatgcatcccgatcaggataccctgaaagccatgatgcaggatgccggattcgaaa

SEQ ID NO: 3016 - DNA, 196 bp, Homo sapiens
ctggtgcttgagttctcgaagcccattatcgagccgctgagccaagcctatgatgcatactccttccatgtgctgccgcgtattggctcactggtcgcgaacgacgccgacagctaccgttatctggcagaatccatccgtatgcatcccgatcaggataccctgaaagccatgatgcaggatgccggattcgaaa

SEQ ID NO: 3017 - DNA, 198 bp, Homo sapiens
ctgctggtgcttgagttctcgaagccaattatcgagccgctgagcaaagcctatgatgcatactccttccatgtgctgccgcgtatggctcactggtcgcgaacgacgccgacagctaccgttatctggcagaatccatccgtatgcatcccgatcaggataccctgaaagccatgatgcaggatgccggattcgaaa

SEQ ID NO: 3018 - DNA, 199 bp, Homo sapiens
ctgctggtgcttgagttctcgaagccaattatcgagccgctgagcaaagcctatgatgcatactccttccatgtgctgccgcgtattggctcactggtcgcgaacgacgccgacagctaccgttatctggcagaatccatccgtatgcatcccgatcaggataccctgaaagccatgatgcaggatgccggattcgaaa

SEQ ID NO: 3019 - DNA, 448 bp, Homo sapiens
ctttaattccgttcatggtttcatggtttttaaactgcgagggagcgataaaacggaaaggacggggcagggccagttcttgcaggaaaggatagtaggcgcttttcagggtaatttgcagctctgttttactgagtgctttaacatcaacaatctggtttgccagctccagccaggcgtgacgttgacggttatcgagcactgcgcggaagttttctgccgccgcctcggcatcgaacggttcaccgttggagaatttcacgtcatcacgcagggtgaaggtccaggttttaccatcttctgaatgagtccagctttttgccagccacgggatcaccgaaccgtctgcctgatatttcaccaatggttcataaaccatgctctgggcgaacatctggttaagcgtgtaaaggtgcgggtttagtggcccgacattcaccggccaagc

SEQ ID NO: 3020 - DNA, 445 bp, Homo sapiens
ctttaattccgttcatggtttcatggtttttaaactgcgagggagcgataaaacggaaaggacggggcagggccagttcttgcaggaaaggatagtaggcgcttttcagggtaatttgcagctctgttttactgagtgctttaacatcaacaatctggtttgccagctccagccaggcgtgacgttgacggttatcgagcactgcgcggaagttttctgccgccgcctcggcatcgaacggttcaccgttggagaatttcacgtcatcacgcagggtgaaggtccaggttttaccatcttctgaatgagtccagctttttgccagccacgggatcaccgaaccgtctgcctgatatttcaccaatggttcataaaccatgctctgggcgaacatctggttaggcgtgtaaaggtgcgggtttagtggcccgacattcaccggcca

SEQ ID NO: 3021 - DNA, 429 bp, Homo sapiens
ctttaattccgttcatggtttcatggtttttaaactgcgagggagcgataaaacggaaaggacggggcagggccagttcttgcaggaaaggatagtaggcgcttttcaaggtaatttgcagctctgttttactgagtgctttaacatcaacaatctggtttgccagctccagccaggcgtgacgttgacggttatcgagcactgcgcggaagttttctgccgccgcctcggcatcgaacgggtcaccgttggagaatttcacgtcatcacgcaaggtgaaagtccaagttttaccatcttctgaatgagtccagctttttgccagccacgggatcaccgaaccgtctggctgatatttcacaatggttcataaaccatgctctgggcgaacatttggttaagcgtgtaaagggccggttttaatgcccc

SEQ ID NO: 3022 - DNA, 151 bp, Homo sapiens
ttcgccagccagcgccagttggcgcgcgggcgaatcacttcgatatcgcagccgacttcgccttcatcactcaacagcagggcgatatcgtcaccgctatggcttaagttgaaccatagcggcatttccggcgcaaatgcaggtttgcctt

SEQ ID NO: 3023 - DNA, 377 bp, Homo sapiens
acactcacagtgtggccggataaccgcatcgcggaggatgcgcactatgtctaccgccacgatgaatacggcaggctgacggagaagacggaccgcatcccggcgggtgtgatacggacggacgacgagcggacccaccactaccactacgacagccagcaccgcctggtgttctacacgcggatacagcatggcgagccactggtcgagagccgctacctctacgacccgctgggacggcgaatggcaaaacgggtctggcggcgggagcgtgacctgacggggtggatgtcgctgtcgcgtaaaccgtaggtgacgtggtatggctgggacggatacaggctgacgaccgtgcaaactgacaccacacgtatcca

SEQ ID NO: 3024 - DNA, 587 bp, Homo sapiens
agcctgctgtctgaccgcgattacacctggaacgacaacggcgaactcatccgcatcagcagcccgcgccagacgcgggaatacggctacagcgccacgggcaggctggagagtgtgcgcaccctcgcaccagacctggacatccgcatcccgtatgccacggacccggcgggcaaccggctgccggacccggagctgcacccggacaagtacactcacagtgtggccggataaccgcatcgcggaggatgcgcactatgtctaccgccacgatgaatacggcaggctgacggagaagacggaccgcatcccggcgggtgtgatacggacggacgacgagcggacccaccactaccactacgacagccagcaccgcctggtgttctacacgcggatacagcatggcgagccactggtcgagagccgctacctctacgacccgctgggacggcgaatggcaaacgggtctggcggcgggagcgtgacctgacggggtggatgtcgctgtcgcgtaaaccggaggtgacgtggtatggctgggacggagacaggctgacgacggtgcagactgacaccacacgtatcca

SEQ ID NO: 3025 - DNA, 378 bp, Homo sapiens
tacactcacagtgtggccggataaccgcatcgcggaggatgcgcactatgtctaccgccacgatgaatacggcaggctgacggagaagacggaccgcatcccggcgggtgtgatacggacggacgacgagcggacccaccactaccactacgacagccagcaccgcctggtgttctacacgcggatacagcatggcgagccactggtcgagagccgctacctctacgacccgctgggacggcgaatggcaaaacgggtctggcggcgggagcgtgacctgacggggtggatgtcgctgtcgcgtaaaccggaggtgacgtggtatggctgggacggagacaggctgacgacggtgcagactgacaccacacgtatcca

SEQ ID NO: 3026 - DNA, 375 bp, Homo sapiens
aagaaacaaaacaaaacgaaaaattactgaagtcgggtggagctcagacatcggtagttttccaaagctcccagacattctaatagtgccactacagttgagaattcagtgttggagaactaactttcttatgtactgaattgtgttcatactttccataagtgaggctgaagatgcaaaaattcaatttgacaaacctcttttgagcgtgtcctgcagtggtgctaattgctagagagagaaatgggcagattacagccttgttgtgaggacagtgtaagagttaagaaggaagacttttagaagagaaagtgggacttgaactaagcctagatgaataaaaaatttttaattatcatttgcatgaaaacgttt

SEQ ID NO: 3027 - DNA, 389 bp, Homo sapiens
tgccaaaaaaaatggaagatatgatatgggaatcttaggtaagtagggaaaatttcccccccacaatgtccccagggaaaatgtggagtggagaaattctttaaacgtgtgtacctgataaaaatgttctttttacatttacatgtttctttttcttgttcaagatcttggttctggagatgaaaaagtgcggaaaagtgatgttaaaaagtttctgactccaggatattcaacctctggccacgtagaattatacacagtaagtttagaaaatgttgtgaagtatcgtcttcccatgagatgcatttacagaaatgagtttaaatttcgttgtttctcttacagattagtgtagagaggggaatgtcatgggaggaagctaccaagat

SEQ ID NO: 3028 - DNA, 202 bp, Homo sapiens
aggttaggagtttgagaccagcctggccaacatggcgaaaccccgactctactaaaaatatgaaacttagcctgtagtcccagctactcaggagactgaggcaggagaattgcttgaacccgtgaggcagaggttgcagtgagctgagatcgcgcactgcgctccagcctgggtgacagagtgagactccgtctcaaaaaaa

SEQ ID NO: 3029 - DNA, 615 bp, Homo sapiens
aacaggatctgcattgcttcctccgcataccgggcaaccactggcgcggcgcaacgccaggctgcgccactggctcgatttaccgtcgaacagtcggagttctcccgcaggtgtctctataccgcttaataacttaatggcttccagtgcctgcaaagtgcccataaccccgaccaccgggccaaccacgcccgccgtgcggcagttgcgttctggctcctggttatctggccacaggcagcggtaacacccctgctcccagggcggcgtcagtaccatcaactgaccgccaaatccgaccgcgctggcggtgataagcggcgtgttgagtgccacgcaggcggcattaatctcctggcgagtcgccatattgtcggtacagtcgagcaccacatcggcccgtgcaaccgcatcttttaacgcctcacccgttaaccgttgttgtaatgctgtcagttgaatgtcgggattcaactgtgtcagtcgctgttggctgacctgcgatttcgggcgatcgatatcttcagtggtaaagaggatttgtcgttgcagattgcttaaatgcacatcgtcgtcatctgccagtaccagcgtcccgacgccagcgcccgccag

SEQ ID NO: 3030 - DNA, 886 bp, Homo sapiens
ctccaccagcagttgtgaggaagcgaatttccctgtgccggtaacagatgtgaatcaaacgttttgtccgcaatacgtaacatttcaaccccctgcaataacctgaaaaagcaggatctggtcgccatcctgcacgatatgttgcgcccactgctcacgcgggacgatttgctgattaatcgccagagccgcgcccgcttgtcgttggtcgagttgctccagtagttcgtgaacagtttgcccggcggcgcactgcatcgcttgatcgttaaacaggatctgcattgcttcctccgcataccgggcaaccactggcgcggcgcaacgccaggctgcgccactggctcgatttaccgtcgaacagtcggagttctcccgcaggtgtctctataccgcttaataacttaatggcttccagtgcctgcaaagtgcccataaccccgaccaccgggccaaccacgcccgccgtgcggcagttgcgttctggctcctggttatctggccacaggcagcggtaacacccctgctcccagggcggcgtcagtaccatcaactgaccgccaaatccgaccgcgctggcggtgataagcggcgtgttgagtgccacgcaggcggcattaatctcctggcgagtcgccatattgtcggtacagtcgagcaccacatcggcccgtgcaaccgcatcttttaacgcctcacccgttaaccgttgttgtaatgctgtcagttgaatgtcgggattcaactgtgtcagtcgctgttggctgacctgcgatttcgggcgatcgatatcttcagtggtaaagaggatttgtcgttgcagattgcttaaatgcacatcgtcgtcatctgccagtaccagcgtcccgacgccagcgcccgccag

SEQ ID NO: 3031 - DNA, 412 bp, Homo sapiens
tttattgaccgagcgtaagggttttcagcatcatgcttttcaccgtgttgagcacttcaacattggcctgatagctgcgtgacgccgacatggtgttaaccatctctccgacaacatcaacgttcggcatttttacgtagccctttgcatctgccagcggattacccggttcataaaccagtttgtccggggcctgactttctataacatcggcaacctttacgccgcctgtcgcagcacctggtgcagcgttaacctggaataccacctgttttgcccgatatggctgtccatcgggaccggtcacgctatcagcattcgccagattactggccgccacgttcaggcgctgggactgggcagttaacgccgacccggcgatataaaaattttcagagtgcatccgttaatt

SEQ ID NO: 3032 - DNA, 415 bp, Homo sapiens
tttattgaccgagcgtaagggttttcagcatcatgcttttcaccgtgttgagcacttcaacattggcctgatagctgcgtgacgccgacatggtgttaaccatctctccgacaacatcaacgttcggcatttttacgtagccctttgcatctgccagcggattacccggttcataaaccagtttgtccggggcctgactttctataacatcggcaacctttacgccgcctgtcgcagcacctggtgcagcgttaacctggaataccacctgttttgcccgatatggctgtccatcgggaccggtcacgctatcagcattcgccagattactggccgccacgttcaggcgctgggactgggcagttaacgccgacccggcgatatcaaaaatattcagcagtgccatccgttaatt

SEQ ID NO: 3033 - DNA, 276 bp, Homo sapiens
cacgttgtagaaatggctgggggcgaaaatgctgataataaaacgtagcgtggcgatcatcgcgatactgttcagtccgttaagtacggcgagcaatctcacatcgcaattgcacaacttttttagcgcccaactcgcgggggtaagtgatgaggttcgtgtttctattcgtacagcgcccaatctactaccgccatgcgagcagccattgctttcgatgagcaataattcccgcctgtggggcaatgtgaatgtgttgccacgctgcggtaacga

SEQ ID NO: 3034 - DNA, 452 bp, Homo sapiens
cgggtttgtatgcgtccagccacgcctgtggtagttccagtaccagcgcgggttcatcaatctgtacccactcgatgccgcgtttcgccagttctgccagcacttgctgataaaccggcagaatgtcgttcagcaggctcaggcggtcaaattgttcacctttcactttccccagccacagccaggtaaccggccccagcagcacaggtttcaccttgtggcccagcgccagcgcctcgtccacttcgtccagcagctgcgtccaggtcagtttgaactgttggcctttaacgaactccggcaccatgtagtgatagttggtgttaaaccatttggtcatttccgctgccgccgcaggttcgccagtcggcgcacgtccacgaccaatacggaacagggtgtcgatatctaccgaaccatctttgttctgatgacgcgccggaacgttaccc

SEQ ID NO: 3035 - DNA, 429 bp, Homo sapiens
ctgtggtagttccagtatccagcgtcgggttcatcaatctgtacccactcgatgccgcgtttcgccagttctgccagcacttgctgataaaccggcagaatgtcgttcagcaggctcaggcggtcaaattgttcacctttcactttccccagccacagccaggtaaccggccccagcagcacaggtttcaccttgtggcccagcgccagcgcctcgtccacttcgtccagcagctgcgtccaggtcagtttgaactgttggcctttaacgaactccggcaccatgtagtgatagttggtgttaaaccatttggtcatttccgctgccgccgcaggttcgccagtcggcgcacgtccacgaccaatacggaacagggtgtcgatatctaccgaaccatctttgttctgatgacgcgccggaacgttaccc

SEQ ID NO: 3036 - DNA, 451 bp, Homo sapiens
  SITE (116): n equals a,t,g, or c
  SITE (149): n equals a,t,g, or c
  SITE (170): n equals a,t,g, or c
cgggtttgtatgcgtccagccacgcctgtgggtagtccagtaccagcgcgggttcatcaatctgtacccactcgatgccgcgtttcgccagttctgccagcacttgctgataaccngcagaaatgtcgtcagcaggctcaggcggtcanatgtttcacctttcactttcnccagccacagccaggtaaccggccccagcagcacaggtttcaccttgtggcccagcgccagcgcctcgtccacttcgtccagcagctgcgtccaggtcagtttgaactgttggcctttaacgaactccggcaccatgtagtgatagttggtgttaaaccatttggtcatttccgctgccgccgcaggttcgccagtcggcgcacgtccacgaccaatacggaacagggtgtcgatatctaccgaaccatctttgttctgatgacgcgccggaacgttaccc

SEQ ID NO: 3037 - DNA, 391 bp, Homo sapiens; identical to SEQ ID NO: 508

SEQ ID NO: 3038 - DNA, 386 bp, Homo sapiens
cgggggcatcgggcgtgtgatgcaaagcaggtcacaatccagcgatcttggtataatagggggacattttttttcacttaagtgcaagccaaatgggtcaagtaatcgcaagctcgtgccctaacactaattgacttatttggggattattataactgtaatatttttcttaatgtcactgttttctgggctgttgattttagcgattgccaagcaatggcattaaatctcttgtaaattttaaattgcacgttatttctgtaaacaagtccctctcttcacatcctggtcattaacctttgccgatttatatcaccatcctctttttttctttctttcacaattactcctgtcttgccgctgaacgccctgctctcagccaggaa

SEQ ID NO: 3039 - DNA, 1621 bp, Homo sapiens
cagcagtgtgctggctctttggacgtcacctttatgacactctgcagtatcccatcgggctgatcgcctccagctggggcgggacacccattgaagcctggtcatctggacggtcactgaaagcctgtggggtccctaaacaagggtaagacagcattctccagtctgagaaagagcctaccagggaattatgcaagagagagggtcatcgtcctctgtggggagttaagtatatggtgaatgtcccaatatgtgttgaatgtatgtaatttattcatgtagagggaaagcattattttcactgtcactgccaccacaatcgtttgagaacatgtaaaaaaaaagtatcttttcccccagtaatagtaatagctagtggttactgaaagctttttatatgccagacactgtgctaagcactttatatatataaattatgaatatattgaatatatattattatatattaatatattgaagtgtagatattaaagaccatgggtgaagacactacatttcagagagacttagtaacttgctcatgagcatgactagtaagtggcaagtctggcttcagtgtctgtgcacctaaccattgtgctgtattgcctagaagaataaacaatccaacaggaagaacaaatgttataaacatgtactcaaagaaatgtatcagtatactgattatgaacacctgcttaggaaaggctggatcaggaagaatacttggggagggaaagggctagtgaatacaaatcccgatactaacatcaatgtagagatgagcagtatgtgacttgctttcatggaccatgtctcattcacgctgggaagccctgtgggaggaggatgggcttgagctctgggtatagtttgggtaaaagcttgcctgtgggggagtgaagatattcaactttggaacaggaagaatggcctgcagtagagtaggagtgagcgttagaccagatctctgggggtggaagggataatcccgagggtgtgggcaagtgggcttctcacacgcagcagctacaggataaattcatataaatattctacagagaaatttgagaacgtgttcagagccttaaaaaagatgccctttgacacagcagtttcatttctgggaatttatcttatggatatagttaagcatgtatgcaatgacttagctataaggaagatgatcttggcattccatataaaagcaaaaagtttaaaacaacctaaatgtctgtgcattaaataaaggtttatttaataaaagttaggtaaatttattggcccccccccacaatgtgagaaactcaacaataaagcactccttccctgtggctttaattaccttagaaattacctttaattaccatagaaagctgaccgatacacttattttgggaataacctggaggtgaaattcagagaatattcatatgttttcaagaaaaagagtttcgattcaattttaattctgtgttgctttcatcagaagtttaccacaagtgaaagtggatagatgaccaattagggacccttatgtgatcaatcactggctctctggtgacacttgtgcatcatatgatttcaggtccattccatacgattctgtaactggtcccag

SEQ ID NO: 3040 - DNA, 147 bp, Homo sapiens
tgagacagagttttgctcttgttgcccaggctggtgtgcaatggcacgatctcagctcactgcaacctatgcctcccaggttcaagcgattctcctgcctcagcctcccgagtagctgggattacaggtgcccaccaccacgcccag

SEQ ID NO: 3041 - DNA, 427 bp, Homo sapiens
ggccctcctgcagcgtgccccctgaagcagtttcaccagcagtaaaccgctcgtcacatcaccaacacctaccggctggcgcataccaaaatccaccagcggacggctgatatgccaggcttcatcggcggtgaccagcagcatttcaaaacggtcacggctgtagccagctcgcgccaggtgtttaaccaacacaatttgtggcccttgcgcaatgagttcgcgcgctgccagaaccgcttcttcgacgttatttaccgcatgctcacagagtatttccagctcaaccagatttggcgcaatgatatcgctggcaggcaaaccgtgccgcacatgaaactctgcgacacccggtgcaacgatacagcctttttccggatgacccattaccggatcgcaaaaatatttcgcctgcggattcgcggct

SEQ ID NO: 3042 - DNA, 89 bp, Homo sapiens
cacacacacacacacacacagacacacacaaacagacacacacacacacacacacacacacacacacagacacacacacacacacacac

SEQ ID NO: 3043 - DNA, 684 bp, Homo sapiens
  SITE (64): n equals a,t,g, or c
actctacaacgcgaattcgagcgcgctcgtcaacagggtgcgctagcacaatggattgcggctnttgaaggtggtttcactggtatcgtcgccacctggatacccggtcgccccggtccggtgatggctttccgtgtcgatatggacgcgctggatctcagtgaagagcaggatgtcagccatcgcccctaccgcgacggttttgcgtcatgtaacgccggaatgatgcatgcctgtggtcatgatggacataccgccattgggcttgggctggcgcatacccttaaacagttcgagtccggactacatggcgtcatcaaactgatttttcagcctgcagaggaaggtacgcgtggcgcgcgggcgatggtcgatgcaggtgtcgtagatgatgttgattattttactgccgtgcacattggcactggcgtacctgcgggcaccgtggtgtgcggcagtgataattttatggcaaccaccaaatttgacgcgcacttcaccggtaccgccgctcacgcaggcgcaaaaccagaagacggtcacaatgccttgttggcggcagcacaagccactcttgcactgcatgcaatcgccccgcacagcgaaggagcttccagagtaaacgtgggcgttatgcaggcaggaagcggtcgtaacgttgttcctgcctcggcgttgctgaaa

SEQ ID NO: 3044 - DNA, 3482 bp, Homo sapiens
ttcagagaccacatgctggagagcagtggctttcagacagcatcagcatcacctgaaggccttgttgaatacacattattggaagagaggggagaacacaggctcatgcctgtaattccagtgctttgggagactgaggcaggaggatcacgtgagcccaggagttcaagatcaggctgggcaatacagcaagacccctgtctctacaaaaacaaaaacaaaaaacaaacaggcatggtagtgcatacctgtagtctgagctgcttgggagtctgaggcaggaggatcacttgaacccaggagttcgaggctgcagtgagttattattgggccactgcagtccagcctgggcagcaaagtgagaccctgtctgttaaaaaaacaaaaccaaaaacttgattgctgggggccaccctagagtttctgattcagtaggtctggcggtggggatggtgggcctggtaatttgcctttctaacaagcgtccaggtaatgccccagctgctggtcccaggaccacactttgcagattattactctgagaagagcactaactctgacgttggattccttctgttcctcattagtgaatttatttgggggagattattcaatctggtagatccgcatttacttagctgtgaagtggaggttaatgcaacctgcctgagactgtgagaatgagaaactctaattgaaataccaggcccagcgtgcctggatgcttgaaaaatgctgactcccatggtccgtccttccctcactcttctcagctataaagtgagaagcgaaattcagtatcttttaagattcctctcaggtgtaaaatgctgtgattctaaaagtttaattttgtagttccagagacaatgccaaacacctgtgtgtgcttagtgctttgtaaagagtggtaataacagtgacaccacataggccgtagttttgtagttccagagacaatgccaaacacctgtgtgtacttagtgctttgtaaagagtgaataacagtgacaccacataggccatagttttgtagttccagagacaatgccaaacacctatgtgtacttagtgctttgtaaagagtggtaataacagtgacaccacataggccgtaattttgtttttgcttttgttagggtgttcagcatcttgactccttaaataaggttttcagtcagatttataaagcagcattgaagaagttgtattatatttgagtacagttggaatccatggcagttttatggaggccaaatatatcagatgaataggctaatttccctgagttgctggccttattagtccctactctgttgccccctggttacctaatgcatgttcaaaaggtatagttttcatcacctgcttgatcttgattttcagacagcatcaaatcagttgcaaaacaaatccaagctaaaattttgagtgtatgattaatttactatagcatgtaattatgcagtattttattttttattttttattttttttgagacagagtctcactccattgcccaggctgaagtgcagtggcacgatctcggctcactctaacctctgcctcctgggttcaagtgattctcctgcctcagcctcccgaatagctgggattacagacatgcaccaccacgcccagctaattttttgtatttatagtagagaggaggttttaccatgttggccaggttggtcttgaactcttgacctcaagtgatctacacgcctcggcctcccaaagtgctgggattacgggtgtgagccactgcgcccagctatccagtattttatttaaaagttgtcactagggtgttcactattgtgaatttataatcttaaaagttggggatgctaaaagtaccagactaaaatactacgaggttttctcatcttttaattccattttgttagaaaaaaataatcacaaccggggttcttttacctttccccagccatctagactgctttactgcaatgttgggaagattgcatacaataaaaactgtagctagttgattgggatttgggaaaattgaatcaagcatttgcattcatccagaatggtcttaaactgctgactgtggggtgcccacaggatgagcactggtggcatgggtgggaggaatttccttggatactgcaattgcatttgaaagatctattttccaaaacctgagcagagagaggctaggaggaatgcagacaggacattgaaaatgcgaattccctttactagtagaacatgaaatatctgataatggtttaaaaaaaataagtgccaggatacattgtagtataaaggttcaactagtataatttaaaatgagtctttatattcaggccaggtgcggtggctcacacctgtaatcccagcactttgggagtccgaggcgggtggatcacctgagattaggagttcaaaaccagtgtgaccaacatggagaaaccccttctctactaaaaatacaaaaaattagccaggcatggtggtgcacgcctgtagtcccagctacttgtgaggctgaggtaggagaatcgcttgaacccaagaggcagaggttgcagtgagctgagatcacaccactgcactccagcctgggtgacagagcgagaccctgtttcaaaaaaataagaaataaaaagtgagtcttcatattcaaattagtatatgaggttaggcaacaattcttatatgggaccaggtatatttaatttgcctttctttgcagtcatcctagtaaatccttgtaaagggttattttatatacaattttgtagtatattctaaatcccctttggcaaataaagctgaagttatctagtgtcagcatactgtgatttgtatatttatataagacaagattgcatcattctgattaagttgcagcattttagttttatctgataggcctgtattgagtaatcagtagctatgtgcaaatattaagtcaacttaattaccagacccagaaggccagaggtaatcaaagagtactttcggaagatgaaatatttataatgagttatggaaacaatgttttagaaatgtttttcttggtgtaatttaatgcagatttttacctcaattttgttaaaaaacttgataatttgatccctccatctatttaatatttaatattttcagattctagagtatttaaaatttaaacacaattataaaattaattataattcctacttatgttagctatgatttagggccaaaactaccctggttttgtcttgcaacttgaaacattgtgtattttaaactatataatttgggaacattattttatagactgtggataaccaaatataagatttgtgatttttaatgcttcatttgtgtaaaatcatttgtatattctatttatagtatgcattttctagctcattaaaagtacagaaaaacctcaaatctgtccttatacaaatatttgatttctagtttccttttattaaaacattttcactca

SEQ ID NO: 3045 - DNA, 378 bp, Homo sapiens
agtagttgggactactggcatgtgcccccattcctgattagtttttttgtatttttggtagagatggggtcttgctatattgcctaatttttgtgtttttagtagagatggggtttcaccatgttggccaggctgctcttgaactcctgagctcaagtaatctgcccgccctggcctcccaaagtgctgggattacaggcatgagccaccatgcctggctaaaaccaattctttagattgtttttgccaccatttgcttacttggaatagctttcacatttatttttcttatgaagaaatccagtgtcagtcagaccatgtaacatcaaagcaaaatttcattgaagcctatccttgtcttaattattctaaaataaa

SEQ ID NO: 3046 - DNA, 221 bp, Homo sapiens
tttttttttttttagatggaatcttgctctgtcgcccaagctggagtgcagtggcgagatctcgggtcactgcaacctctacctcctgggctcaagcgattctcctgcctcagcctcccgagtagctgggactacaggcgcacgccaccacacccagctaatttttgtatttttagtagagacggggtttcaccatgttggtcaggatggtctcgatctct

SEQ ID NO: 3047 - DNA, 506 bp, Homo sapiens
gtacttacaatattgcctggtggggcaataactactatgacgttaacgagctgggccacattagcgtgtgcccggacccggacgtcccggaagctcgcgtcgatctcgcgcagttagtgaaaactcgtgaagcacagggccagcgtctgcctgcactgttctgtttcccacagatcctgcagcaccgtttgcgttccattaacgccgcgttcaaacgtgcgagggaatcctacggctataacggcgattacttccttgtttatccgatcaaagttaaccagcaccgccgcgtgattgagtccctgattcattcgggcgaaccgctgggtctggaagccggttccaaagccgagttgatggcagtactggcacatgctggcatgacccgtagcgtcatcgtctgcaacggttataaagaccgcgaatatatccgcctggcattaattggcgagaagatggggcacaaggtctatctggtcattgagaagatgtcagaaatcgccatg

SEQ ID NO: 3048 - DNA, 512 bp, Homo sapiens
  SITE (336): n equals a,t,g, or c
  SITE (493): n equals a,t,g, or c
gtacttacaatattgcctggtggggcaataactactatgacgttaacgagctgggccacattagcgtgtgcccggacccggacgtcccggaagctcgcgtcgatctcgcgcagttagtgaaaactcgtgaagcacagggccagcgtctgcctgcactgttctgtttcccacagatcctgcagcaccgtttgcgttccattaacgccgcgttcaaacgtgcgagggaatcctacggctataacggcgattacttccttgtttatccgatcaaagttaaccagcaccgccgcgtgattgagtccctgattcattcgggcgaaccgctgggtctggaangccggttcaaagccgagttgatggcagtactggcacatgctggcatgacccgtagcgtcatcgtctgcaacggttataaagaccgcgaatatatccgcctggcattaattggcgagaagatggggcacaaggtctatctggtcattgagaagatgtncagaatcgccattgtgctg

SEQ ID NO: 3049 - DNA, 9372 bp, Homo sapiens
gcaggtgcagactggaggtgctgggacccaggaggaggtggtgtacctgcccctgagccttctcctctggaggctggggaagggccgctgtccagaggaacggggcagcctgtgacaccctggcgtccggcccacaggaggcatgtgagcgcagcctggcagagatggagtcctcgcaccagcaggtgatggaggagctgcagcggcaccacgagcgggagctgcagcgcctgcagcaggagaaggagtggctcctggctgaggagacggcagccacggcctcaggtatggaccctggggggggcacagtgggctgggctctgagcctctgtgctgaggttcctcctagccaaactggggaggattttatcaaataagatgtaggggtctcagtgccacatttggggtaaagggtcagcaggtgttagaagctccaagaactggcctgtagccctacttaaaaagggaaactgaggcagtaaaagataccctccccacccccaacaccaccactaccataggtggtgactcttcctgctcaggggcctgcagccaccatagagtctgcctaaaggcacatgctacccacgtgcgtgggggagaggctgatcagctgcatcccctgtcctcataggagtgcctcctccctgggcacatgggccagaccctggggagagcaggggaaggtgtgagcattgtccatgccagctgtgtgccaggcactgggccccacatgtttcccacaggagcacccttcatcctggacaattccctcccctcctgccaccgcacacctgctgtgtgcctggcacattcctaggcatcactaggggtttgcagaacaatagaaatgctggccaatgtcacatgatctgaagctcacaacctgccagtgctgtgccaagtgctcatgcactcgaacccagccttggggccagtgtgctctgcatttcaggaagatcgcctttgcagccgcgtgtgttagagaccccttccccctcagcagagtctggacttcgccctgtaatctggcactaaggtttctgctgtgaaatggataaaaatcacacttaagtggaataataaagaccataaatagcctcatgtccgttcagggtggggattgccaccaaaagatttaccagaggcccggtgcagtggctcatgcctgtaatcccagcactttgggaggctgaggcgggcagatcacctgaggtcaggagttcgagactagcctggccaacatggtgaaaccccatctctactaaaaatacaaaaattagctgggcgtgatggtgggcagctgcaatcccagctactcaggaggctaaggcaggagaatctcttgaacccaggagacagaggctgcagtgagctgagattgcaccactgcactccagcctggatgacagagtaagactccatcaaaaaaaaaaaaggccaggcactgtggctcatgcctgtaatcccagcactttgggaggccgaggcaggtgcatcacgaggtcaggagttcaagaccagcctggccaagatggtgaaaccctgtctctactatgaatacaaaaattagccatgcgcggtggcaggcgcgtgtaatcccagctactcaggaggctgaggcaggagaatcgcttgaaagtgggcggcaaaggttgtagtgaaccaagattgtgccactgcactccagcctgggtgacagagtgagactccgtctcctgggtgacagagtgagactccgtctcctgggtgacagagtgagactctgtctcaaaaaaaaaaagaaagaaaaaaaggagagaaactttcaatgttcagaagtttcggattttagaattgtgggtaaaaccatgggtggccctgagtgggaaaaaaaaagcctcggtctcagtccttaggagctcacaatctgagaataaagccagcaggagctaatgttggggcatttactctgagccatgctttgttctaaattcttcacacaccttccaataaccccatggaggaaaggtactgttgttatcgatccctgttttccagataagggatctgaggcacaaggggttaagtcacctgtgcaaagtcacatcggtttatgctgactgtggagcctgagctcttgaccacgaggctggtcaaagcagataggccttgtttgagagccctcagagtctgcagggggggtgtactaggtggggtcctacctggaaatcactagaacaggaggtaccaatggtcagaccctgagctgtctccccagtagggtccatccaacaggattatcttcccttaatagatgggctgagagaggttgagagcttaccccaagccactcagtttatgacacaacctgggctactctagactcctggttcggtgctctttgcatagcactccttggtccaagtccatagtacttgcatagtactatgtggagtccacatagtactccaccagtacatgtggcgtctcagagctggtggcacttggtgctgctgacccccctccagtctctcttgtgcctctctgccctgcttccagccattgaagccatgaagaaggcctaccaggaagagctgagccgagagctgagcaaaacacggagtctccagcagggcccggatggcctccggaagcagcaccagtaagatgatgccggggcccaactgcccaccctgatggttatgggttgaggaactttgctgaggccccttggcagcggacacatcagtttgcccctagctgagattcctgctccagtctcatggatgcaagaaacagaagcagaaggtcctcaggcagaccccatgccagtcctcacagacagtccttcaggcagcttcttgtcttggctggtcccagcctccacccacctcttcacccctttagtctcccctggagctgggctgcagtgtcactgttgaccactaggcctctccctgccccagagcacagttttggaatgttgaggtttcaggggctttaactttaaagatgggcccctccagccgggcacattggctcatgcctgtaatcccagcactttgggaggctgggatcaggagttcgagactagcctggccaacatggtgaaaccccatctctactaaaaatacaagctagctgaatgtggtggcgggagcctgcaattctagctacttgggaggctgaggcaggagaatcgcttgaacccaggaggcagaggttgcagtgagccaagattgtgccattgtattccagcctgggcaacaagagtgagagcaagactccatctaaaaaaaaaaaaaaagatgggctcctccaagccaccctcacttagggtaaacacctgtagcccagagaagctgtcactggttcacagccccacagcaggctaaaggcaaacctagagagggaaccccagagtcctgggatgctttaagtctacctgactggactccaggcttggcaggagcaagacaacctatgctctcctctgctcctcctctggggcaggtcagatgtggaggcactgaagcgagagctgcaggtgctatcggagcagtactcgcagaagtgcctggagattggggcactcatgcggcaggctgaggagcgcgagcacacgctgcgccgctgccagcaggagggccaggagctgctgcgccacaaccaggtgggcctggccccaggttggggggacacgggtgggtcccggcacccctcccctgaccaccgtgcctctcccaggagctgcatggccgcctgtcagaggagatagaccagctgcgcggcttcattgcctcgcagggcatgggcaatggctgcgggcgcagcaacgagcggagttcctgcgagctagaggtgagtgtcctcactagcaccaggcagcccagtggttctcggggcccggggctatggggcacccccgccataggctgggtatcacctgtggcaggaaagccaagtctcccagtggctgggccagcctgactaggctagaacacctactgtgcatccagtagccagcattctgccctcccacctgcattgtgtcacctacctgccgtgtaccatagcaaatcactccacttttctgagtcccagtagctcatctgtaaaatggcaccagcaccttccttactgggaaatattggggtaagaaaatatgtgtgtatgtgtgtgatgccagtatcactgtagtattttctttctttttctttctttctttttttgagacagagtctctctctgtcacccaggctggagtgtagtgacacgatctcagttcactgcaacctctgcctccctggttcaagcgattctcctgcctcagcctcccaagtagctaggattacaggcctgcaccaccacacccagctaattttttatatttttggtagagacaagtttcactatgttggccaggctggtctcgaactccggacctcaagtgatctgcctaccttggcctcacaaagtgctgggattacagcatgagccaccacacccggccttagtatttatttctttactttttttttttttttgagacagagttttgctgttgttgcccaggctacagtgcagtggcgcgatctcggctcaccacaacctccgcctcccaggttaaaacgattctcctggccgggcgcggtggctcacgcctgtaatcccagcactttgggaggccgaggcgggcagatcacgaggtaggagatcaagaccatcctggctaacacagtgaaaccccgtctctactaaaaatacaaaaaaattacccgggcgtggtggcgggcgcggtggcgggtgcctgtagtcccagccactccggaggctgaggcaggagaatggcatgaacctgggaggcggagcgtgcagtgagccgagatcgtgccactgcactccagcctgggtgacagagcgagactccgtctcaaaaaaaaaaaaaatattaaaaaaaaaaagcgattatcctgcctcagcctcccaagtagctaggattacaggcatgtgccacctcgcctggataattttgtatttttagtagagacagggtttttccatgttggtcaggctcttctcgaactcccaacctcaggtgatccgcccacttcggcctctcaaagtgttgggattacaggcgtgagccaccgtgcccagccgatattttatttctctttttttttttgagacggagtcactctgtcacccaggctggagtgcagtggcaccatctcggctcactgcaagctccgcctctcgggttcatgccattctcctgcctcagcctcccgagtagctgggactacaggcacccgccaccacacctggctaattttttgtatttttagtagagacggggtttcaccatgttagccgggatggtcccaatctcctgacctcgtgatccgcccgcctctgcctcccaaagtgctgggattacaggcgtgagccaccgctcctggccccaatattttatttcttcaacaaacacttaggtgaggctcactctgtacctagaaattctggaagccctttttgtctgttaactcatctaatcttcctgacagctccatacattagctactatgactgtccccatttacagatgaggaaactgaggcacaggaaggtcaagtaccttaccaaagcttttatagctggactgggatttgaaccaggcagtctggctccagtctgagcttttaagcctccccagtcctggctgaacttgtttcctccttggtcaagtcagcagcacctagccctcggggttggggaggggttaatgaggtgccttgtggagtggttcagcctgctcaggtttatgtagggcttcttttcatccatctcactcccgaggtgagagcctggtgctgcatgagggctgcagcagacttgaccgtgagatatccactcacacgggctggacaggggtgagagtaagggaaggcaaagcaggggaatcggagagggcttcctggaggagtccgcctccaggatgtagagggtttttgtgcagataggggctgcattctaggggcctgaggcagagagaacccgggctgcagggcactatgggccagggtagctctggcttctggccctgggtcagtccagcacctatatccccaggtgctgcttcgcgtaaaagaaaacgaactccagtacctaaagaaggaggtgcagtgcctccgggacgagctccagatgatgcagaaggtaggtccttccgctgggctgggggccgtcggggactctggagccatctggatgccatcctgtgagcacctgctctgtgccaagccctccactcgcttcatccttcctcaggctctcctgtgcttctcccatgtaggtgtcatcatccccattcactgacagggaaactgagactaagaaaggggaagtgacttccccaaggctgtacttggcttctgtttatttagcattatttaatttattgattattattgagcacctactatatcctgggcactgtgctaggtgctgggaagacagatgtgaacaaaataaccccaaatctctgctgtggggagcttgcactccagtgagaataaccacgttgctaggagttgggtgggtcagggttcagcccaggtctgagtctgcagcccgcctggcccacccttggctgctatgtcactgcctggtgcgctctgtcagtttggggcaggaagtggacatgttggtggctctgtaagtgcacgtgagccagaccgtgtttaccgcacttgaagaacaggtggcgtgaactcacaggaagggcccgagcacccagccaggctgacctggttctcatcccagccactcactgccctgcggtcttggtcaaaatcttctcccccgaaacaggatgaggatgacaatgacgcctgtgtccctgggtggtaccagggaggtgggaggggtaagcccagaacccacggccatcttggggagccacctggagggatgaagcgaggtatctgcggggaggtctggctgctggtgctgcccatgtgcccggttggcagggctggagggagagacttcatgccctcatacctgcctcctgccccccaggacaagcgcttcacctcgggaaagtaccaggacgtctatgtggagctgagccacatcaagacacggtctgagcgggagatcgagcagctgaaggagcacctgcgtcttgccatggccgccctccaggagaaggagtcgatgcgcaacagcctggctgagtagaggtggatgccgaggcgtgtgccctgcagggtgggcaggggctgaggctctcccacacccgggactccctggaccaccccagccaggccacttccttcttctggcctccaattcccgttctgtaaaaaggacaatgaaaccagcaacacggggttgttgcagagatcccatcagacccgggccacaggctgcttcatcagcttaagcctgttcctccagagctgggcggcacagtgcagagccacagcctactcagtgcaccccccttcttggggctggaggcaaatgcagcgtgcacatccctgacccccacagtgaatctccactgagcttcacacacacacatcgcacgctgaggccgggcttctatcccagttagtcttaacactccttcttgacttagcagggctcaaagtggttggttggttggttggttggttggttggttggttggttggttggttttggttgctttgagaaaggtcttactctgacacccaggctggagtgcagtggtgcaatcacggctcactgcagcctcaacctcctaggctcaagggatcctcccacctcagccttctgagtagctgggaccacaggccctcaccaccatgcccagataatttttgcactttttgtataggtggggtttcgccgtgatttcccaggctggtctcgaactcctgggctcaagcaatacacctgcctcagcctcccaaaattctgagattacaggtgtgagccgctgcacctggccaaagtgttcttatttttgctttttcaacgccacatctacctggagcatcctctttctgataagtcctcatggacttcctatggcatgcaggagaggccaccctatggctgagctgcttgggaaggagccaggaagagcggatctggctgtaccttaggggctgagaggtggtggaaggacccactcagcacccttgcttggccttggggtggcctcgcagcccctcagcccaggcctcagccctgccgcaccttgtctttcaggtcccgcccagctgcagaccctccaggctggaggaccagccgccctccttccctcctggatggaagtaaaaagccaagctttctccccaccctctgtgggccacacgtgcacttgcacccaccacacacacacacacacacacacacacacacacagacacacagacacatacgcacacacgtgcacacatgtacacacggatacacacacacacacacacactgcatatctgagcgcgcccctcgcactgggtctcaccttgcaccttcttcaggattttatatgtgaagagatttttatatagatttttttcctttttttccaaaacactttatactttaaaaaaaaaaaaaaaaagcaattcctggtggctgtgtgcctccaaccctggtccccctctgtctccagccaccctctgcttgggcttctgagctggtggccctggcccagaggtctggcggaggcccaggcagcagccatggcggggtgtctctacaggggagaggcgggagcctgccaccctcttcctgccctacctcctactaacacttcctgccccatttggacccgtaccatggggctcaggacagagggagctagcagctggcctccatggccccacagcctccttcgaggctgtgctgggtgcagaaccgccagagccacccaaaaggtgtttctcttctgctccctgaacctcttaacttaataaaacgttccagcagctctggtgtcctagatggctggcagaacaggaatggagattggggtttcttgaagtggcttccccactcacaccctacccacaccccacccttcctaaagcagcggcctctaggcttctgagggtggggctgaaaatccaaggtctcccttagtacagactgtgacgcccccagtgtggcttgcaggctagtggcagcggaagcatgtgggaaatagcaagtccagtcccaccccaacctactgaaccagcgtctgcattttaacagggtgccccagtgattcacgtgaccttcaaagtctgaggagccctggagtagggcccagggcccaggcctgagagagaggcctggggctaagactagccctgaccatgaccttgggcaagtcacacccct

SEQ ID NO: 3050 - DNA, 351 bp, Homo sapiens
cactcccagcagtgggtattattagtctgagatacttgcccatcttgtctactaagcattattttgtattacatcatcagtttcagctcatttactgagcacctgccacatgtcaggccctggcctagaccctggggactgcgccagtcagatgttctcagtcttcagggaatttatggtttggcagaggtagaaccttttgaggcaggggagaggctgcccagagacagagctaggagagacatttaaactgggctgcaggtcagtaaattacccagggaggtaaagttgccaaaaaaacattccaggccgggcacagtggctcatgcctgtaatcccagcattttggga

SEQ ID NO: 3051 - DNA, 274 bp, Homo sapiens
ctttcagtcccagtcctctcctgaggcttttcccagaggtcatgcccagccctgggcaggggtgagggcagggttgtggctgccaggcacaggtccagcgggctgggagtcctcaccatggctggctgtgctgattatggttgcatggggctgggaagaggtcccatttctgagccacagaaacaggccacatccagtaggggtcctggaaggctgtgagaacccagaggagaccctgacccagcctgcaggtagaagactgcctttggaggca

SEQ ID NO: 3052 - DNA, 557 bp, Homo sapiens
gaagaaaggaaagaaaaaaaagataaaatggaataaaagtgcagaatgctgactccctcgaggcttttcctaaccattctattctatggtggatgctacggtcagcatgtttttttaattgttgttttttgttggtggggggtgtttagatcattaaagaaatggtttcatcatccactttctctcatgtcccttttctcatcagctggcatattccaggccatgtgtctcctgatctgtgccgagatgtaccaagtgtccagactgcagcacatctgtgagctgttcatcattacccagctgcagagcatgccaagcagggaactggcatccatgaaccttgatatagttgacctgcttaaaaaggccaaggtaattgactctgtgtatctgatagcctagttttttataaaatatttttcaaattatactattttaaaatttatcattttttaacatacgttaatactagtcttagtttggaagtttggctaatgaggctaaagtgccttcacaacagtttatctggctagataattttgaagcgttagggtttg

SEQ ID NO: 3053 - DNA, 16123 bp, Homo sapiens
  SITE (7382): n equals a,t,g, or c
  SITE (7383): n equals a,t,g, or c
  SITE (7392): n equals a,t,g, or c
  SITE (7393): n equals a,t,g, or c
  SITE (7395): n equals a,t,g, or c
  SITE (12581): n equals a,t,g, or c
gccagcccacagggccatcctggtggcccgttgtgaagtgatggcagccatgtttaatggtaattacatggaagcaaagagtgtcctgattcccgtttatggtgtttccaaagagactttcttgtcatttttagaatacctgtacacagactcctgctgcccaggttagcaatacaaatgttgatagtatctcagaattctttctttccttgccacccattttgttaaattgcactctgtggaatctattttcatttaagatttattagttgacatcacggaatgtactaagcaattagaggtggtgctggaacaacaatgaattttcattcagttcaagtggaagtgcagtgattgggtgccttttatgggtctccgacgccggcacaagttcacatgtcccagccagcacctacagcatggggatcactgtaggcaactagaaatggaggtgtcttgtggtacccatggctaccgtaattctagagatcggggcagattgttacttggagcgctgtctcttccacaagaagaggagggttgcgcaactgctttgatgtctgtgacttctgattggggcacttttaaggactttcaatattctgagacttttttggtcttccttctgcccagaggatgtgggatttgtaaaggcctccttctgacttctgctaaagtcagaaactcctcaaactgacttctctgaaaacttttcttgagatgtttagaatacccagtggactgtaggattcatttccaaattcactgaccaaggactatctttgaccaggaaccaaacatctgtgacagctctaggttggaacagatccagcagggttcttctagctggaggcacttgaagaaatagcaaaattttttctacaggcctggagccttgcttgggatgctggcagggaagccctctgtgagtagtcttcagcctttggccaccagatggctcccaccacaagcacaactagattcggccccgtggagctcagttcaggagcctgagaccttgattagagaacctggtcaggcaccctaataaacataaaaagcaaacacacatttcaagccagacctctcttcagattcactgctttaatttttagaatggaaaggtttcttacactgggtattgaaataagttttaaacaagtcatgagccctctagtgaaagattttagaagttcaaaaagaagcaaatgtatttgtgttgattaaattaattctgggcttgcagctttctgtagagtattttggagccagttgcagttgtttctgtcagtgttaaagactgacttacggccaggtgccgtagctcatgcctgtaatctgagcactttggaaggctgaggtgagcagatcacctgaagtcagttcaaaaacagcctgaccaacatggtgaaaccccgtctctactaaaaatacaaaaattagctgggcatggtgacgtgtgcctgtaatcccagctacacgggaggcagaggcaggagaatcgcttgaacctgtgaggcagaggttgcagtgagccaagatggcgccaccacactcaagcttgggtgaccgagtgagactccgtctcaaaaaaagacttagtatttttgcctaataaaaatgaaagcatttgttctttttggaaataaagcttattgtttattatttcattgttggcaaatctgtatattaaatttacaaattgaccagatttggagtaataggaaaatttgattttcagtcatcctctcactcaagtaattgaagctgctaatattaagttttaccttgctaattagaaaatattacagaggaaagcagtaataatgataggatttttaaaaattggcaaaagtgtgttagggaaaaatgagtcaaaatgaataatcaaaaagttaagccagatactggaatctgtgcattgggaagatcacagaagacaggtaatgttattatgttaaatattcaccatacacagtgttcttggttccatagctacaaaagaatgtaagaatgtaaggagggataagaacgagaattacatgaaaaaccagatttctagggaagtattgaaaaaacccccagccaaattgggtggttgccaggggctggggaaagggggaaacagggagttagtgtttattgggtacagagtttcagtttgggaagaagaaacatgttctggagatggtggtggtgatgactgcacagcagtgtgaatgtacttcatgccaatgaatcatatacttaaaagtggttaaaatgggccggatgtggcggctcatgcctgtaatcccagcactttggaaggccgaggcaggtggatcacaaggtcaggagatcgagaccatcctggctaacacggtgaaaccccgtctttacaaaaaatacaaaaaaaattagccgggcgtggtggtgggcgcctgtgctcccagctcctcaggaggctgaggcaggagaatggcgtgaacccaggaggaggagcttgcagtgagccaagatcgcaccactgcattccagcctggacgacagagtgagactccatctcaaaaaaaaaaaaaaaaaaaaaaaaaggttaaaatggtaaatttcatgttatgtttattttatcataataaaaacaaaacaacaaaccaaccaaccaacctgaagactaatgtcaagaaaaaaaaatggcaaggatctagtttagctaacggaaagatttaccagatagtcctggaattaatttttaagggcaattatagaatcaccttttctgaagaattaaaaaaaaatagattcacttctgagtatgaaggcttggattctttttatttttacttttttattttatttatttatttttattttattttatttttatttttatttttttgagatggagtattgctctattgcccaggctgcagtgcagtggcatgatctccgctcactgcaaccttcgcctcccaggttttagtgattttcctgcctcagcctccccagtagctgggactacaggcgcccgccaccacacctggctaatttttttttatttttagtagagatgaggtttcaccatgtccgccaggatggacttgatttcttgacctcgtgatccgcccacctcggcctccccaagtgctgggattacaggtgtgagccactgcgccggcccttctttttaaaatggaataataggccgggtgtgatggctcacatctgttatcccagcactttgggaggccaaagtaggaggatcatttgagctcaggagttcaagaccagcctgggcaacatagtgagacctgtctctacaaaaaaaaaaaaaaaaaaaaaaaagaagaagaagaaaggaaagaaaaaaaagataaaatggaataaaagtgcagaatgctgactccctcgaggcttttcctaaccattctattctatggtggatgctacggtcagcatgtttttttaattgttgttttttgttggtggggggtgtttagatcattaaagaaatggtttcatcatccactttctctcatgtcccttttctcatcagctggcatattccaggccatgtgtctcctgatctgtgccgagatgtaccaagtgtccagactgcagcacatctgtgagctgttcatcattacccagctgcagagcatgccaagcagggaactggcatccatgaaccttgatatagttgacctgcttaaaaaggccaaggtaattgactctgtgtatctgatagcctagttttttataaaatatttttcaaattatactattttaaaatttatcattttttaacatacgttaatactagtcttagtttggaagtttggctaatgaggctaaagtgccttcacaacagtttatctggctagataattttgaagcgttagggtttgtgtgcagtcccttttataaggaggcaaaatgtccagatacggaatttttttaactaaatagtggcccttagtagagtcatttgaatgtggtgctatactatgtcacataggcattgtaggaaatagaatttatgttgaatttccccaaacaatcacatcttcaggttcctaaaagggaaatgacagaattggtccatatatactgatagcgatggttaagctaaactaatttacttcttcattttttcatccatataatgaacatgttttgaagtttcagttgtatgtaggagatattggtgtgcctcatttatccttgcagaatgccttttgttttcatgtctcaccttattagcaatcactgccgtatgtgtacatgcttcttctgggcctcttgtaagctcggagtcttttgttttcaataattatatcattactgattttagagaacgggggtgggggagttacataattaagttaattttaagtaactgcagttacagaggccctaaattatgaatcagagccaggtctgtaaataaactaggactactgtgttgaaatctacttcccaaacccccagatgtgctcacagtcaaaaacctgccaaatccttattcccactttctttcattcctggaagcagaaagcttattcagatgggccatcctaccgttggccattctgccattccatccactgcccgagacagtttcagcacttgtggtagttatggcacactcttgtgtactcaacttgtggtaagccgagccctctaggtttttttcacaggaatatatttgttcaatcactacagagtgtcagtacttcttgaactattatctggcatccaacatgtctatacctatcaactttgacgtccagggttacaaaagcatgacaacttttatctccatccacattgctaaaatggagccacatgatggggcaaattccagatctgtgacagctgaatgcttgcctccaagctgaaacgaattcattcatcaacacttctgtttatagaagggaatttatttgaagcatctaggtcttctcctactatctccttaactattttggacttcatttctctcataatcaagtcttacgatcacatgtatttaattagggctaaaaacaaatttaaaaattgagtagggccaggcgtggtggcttacgcctggaatcccagcactttgggaggccgaggctggcggatcacgaggtcaggagatcgagaccatcctggctaacacagtgaagcccagtctctactaaaaatacaaaaaaaaattagctgggtatagtggcgggtgcctgtagtcccagctacttgggaggctgaggcaggagaatggcgtgaaccctggaggcggagcttgcagtgagccgagatcgtgccactgcactccagcctgggtgacagagtgagactccgtctcaaaaaaaaaaaaaaattgagtaacactgatctctttttgtaaaacgtttacattcatctcatgataaatagctcccctctaaatttagtttacaatttttaaaattctttctagtagtttcacaatctcagttcatttttgatgtatcattttcatactattctaacaagttgttcatactttttaaaaaattggacacaagtttctttttccttatcttttagtatcttcttaaattgtttatgtataagagaacttcccgtgtggtcacattgatttctttaggtgcctcccctcactgcccccctacacttggttcctcatcagaatcatttttgattgcactgtcagaaattcttgacttgttttccctgattctctggtttctgactctgtgattatccttatcttttccccttgaatttcaaacaatctaagatacaagctcattttgaattttgtttctgaagactttttattttctaagattaagcctaaatttaccagttttcctgtattcttttcctggtggttcctaatttggcaattgtgaattccagataacagaagttttcttcccaagttttctttgaagttcctagtttgagatttcacttcaccagtcagttcaccctgttggtcagaatttggttaacttttgccttgccatttctctgacttttaggagtgaaattgtcttctggcagaattagactcccagtagctctccaaataatcaaaatttctgaacactctgccagttttgtactgtgtgtcaggaaacatcattcatactttcttagatagatgagcagtgtgggtattctctcacttctctgtccattttcccctaacctctctcagttctttaccatgatttaccttcaggtttccatcaaggaggactcttaaaatacaagagttgaggtggagattccgtatctctactcctgtttaaaccctatctgttcaaactttggtgattcctatgaagttgtatttattcttgtattaaaaattttaatgcatcttcttatttataatctatatgttaatatttggctatctgaggcacaagttgtatttctgagagtttccaggtactttcttgtgagtttatgggtattttctccacgttcttcttgtagctcttaagttctattgcatttggtttatggttttttaatgcctttttaaaaattctgttgcttatttcagtttgaacccattttcttacgtcaacacatatccttctaaaacctagtttttacagtgagacatgttccattcctgttacagagtccctagactatgaatctgggccaggtctgtacattagctagaactgctctgttgaaatctacttcccaaacccccacatgtgctaccaattcctcattcctcagttctttcattcctggaagcggaaagcttattcagatgtgtcatcctactgtatttaagatattttggataatatcttaaatcttggtcaaaaataaaattcttcatttttaagcatgcttggtagccagctgtttatttctgtgacctcccttttccttctcagtcacagcccttaaggcaatgtcctaacctcctggtgttttgttatctgctctgggttaatcacgtaacagtagtggtggcttctctaaaaagctgaaggttcttattcttttcccttgagattgcacacattcatctgctaaaagataaggggaggaaaaaaactgttaaaatgttatgtgggattagataaactataaatttatttccagttcaaaaattgattttatataatgaatataagagggacctgtgaatttgtgtttaaatactctcacactatacagctttaaaaaaaaaaaaaagcatatccttgagtttttttattaaggtttagagattactaatctttcttcaatttagcattacttgttgcttatttaatatttttgcatctccttagaagagctatacttagccaaaaggtggaaacaacacaaatgtccattgacccgtgaagagattaaatcaaaatgtggtnnatatatgtnnancaattgggatattattcagccttaagaaggagtgaaattttgatatctgctacaacatggatgaaacttggaaaatattaccctaaatgagccaaacataaaaggacaaatattttagaatttcactatatgaggtacctagaatagtgaaattcatagagacagaaagtaaaacagtgggtgctaggatctgatagggatagggagaaaacagattgtttaatggtacagagtttcagtttggggtgatagaaaaggcctggaaatggatagtggtgttgggttgccccaccatgtgtatgcacttattagtgacatttaactgtacacttaaggattgttaaaatggtaaattttatgttacacatattgtaccacaataataataataaaaaaaagagttctatactcatgtgccaaagttgcctgccagcaagttactgtcatctgcattggtggttggatggatcagtgagtgtcactggatgggcaccaaggtgatgatgtcagtggcctgcttgcttggagttttccctccattagcagctattggaactcagaatgaggagaatggagctggaaatcctgctcagtttactgtacatctcattaaaagcaaatatttagccacagctttctcttagaaacatttacacattgaaacccatgccttcggccgatggtgtttcctcctcaaaatattttttggcttgctcctcaggtgaacttgttttaacattgctcaccatcatctactacacagatacaggtgcagttattgaagtccgtggcttcagattaaaagctcaaattaaatcttcaagaacctcagatgcagccatgcattgcttaaagacgtttggccactccggcagccgtagattgttattcgctgttggcctggcttcttccgagaatgtacttttaacgttatttgctaatagtgctccctcatcctgtctgctgtcacagtatactgaaagctgcatcaggtaaaggcacattaaacatgaatatgggctctccgtgattgctcccaggccgttctcttgatcttatcataccagtggccattatgtgcaatattatttcacttttcatttttcttgcagtttcaccactctgattgcctttcaacctggctacttcatttcattgctactaactacctcatcttcagtcaaaagcctgaatttcaggatctttcaggtagattgctaatttctgttttgaaaagaaaactttatgttctttgttcttagatttgagacataagttgtagaagtagtacttttagcaaaataagaatagtcaatgtaataaatttcttgtaaattatgcagtgtggtaattgaggaaacaatttatagtcacctgtgttacataagtgccttaacctgtgttacacaagaagttttctaatgattattttatagctccatccgtttttaaatgcattttctttccctgaaatagataaggtgacaaaatgtgtcctcaggtgacatttggttgtgaaaagtgatatcttagttctaactacctaagtcagcagcaaagtttaaacagtacagatttaaaaattttttataaaggaatttaactcttgttaactatattatatttagctttattgtactggatatctgtatttactgagtatacctatatgggagtcccttatattactttggaataacagtttttcatatataaaaaatgttgtgaaacttactgggagtgtatgtaatatgctttctaaggtaaattataaaaattaaaaccaaagtgtgaactactgagtactgcataaaaagaaaaaaatgaaaatataatagttgtcagaatagacagtttagatgcagtggtttgctcatgttattatctagcatagactcaaggaaaatttgagctaaaaagaaaaggaagtgaaagattacctgatcaaggagtttcacaatctggacaaataaatctccgtggagataactgaagtgtcttctagggtgggggacagaaagtagggagtgggtgaggagaaggagagagagagggagtaagggaaagggaaagagaaggctaaaatttacagttcttggactcttccctccctccttcagtcatagtagttccactttatctgtttcatatcttgagttctacctaaaattttacttcgtaaaaaagactctgctggtaaaagatataaaaatcatatggtcaagatggtgattccacctcggtgtaatcccagccaacttgggaggctgaggctgaaggatcacttgaacccaggagtttgagtccagcctgagcaacataacgagacttctgtctctaaaagaaaaaagagtaaaaatctcttgtttttattcagctacttgtgcagttaaagaaaacccaggaacacacaatccgtttttgggagatgtattcagccagtcaacaaacattatatgtctattaggagcctccttatataagtcaactattagtacagtagagaagcataatcacatcaaaacaaaacaacagttatttattagctatgtactttgtgcaaggaaaaaacagtcagttcataaagataaggcttgtgtatgcttgctgtcagaaggaacattcttctatagttatttaagtagctgcttctatagttatttaagaagcttgctaaaagttaaatgaattgcactttggtcctggagccagtttcattatgttacctgaggtcactcttatttgtaagagaagaataagattattttctacttactatcttgtatagatatatggtatatatggagtactattacaaccttgggagaaggatggtctataaatccttttagttatgaattttcattatatggtattacccaattacctataaagtatgttatgacacctggcatggtgcaaagcaggacttccagtgcgatgtgaggtggcaggctaaggaggaaacgatgtgtcgatgttgccttctgttcctttgatgggaattaaaagggaatcatgagaactctcattctgcagtgcctcttcctgtccagggtcctgctatgaggtgtcatcctcttgggcagaggaaaaaagcgccttttggataagggagaatttaattgtctaaatcaatagttactaactggccatctatggtttaggtgtagcctgccaacgtgttttattgggaccccacagttaaaaatatatagtactggtatttaaaaataaccatattttggcttcttttgaaaaattggaagatctggctaccccaggcccatcatcctagtggcaacatgtggcttggcgctgacggcccacctaaaggagcatgccctctccagagggtcgcagtcacttctctccagtgctttacacctggcccactgcacatggtcacctgaagttgggaaagtttcttgtcacggtcactctacagcttccttatagaactgtccatcttcagcttgaaaagttctcaaattattattggaattctacaacttgttttctgttgactgagaatttttcatttttagaggtgtttagaaatcaaaaagtgagactggaaaagatgtcatgtcagtacaggcacagatacatcagaacccagttaaataggtcattaagtattagatttttatatactggactcatgaacacaaacagcggtgcacaggaatatgttacccttggcatttatggattcattattctcgcagtttaatttagctcgatattatgtgttctgtgttatggggttttgtttgttttgttttgctggctgccagagctcatctctaataacttttctctggtttttaatatttactgagggagtagtctcatgtcacctttgcttcctcttgaaacttagagctgagcagctagtttgtatggtcctgcaggctgaatcaagaccctgttaatctgacttataatagatgaggttaaacagtagatggagaatcaagtaattctcctgcctcatcctcctcagtagctgggattataggcatgtgccgccacacccagctaatttttcttttcttttcttttttttttttagtagagacggggttttgccatgttggccaggctggtgtcaaactcctgacctcaaataatccgcccgcctcggcctcccaaagtggtgggattacagacatgagccatcgtgcctggcctccagcaaggtctttatgatctatatcttgagtcgacctcctatctcattctgtaacctagaatgcctaactgtctgggaatgcagcccagtaggtttcagcctcattgtccccagcccctattcaagatgcagttgctctagttcaaatgcctctgacagttgtgcttcaccaaacctagagaatgaacaaagcgaaggacctggagttcaagaatggagggatccaactccaaggcaggaagcaggtccagaaagcaggcagggcagcagcaacagggaagaacagcttatctgatgactggctgggtgggaagcacaactgagaggacttgaaggactttggaagactaagttagctacaaagaaaactaagtattataccaaaaaaacttatccgggcgtggtgacaggcgcctgtagtcccagctactcgggaggctgaggcaggagaatggcgtgaacccggaaggcagagcttgcagtgagtccagattgcgccactgcgctccagcctgggcgacagagcaagactccgtctcagaaaaaaaaaaaaaagaaaagaaaagaaaagaaaagaaaagaaaactaagtattataaatggaaaaaaaaaataagtccgttatatccaggaaaaacaaaagctttattggaaaagaaaaggaagccaggcgtggtggctcatgcctgtaatcctagcactttgggagtccaaggcaggcagatcacgaggtcaggagatcgagaccatcctggccaacaaggtaaaaccccgtctctactaaaaatacaaaaaattagctgggcgtggtgtcacacgcctgtagtcccaactactcgggaggctgaggcaggagaattgcttgaactggggaggcagaggttgcagtgagctgagatcacgccactgcactccagcctgggcgacagaatgagactccatctcaaaaaaaaaaaaaaaagaaaaggaaaataatgaaatactactcngaagtagtggacaagatatatataattggtaagtcacataataactttaaattccgtgatactaatttaaccaaaatggtagtaaattatttgggaaaacttgtgggaatggtaggagatgtatcacagagctggatctcatctattaaagaggaaatcaatagctgatatcttaattgatccataataaaacatattcggttaacagtctttttcttaaaacttcagtggaagaacgcagttttgttgaaaagcacagatggccgtcgaatatgtacttgaagcagcttgcggaatacaggaagtatattcactcccggaaatgtcgttgcttagtaatgtaacctggagcttttatacactacatttcttttttattattatgaagaatgggatacctccaggttccagtaaaattcttctgaccgaaaccaatgtgggtgttagaaaaattaccatatagcttaatatgtttattagttctctttggaaaaaaactaccactgtggtcttaaaagggaacaaaatataccataggctaaaactaaggctttcactctagaatgcaaagctgttttgcagctgttttcccttaaagatgtcctgttgctttagtgatatttagacccctctcagttaagaaatgcttagattaaaaaaaaaaaattacgtaggattaatacagaaatttaatcatgtctgattaattgctctattaaaataaggggcatttaaagacccagcataaccatttgtataatgagaaatctaggggaaaaccaatcagtccaacatgagattttaggaatagaaatttgccggccatttggaaagtgaaatgccacttagttctcaattgatgacagtgtttgaatcatcataaaaaaaatacctgcttttcatctggacaacccaattgagccactttatctccttttggcaatctgagtaggcggggaacctaggcagggctggctttcttagcgtgtaacttgtgtagcagcacagggcccacacttagaaggaccccacacttggttcaaggctctgctatagcggaaattcttaataatgtttgaagaagggccccatgatttcattttgtgctgagccctcaaaattatgtctgtttcgtggtgggaaatatcctatgttttcttgctcaaacacctttctctctgaaagcagaaaaaggcactgatataaagggaagagaaggaggctcaccggagggaagagaacatagtgaagattcccgcctttggggaggtctggaccacccagggcctccactgccaccttggctggcaagggagaaatgtgttgtgttgtcttagctttaaaacagtcacagttcttgctctatcatagatgaacaaatactttcttgatcattctgtaagaccaggaggttggtaagagtgactaaccagcctaactttaatacacatgtataaagatgttcacagagaaagatgctctgtagagaatttgctaccgaagttggctcaagaatttgtttttagtgttatttaccaagattaggacgtcagtggcttaaattctttgaattcttttcaaggactgcaagattatttgataaagagtagcatgaatcttgtgctctaatattacacagtaagttcaaagaaaggatgtaagtcaaagacttgttacatagagggaaaatggactgggatagaggacagactgatagtttctttctttcatatcacatgtatagagaaataattatatcagaaactcacaaacctagacatggaaaaacagattactgtctattgtcagcatcattttcatctgtaagtcactactggaatatatttttcttttaatttccagtgactttagaatacacacagtttttccgacttttcaaaaatttgattaaatggttttatagtataatattgggaccccataccgttagcccttgtatgtataccaacactgccaaagtaaaacattaggtcaggcatggtggctcaggcctgtaatcccagcattttgggaggctgaggcaagtggataacttgaggtcatgagttcgaaaccagcctggccaaaacagtgaaaccccgtctctactaaaaatacaaaattagccagatgtggtggcgcacacctgtaatcccagctactcaggaagctgaggcaggaaaatcgcttgaacctgggaggtggaagttgcagtgagccgagatcgcaccactgcactccagcctgggtgacaagagcgaaactccatctcaaaaaaaaaaaaaaaaccaaagtgaaacactaaaaattccctatagatatattccaggaaatattttaattgggctgattttaattaggctgtatcattgatgattactggaatcgattttatgtcttttgtattttaatcacttgagttaatcaaccactggcaaatcccatttgacaaagattagcattgtaaaaaacagatactgtggtagatttctagaaattcattcacatttaagacttctaaaatggaataatagccttttgtttttcatgagcatattcgcacccctatatgaattacagcatttaaagttcaaaatcagtaacttttaatctaggaaattgaaaaatattaagttgcaaagcaaaaaaaggtattttcttgaaaatactatttaatgtttaactagactataggtagttccttaaggttgtttgacctgaagtggagttgggtttggaagctggtgcccagttggtgtggagtgtgtagttttgttatgaaagttctctaccacctacctgtgtgagtgacaccaacatccagatgtcacagctctccagagctagtcagaagagaaatcaaattagtgtttaaacccatttgcatattgacttgtcagtacctttaactcaatttaatataacaagaaatcgtaaaatacttataacctatcttagagaaatgagtgctggttttgagagttgttttttaactgaaagattatttctagatgggtagtgctttgtgctggtttctgcttccatatatttcccagtcattttaattagagaagatactctatggtagaactaaggcctttcctttcttggccaaagtctttaccctatttaaccctttgtatatttctgactgctcactgttcatattataggggaccagatttgtaatatagaattctccataacatgaatgaaattaattctgtccaagccagcatggtggcttcatattaagtagtaacagaagtctgaacaattggataaatttgacttccaagacagctaaacttttcaactgcaattttaaaaactacactacactgttatagttaatctgacaaaaatgtcctcaaagagtactttattttatttaaagcatctgtttaattcaacctttaataattttgcaaagaagggtatgtgtgtattttaatatagcctgacctgaatttatatgtttttagctttagtatttaactttttgtaacaaataaaccttttttaaaacaagtttaacgaag

SEQ ID NO: 3054 - DNA, 661 bp, Homo sapiens
tcaatcactacagagtgtcagtacttcttgaactattatctggcatccaacatgtctatacctatcaactttgacgtccagggttacaaaagcatgacaacttttatctccatccacattgctaaaatggagccacatgatggggcaaattccagatctgtgacagctgaatgcttgcctccaagctgaaacgaattcattcatcaacacttctgtttatagaagggaatttatttgaagcatctaggtcttctcctactatctccttaactattttggacttcatttctctcataatcaagtcttacgatcacatgtatttaattagggctaaaaacaaatttaaaaattgagtagggccaggcgtggtggcttacgcctggaatcccagcactttgggaggccgaggctggcggatcacgaggtcaggagatcgagaccatcctggctaacacagtgaagcccagtctctactaaaaatacaaaaaaaaattagctgggtatagtggcgggtgcctgtagtcccagctacttgggaggctgaggcaggagaatggcgtgaaccctggaggcggagcttgcagtgagccgagatcgtgccactgcactccagcctgggtgacagagtgagactccgtctcaaaaaaaaaaaaaaattgag

SEQ ID NO: 3055 - DNA, 712 bp, Homo sapiens
cccgccttggcctcccaaagtgctaagattacaggagtgagccaccacacctggcctagtgctagtaattttttgtcagttgtttctggtgtgtgattactaatacaatgctcttgagaagaacagattgcagaagtttataggcttctgagctcagggaaggcactgaccgagtcccaggcaggcaaatgcagtgagtgaatttgttcagtccaatgtgttgtcagtttccttcgtacagttccatgagatagaggaatgttaggcatatatgtttgctttcttatcccccatctttcctgtccttctcccacacgctacagtcctacacgctatccggatgcttctctaatgggtgggcgtatcagaattttgaggaggaagacagtgaagagcaggtagtttttgtaatttgaaaaaacatacagtagtttgtcttgtaatataatatttagttgtggggcattccttctttctctgctatatatatttttagagatggggtcttcctctgttgcccaggctgcagtgcagtgatgtaatcacatctcactgcaacttcaaattcctaagctcaagtgatcctcctgccttaacctcccaagtagctgggactgcccatctaattaatccctccgctattttttctttctttcttccttccttccctcccttcctccctccttccttcctttttttttttttttttttt

SEQ ID NO: 3056 - DNA, 5572 bp, Homo sapiens
cagatgctcccagaagcaaagtctacctaccacacacacaatatgcagaagggaaaaacccaagccacaagtccctaaacgcctgagtcgtgactcatggaggctgtcctccacccctgccaagtataagaaatgatttctacccacccacttctctaaggagatggtccctcattcctctctcccgagcaggcttcacagcccccttcatagagatgaagccctagtcattaaatgcccagtgatgttacgactgccaaattctatgactatttggaaagttttatcaggtatggatacactccacctatttgcttaggtggccaagatctctgtgcagttgcacagacagtttctgtcctcccaccccgtgagaggttgtgtgtgtgtttgcgggggctgggaagctaatggagggaaggagagacctcctcaggtgagtcaccttgcagtggaactgcttcctgtgtgtgtgaagttcttcaaggaggcaccacttcacgcaatgccccaaacagaaaaatcgaagcaaattagcaaattattttctaggagattagatgttggacaacttcaagctttcacaatagaaaatggcttgttttaaggcagttaaacccaaagcatgccttttttggggttttgtttatgaatatgttgtaatctaagaagagtaatgttcttacagaaaaattagaccttcatgattgcaatctaagtgagaggcaattaggcttatttttcttagagattagtacatcatgttagttcagaaagcatttgtaaaacagaaaaaaaaaggaaatcataaatatcaatttcatcttaacacaatgcaactatcactgttctcaacctgagttcttaatttctggcatgtcacaaattccttgaactaccaatgttgaactaacctcccctgacccagggagttgaatagttttttcaaaggatatgatcaaatctctgttcatgcatgcctacatttattcattttccaaaagcataaattaattctgagggacagaaagtagacttgtgcttgcctaggtttgtgggagatgaaaatgtggctgggagccatggctcacacctgtaatcccagcattttaggaggctgaggcaggaggatcatttcagcccaggaattcaagaccagcctggacaacatagggagacccatctctacaaaataaaaaaattagcccagcgtggtggcacatccctgtagtgccagctacttggggggctgaggtgggaggatcactttagcccgaggttgaggctacaatgagtagtgatcgcgccagtgcactccagcctgggctacagagtgagacccagtctcaaaaaagaaaaaaaaaaaaaagatcaggaatggcggctcacatctgtaatcttagcattttgggaggctgaggtgggaggattgcgtaagcccaggaatttaagacaagcctgggcaacatggcaaaactcagtctctacaaaaaatacaaaaattagctgggcatggtggtgggcgtctgtagtcccagctactcaggaggctgaggtgggaggatcacttgaatgtggggggtcaaggcttcagtgagccgagatcacaccactgcactccaccctgctgggtgacagagcaagaacctgttaaaaaaaaaaaaaaaagcaaagaaaagaaagctggatgtggtagctcatgcctatcatcccactactttgggaggtggaggtgggcggatcacttgaggtcaggagttcaagaccagcctgcccaacatggaaaaattttgtctctactaaaaatataaaaattgtggtggcgtgcacctgtaatcccagctactcgggaggctgaggcaggagaatcatttgaacccgggagggcggaggctgcagtgagctgagatcacgccactgcactccagcctgggcaacagagtgagactctgtctcacaaaaaaaagaaaagaaaatatttgaagctaagactgtggtgatggttgtacaactctgtgagcacacacacaaaaaacgctgaattgtgcactttaaacgagtggattttatgacatatgagtcatatttcaataaggtcattaacaatgtacctgaaagaattacatggtctcatgaaagtactgctaacattttattagtgctagtaatttttttttaatagagatgagggctcactatgttgcccaggctggtcttgaactcctgagcttaagtgatcttcccgccttggcctcccaaagtgctaagattacaggagtgagccaccacacctggcctagtgctagtaattttttgtcagttgtttctggtgtgtgattactaatacaatgctcttgagaagaacagattgcagaagtttataggcttctgagctcagggaaggcactgaccgagtcccaggcaggcaaatgcagtgagtgaatttgttcagtccaatgtgttgtcagtttccttcgtacagttccatgagatagaggaatgttaggcatatatgtttgctttcttatcccccatctttcctgtccttctcccacacgctacagtcctacacgctatccggatgcttctctaatgggtgggcgtatcagaattttgaggaggaagacagtgaagagcaggtagtttttgtaatttgaaaaaacatacagtagtttgtcttgtaatataatatttagttgtggggcattccttctttctctgctatatatatttttagagatggggtcttcctctgttgcccaggctgcagtgcagtgatgtaatcacatctcactgcaacttcaaattcctaagctcaagtgatcctcctgccttaacctcccaagtagctgggactgcccatctaattaatccctccgctattttttctttctttcttccttccttccctcccttcctccctccttccttccttttttttttttttttttttgagatggagtctcgctctgttgtccaggccggagtgcaatggggcgatctcggctcactgcaacctcccacctccccggttccagtgattctcctgccacagcctcccgagtagctgggattacaggcgcgcaccacacctggctaatttttgtatttttagtagagatgggctttcactatgttggccaggctggtctcgatctcctgacctcaagtggtccacccgccttggcctcccaaagtggtgggattacaggcgtgagccactgcgcctggccttgtgctatattctttttttttttttttttttgagacggagtctcgctctgtcacctaggctggagtgcagtggtgtgatcttggctcgctgtaacctctgcctcccgggttcgagcgattctcctatttcagcctcccaagtaggtgggattatagccatgtgccatcacactcagacgatttttgtattttcagtagagacgaggtttgaccatgtccgccaggggtcttgtactcctgacctcaagtgatccacccacctcagcctcccagagtgctgggatacaggcatgagccactgtgcccagcctattcttaaagaataattacaaaatgaagattccgaaaccaccacgtaggccaagctatagaatgcctccgagcctgcagttcacattccccgtgcatcttttccgtgttacaaacccctcctatcccagaagtaactagtctgctgatatttgtcattattttcttgcctttagtatttctgcatgcattcctaaacaatatagcttgattatgcctggttttgaactttaaattaaaagaagcttactacatatatgtattcttgtgtattttgcttcttttacttaatgttgtgggttgattcacctatattgtaattacatacaacttgtcaatttccattgctatatgaaaataccatttcattgcatggaaataaacaataaaaatacattttactatagatggatatttagggtttttttggtatttgaacaatgccaccatgaatattcctgtcctgtatttggcacacaagtaaaagacttttctagaaaatgttcgggttgtttgctatgagtttcttcataatgtcaaataatatttttaaaaatgtggatattgtcccaacatacactcccataacagtgcatgagaattcctattgctgctgcatatctttgccaacatttgatattgttacactttataattttttgtggccaggcacagtggctcacacctacaatcccagcactttgggaggccaagacaggagtttgagactagcctgggtaacacagcaagacgccatctctaaaaaaataaatagctgaggtgggaggatcacttgaacctgggaggttgaggctgcaatgagccatgattgtggcactgcactccagcttgagtgacaaagtgaggctctgtctacaaacaaataaataaaaataaaaaataggctgggcgcggtggctcaaccctgtaatcccagcactttgggaggctgaggcgggcggatcacgaggtcaggagatcgagaccatcctggctaacacgctgaaaccctgtctctactaaaaatacaaaaaaattagccgggcgtgttggtgggcgcctgtagtcccagctactcgggaggctgaggcaggagaatggcgtgaacccgggaggcggagcttgcagtgagccgagatcgcgccaccgcactccagcctgggcaacagagtgagactctgtctcaaaaaataaataaataaataaataaaaataaataaaaaataatgaaataattttttgctaacctggtaggtgtgtattggtatctcactgtggatttaatttacttattttggattcctaatgagatgagcactttttgcaggttttgatatttcgatgtccctttcttgtgaagggcaaagtttgaacacaataggcaaatgtagcaatctttttaaaaattttcatgctcttcatattttatttcagaaacttcccctacccccatatcattttgggaagctttattgtttggcctttcacatttaggtcttaaattcaactagaattgcttaggagggctggagtataaagttgtaatggttaattttatgtgtcaacttgactgggccatgtggtacccagacatttggccaaatattattctgtgtgtgtctgtgatggtgcttccaagtgagagtattacattggaatcagtagactgagtacagcagattgctctccccagtgtggttgggcctcattcaatcaattgaagaccggaatagaataaaaagactgaatatgagagaatttctcctgtccgactggttaagttggggcatcggttttttccagccttcagacttggactgaaacattggtcctccttgggttgtgagcctgcaggtcctcagactgaaactatccatcagctctcctggttctcaggctcctggattcaagctggaagtacacatcaggtctcctgggtcctcagcttgatgactcgagatcttgggaattctcggcctctataactgtgtgccccaattccctataataaatctttgtctttctctct

SEQ ID NO: 3057 - DNA, 392 bp, Homo sapiens
cccgccttggcctcccaaagtgctaagattacaggagtgagccaccacacctggcctagtgctagtaattttttgtcagttgtttctggtgtgtgattactaatacaatgctcttgagaagaacagattgcagaagtttataggcttctgagctcagggaaggcactgaccgagtcccaggcaggcaaatgcagtgagtgaatttgttcagtccaatgtgttgtcagtgtccttcgtacagttccatgagatagaggaatgttaggcatatatgtttgctttcttatcccccatctttcctgtccttctcccacacgctacagtcctacacgctatccggatgcttctctaatgggtgggcgtatcagaattttgaggaggaagacagtgaa

SEQ ID NO: 3058 - DNA, 894 bp, Homo sapiens
ttttttttttttgatatggagtctcgctctgtcgcccaggctagagtgcagtgacgtgatcttggctcactgccagctccgcctcccaggttcatgccattctcctgcctcagcctcccaagtagctgggactacaggcgcccaccaacacgcccggctaattttttgtattttttagtagagacggggtttcactgtgttagccaggatggtctcgatctcctgacctcgtgatctgcctgcttcattctcccaaagtgctgggattacaggcatgagccactgcactcgtcctaagctgattatttcatgattcatgcttggcttgggatctgggaatgatggggaaagttactctctcaaagattggctctgtcccctggggaatgtgggaggagggagagtccagaattcggcttccaagtggccacaagtctggcctccttcacccagcctgtgcctgtgtccacaggacaagatccaggctgacagccatgcactgccacaccactgtcccagactggggcaagcagaagggggctgtttcctctcatctttccccaatttcttgcttgccagaggcaatcctaacttggctagcggaaagataatcacttttgaaaacatgagtgaggtcagcccttccagccacagcctggagtttgaaattacacattcattgatttctttttttttctttttctttttttttgagatagagtctctctctgtcgcccaggctggagtgcagtggcacaatcttggctcattgcaacctccgcctcccaggttcaagtgattcttgtgcctcagcctccccagtagatgggactacaggcatgtgccaccatgccctgttaatttttgtatttttagtagagaaggggtttcacc

SEQ ID NO: 3059 - DNA, 404 bp, Homo sapiens
ctcatgcctatcatcccactactttgggaggtggaggtgggcggatcacttgaggtcaggagttcaagaccagcctgcccaacatggaaaaattttgtctctactaaaaatataaaaattgtggtggcgtgcacctgtaatcccagctactcgggaggctgaggcaggagaatcatttgaacccgggagggcggaggctgcagtgagctgagatcacgccactgcactccagcctgggcaacagagtgagactctgtctcacaaaaaaaagaaaagaaaatatttgaagctaagactgtggtgatggttgtacaactctgtgagcacacacacaaaaaacgctgaattgtgcactttaaacgagtggattttatgacatatgagtcatatttcaataaggtcat

SEQ ID NO: 3060 - DNA, 403 bp, Homo sapiens
ctcatgcctatatcccactactttgggaggtggaggtgggcggatcacttgaggtcaggagttcaagaccagcctgcccaacatggaaaaattttgtctctactaaaaatataaaaattgtggtggcgtgcacctgtaatcccagctactcgggaggctgaggcaggagaatcatttgaacccgggagggcggaggctgcagtgagctgagatcacgccactgcactccagcctgggcaacagagtgagactctgtctcacaaaaaaaagaaaagaaaatatttgaagctaagactgtggtgatggttgtacaactctgtgagcacacacacaaaaaacgctgaattgtgcactttaaacgagtggattttatgacatatgagtcatatttcaataaggtcat

SEQ ID NO: 3061 - DNA, 121 bp, Homo sapiens
tttttagcagagacggggtttcaccgtgttagccaggatgggctcgatctcctgacctcgtgatccacccaccttggcctcccaaagtgctgggattacaggcgtgagccaccgcgcccgg

SEQ ID NO: 3062 - DNA, 31132 bp, Homo sapiens
cggacagcccgggagacgagccctcggagtccccatacgaaagtgcagacgaaacacaaactgaagtatctgtctcatccaaaaagtctgagcgaggagtgactgccaaaaaggagtatgtgtgccaggtgaggagaaggcagcatccgctatgtccgtgctggtgtctgactggggccccggtacgcagagcgaatttgtagtgtcttttcccttcccaccagaccccttccccaatctcaccgtcactcactcatctctgttttgaaggggtcagactgactctcagtggaatcctgggattgagttgtctccattaacatccataattcacatgtaggatgagatttgtatacacatcatgtaatcacacacacacacacacacacacacacacacacacacacacacacacacacacacacacacacacacacacacacacaaagttcctgttggaaaaggtgaggtgctaggcctgttttagcttcactgatgacatgcacactggacaggccaggctgtgggctgagggggccatcactagacctgtgtgtgcccacaggaccccagccaggccacctacactctgtgcttcagtcccgccccatctgtcagctggagatggcatgggagcttccatgccaggcagtcgatgcatgggaagtgtgaatactgcctgccgtcagcgtggcacctgccatctggattagggtgcctttgatttctgttgattttcaaatctgatttgaaatatcttggatgtatccttcagggttgtgatcctgttacttcctttgccattgctgaggactggcctctttctgtaacagtcatctggttttaatctgattctgtatttgtacgttctgtttgggccagacgtttgcccatgcatgttattatatatccttgagtagcaaaatgggattttctgccactggagacagaagcagacggcttcccttgtggtaagaggtgcagaagggactgccgggcgctgcttacccgcctgctctgcccccgcagctgtgtgagaagccgggcagcctcctgctctgtgaaggaccctgctgcggagctttccacctcgcctgccttgggctttcccggaggccagaagggaggttcacctgcagcgagtgtgcctcaggcaagttcccacgggcgggcagctctgcagcctggccggccacctgctcctgcaaccccctgcaccaagtcctgccctgagctgcctgcagaggacaagccccctccccacccccaccgcctggccctctctggagcttgtagcccacagctggcaggtgtacccacctctcagtagctgcagggtttgctctgatttcagtcgtatgtgcccccttggtacctttccatcaggtggcgggcagggtggcgggatgacaggtcatgggcttttcatcccgtgggctggcctgagcctgtgctatgtgtgaggcggccaccacagggcactgccgctcagacagtgcagcattaagggtacaggtaacctggttggtcaccgaacactgaagtccataggaacatggagttctttatgaagacacagtgtcaccttgagcctcagtttcaacagaaagaacagctccaggcttgtcctgggttgtcagtgctgttgttctgcctccatgttactgcatcaggtgtcgcccggcacagtctggggtctgtgaggatgatgagaggacacctgcacagccgtggcccttcctgcctactcaccgggcccaaggagtctcctatctcacgtcagaacacttcctgggtcaggaagacacctggagagtctcccaggccatggcagccccacagcagcacctcacttatgggagtgtctgtctgcctgcccagaatgataagtgactgctccaccactggccagctgctctcaaggaggaaaggcctcttttcataggagccccttctttcaagcttcttgccagttagactgggcctccccagccaggctgcctagtaagattctcctgtatttcaggtgaagctggagctcagatcgcagcaaggtaatccttgatggctggatctttttgctggagaatgcttggactagtgagcaaggttggaaacagggccaggtgctttagcagcatggctgcctctgaagaggagttgcttgattttagtggctcagaactgcaatttaattcttgttctttgcacctctctctccaccccttctttaactttttgttagggattcactcatgtttcgtgtgtaaagagagcaagacagatgttaagcgctgtgtggtaactcagtgtggaaaattttaccatgaggcttgtgtgaaaaaataccctctgactgtatttgagagccgaggtttccgctgccccctccacagctgtgtgagctgccatgcttccaacccttcaaacccaaggccgtcaaaaggtacaggtgcacctgcgcagccttgctgtgggttcagatgcaggccagacgcaggcccatgggcgcttgggaaggtgggctgttgggattgtcaccaaagagcattaattatcttgagtgactaactggacatcggctgggttgggttttctttgacaaaggacctgtctcccttttccttctttccatcctaaatatcaccctaaagatgcttaactataggagaggggcaacctttggaccatttgatagattttgtttaccctggcttttttttttttctttatagagatagagtcttgctctgttacccaggctggagtgcagtgcagtcacagctcactgcatccttgacctcctgggctcaagctgtcctctcgggctcaagctgtcctcctgcctcagcctcctgagtagctggaactacaggcacatgccaccacacctggctgatttttgtaaatttttttttttttggagaaaaaaaatctccctctgttgcccaggctggagtgcagtggcacgatctcagctcactgcaacctctgcctcccaggttcaagcgatcctcctgcctcatcccttcagtagctgggattacaggcacgtgccaccatacctacctaatttttgtatttttagtagagacggggtttcatcatgttggtcaggctggtcttgaactcctgacctcaggtgatccacccgcctcagcctcccaaagtgctgggattacaggtatgagccaccacgccttgccaatttttgtatttttttgtagagatgaggtttcaccatgttgcccaggctggtcttgaactattaggccactgctctgacctcttttcttttttttgagacagggtctccttccgttgctcaagctagaatgcagtggtgtgatcatggctcactgtagccttgacctcccaggctcaggtgatcctcccacctaagcctctcaagtagctgtgaccacgacgcctggctaattttgtttatttttttgtagagacgaggtctcactgttgtgttgcccaagctggtcttcaactcttgggttcaaagaatcctcccacctgagcctcccaaagtgttgggattacaggcatgagccaccacacccagcctgtttgctctggttttaatggcccattatatgtaagaaaacatctttaaatcaaattacatttggattttctaatgttaggtgtgtgggatgagggtggcaggttttctgtacttcttgacaccagtggttctttatcgggcaattttgtcctccaggggacatttggcaatgtctggggatattttggggatgtgctcctggcatctagtgagtagaggccagggatgctgctccacactgcacaatgcccaggtcggctgcccacgtgccccaggtgcctgcagtgcccaggctgagacacgcggcattttagatgtatgaccattttctcaaacatggttttgaagcacctttgctctgaaagctttttttaaatcaaatacctccatttcattttagcattaacttttcaaattcatggaggctgagtaattattagttgctcttttcactatgactggagtcagtgtttggggtccttagggtgtgtttctttgccttcaggtaaaatgatgcggtgtgtccgctgccccgttgcctatcacagcggggatgcttgtctggcagcaggatgctcagtgatcgcctccaacagcatcatctgcactgcccacttcactgctcggaaggggaagcgacaccacgcccacgtcaacgtgagctggtgcttcgtgtgctccaaaggtgaggggcctgggggtgtctgcggcacacgcctctcacactcccaggagccacatatcaaggcaggctcattccttgtctgcgctgtgttcattgatgttgacagtgttctgtgcgtcttcacgttaatagtatatcacagtagctctaaattaattgtaatcatttcgcaaacatacaggaaattatttgtggtgaaaatgacatttgctctcgtgctgatgtacagatcgctgttttaaaactgatgtttataagttaaggctgtaataagtgtagactgtgaagcactgaatctgggctgagccatagcagacaggctaagcctggccgcctcgccctcctcttgcaggggggagccttctgtgctgtgagtcctgcccagcggccttccaccctgactgcctgaacatcgagatgcctgacggcagctggttctgcaatgactgcagggctgggaagaagctgcacttccaggatatcatttgggtgaaacttgggaactacaggtgtgagacatagaatcgtatgcttttatgtcttttctgttcacatgtgttcgctttacagtacttaaagtattgaaattattatcgctgtctctgaggagtctgtgaatcctgtttttaatatttataatagatggtggccggcagaagtttgccatcccaaaaatgttcccccaaatattcagaaaatgaagcacgagattggagaattccctgtgtttttctttgggtctaaagattattactggacgcatcaggcgcgagtgttcccgtacatggagggggaccggggcagccgctaccagggggtcagagggatcggaagagtcttcaaaaacggtacggagatattcagatagagagtgagacagcactctcgtgcattttcttacccctaatttctattttttaaaatttgatctttatagaaaatactggactaagcattcaatctgtttttttaaattaggaaaatgtttgcagtctggtttatttgttgagcatagaataagatacactgataacttttgtaacattggtttgtgattaatttcattaaaattctgtaaacctattattcagaaattatttttaatactaatttacagaaatgttccatggcttgcctttatgtaaaatgcagatctgaaggaagggtcctgttgtctcgaccttgtgcagcaggctcttgggggctcgctttacctttcagtgcatgaggaatcaggggtggtcaagcagacaaggtgcttggcctctgattccccagctggggtgggaggcaggagcaacgatgtggcatggctggctgatgacccacgtttgagggaggcaggatggggatgtgacccttcactggaggaactggaggaactggtatttatgatcggtcaagagagaatgaggccagtagagaaaacccgaggtgtgtgcatgtggctcgttcagggagaagcacacgctgtgttgcagccgggtcagtgctggctcctgtgtgactgcaggcggggacccgcgtatttaaagcttggttagctccatgctgccagaagctttgcaggctgcactgagtggtaggagtgcatggtgggcattcagagatctcataaagaatgggtaggcattgaaagattttaaaaaattattaagagggcgagacgaaattgagaggtggacttatgtgtttgctgcgactgtcggcaaagtctcctaactgtggatgcaggtgtcctgtagagccagaaacctttgtggctgacttggggctgcaaaaacagggcagaccacaggacacgtctagggttgacatggggctggcctccttcttgggacggattgtaggggtgtgtgtttcctcggttcttgcttgagcctatggttaatctctcagaaccccttttgtttcgagaggagctcagctgcatgtttttttgtttttgtttttttttttttgagactgagtcttgctctgttgcccaggctggagtgcaatggtgtgatctcggctcactgcaacctccacctcctgggttcaagcaattctcctgcctcagtctcccaagtagctgggaccatacgcacctgccatcatgcctggctaatttttttttttttttttgtagagaatggggtttcagcatgttggccaggctggtcttgaactcctgacctcaggtgatccgcctgcctcggcctcccaaagtgcttcgattacaggcgtgagccactgcacccggcctcaggtgcatttttattttctgtctgagaacagcaagtcccaggctttgaccctggtgctttgtccttaggccatagtggaggacagggagctcccgacagaactctgccctgggcctgtcttgtagagaggtgatggctgttctctgagcactcctttgcctcacacacttggccgcatttaaaaatacctgcccactgacagttgttcatagactctagttttatgggaaccagaaactatacttaacattgaaagtttagagtgaactataaaaatatggagcttgaaaggtagttacctgtatttactaaaatctttactcctatttcattgactttttagcactgcaagaagctgaagctcgttttcgtgaaattaagcttcagagggaagcccgagaaacacaggagagcgagcgcaagcccccaccatacaagcacatcaaggtggcgtgtgggagctgcgtgcacgcgtgtggagggagtcttccccgagggccgtgagaggttcttaggcacacccaggctatggctggggagaggactgtcaccagccaggatctgtggtgcctggcatggatggccacacaagagaccatgagcaaatggcatggggggatctgcatgggggttcttggatccgccttggagtgtgaggcttggcttggtagcttagagaagggttggggtgacagtcctgaccgggctgcttggagcaggaggagctgagggatgagcctcccacctgcaccaggctgttgccaagtgctgggagtcagtcacatacggccagggctcagtgactgagccccaaacacgtagatcctgtacctcagagagcaagatggcggggcggcaggggagcttgccagttctgtgtttattccagtgagctcgagagccccagcaggaggaagtgcagccagggcagggctctgtgagagctccaggcccctcagggctgcctgcgctcagagctggtgcggcaagccgcatccccaggagcctcgtggccgttcctgacgagtgtttgtgataagtgtgtgccggaggtcaggtgctctgcctttgcttgtaaaatgtgggctgcagtcaatatctttgtatgtaaagaaagtgctctgtattcatctttatataatattttctttgggatggattcccagaaacagaatcacagggtcagagagtatgaaatgtttagattcttggggaatattcccagattgttctccaaaatgtacagtttgtcataccacagcagtgaaaagagtgtctttcgccacctcttccctaagattatgcatttctaccccagctgattttcagctgtctctactgctttgttatttggttgcttgtctttcactaatagtaaaccacaaggtcatgagagcagaggctatgccctcctgcctagcactgctcctcctggggtggactcccatgtggcttgctgctggtgcttggtaaaggaagagtcagagagatgggtcgggaagctgctcagaagagctcttaccagcgtttgctggacaccctgcagtgtactaagcaatcaacacgctttttctctcttcatcttacaatggcctggctggatacgtgtcagctcttgttcatcagcgatgtgcacagacactaagataaaataatgtgagggggcgttgtgttgccctgcctgcctcttgtgctaagaaggcagaggagagctcctctgggatctggggagggctgttctgagtagtgtgtcctagccaggactctgaagctttctaaaaggccacctggaggctgggtaaggagaggcagtggtgggtatgcaagggtattcggaaggctctcatgtgtggaccaagacagcttactccttccctgcaggtgaataagccttacgggaaagtccagatctacacagcggatatttcagaaatccctaagtgcaactgcaagcccacagatgagaatccttgtggctttgattcggagtgtctgaacaggatgctgatgtttgagtgccacccgcaggtgtgtcccgcgggcgagttctgccagaaccagtgcttcaccaagcgccagtacccagagaccaagatcatcaagacagatggcaaagggtggggcctggtcgccaagagggacatcagaaaggtatgtgtcgttatcccctcccctgcttttgagaaattacggttcactgggtaattaggcctaggtttgcttgtggtggttttgtagtcatgtgagaatggtattttttggaaaaaaaattttttttgtttttgttttgagacagggtctcactctgtcatctaggctggagggcagtggcatgattgtagttcactgcagcctcagaatcctgggctcaagccatcctcccaccttagcttcccaagcagctgggactacaggcgtgtttgaccatgccctaataattttatttttttttggagatggggtcttgctgtgttgcccaggctcatttcgaactcctggccccaaaccatcctcctgcctaggcctcccaaagcaatgggattttaggcaagagcctctgtgcctgacctgaaatatttttttgaattgaattattacaattgaatattttaaaatgttacatgaaaggtatctgctataactcacacattcccttaaaacatgccttatgtcagaattctgatggttatttttatgaaatggaagatctgtgaagtgacccactttcctctgggctagtagccaggtgcttgggagcactcaccagcaggcgtaaggagattgctcttgtgaggggtggtcctggcacagtctaggaccaagtcgttggtagacaccaggacagttgacctcctgcctctgctcccagactgtgtcccaaggacatccagggactgagagacatgtagaactgctgaccctgatgtattttggcatgacccaggtccataccagggctgacccagcacagagagttcataagcctggtgccagttccagcaacagcacaaaaggttgcttagaaacacctccccagcacccttgttcctcgcctgcctgactgctgattcacccagactcttgctttacatcctgtcagatactttgtagccattttctctgttgtggggatcaccgtgtaaagtgggttatgtagaagcttggttatcagacagcgctcctgagacaaggtcgtgtaggaagcaagggttggcatattgccacttcgtgaatacttaatacatttttcattggcaacctttacatacagatatgtctgagatcctttgaatttaatttatggagactttgtacacgccctccacggaggtatgctgatgtgtgtggtgcccgttctaagtgatcatgatggggagtcttgagccccgacactgaggattggtcagcacgctttttgtcatggccacatgcttgtgatttccagggagaatttgttaacgagtacgttggggagctgatcgacgaggaggagtgcatggcgagaatcaagcacgcacacgagaacgacatcacccacttctacatgctcactatagacaaggtaatgcggaactccactgtgagcttctgcagtgtgctggacctggagccctgatggtcacctgtagaactggactttgccctgtggcagcgccagcatttgtctccttagctgcttattttcaaacatctgcacattttcttctgaggtgcagcgtgtctttcagctgcgccggagggctagagctaaccacctctcagcacccaggcaccctgaggttctgcttgtccgggtgtgcatgcagagcgttcccagcagccttagtacagggcagggaagtagagaggacacagatgaggaagtctcagcatcttcttttgtttttaaaaagtgattgtattttattttttaattttcagtgctctttgggtaaggtctcagcatcttctctgttgtgtagcagaatcgtttttgcttggttgttgcttgtatgcagcccatatttctaaccattttggaacctaggtgctagagggatcaatgttctgaggaaaaggaggataggaagatttgtgtaaaagtgggcatggataaaagacagtacatctggagtgctcagctctgggcctgatgcccaatcctgacaggtgttgccgggcccttccagggcggctccttcaatggccacagccctgtgggggtgcgtgtcatcccttccctcacacggcaggcttttggcttctggatgacttcagctggggaagtgtggcctccttagtgcctgagtggtctttgaaaggaagggagatagaatacatgtttctgccttttgttgcccttaagctcatcatctagcaggaaagtctggctatttttaaaagagtagattaatagtagtgcttgaaaaccagatagaaaatgatcaccgataaaaaaatgttgaacaattcatggaagacagatgtgatgagacctagagagaaagggctgctatggaaataagaatggttccaggaaccttgtcaggtggcccctggggaagctatatcccctacccctgcagtagtggggcagcagtggccagtggagcctgctccgggggagcactgggctctgtgtcaatcacaggtcgtggggcttacacctttcaaagaagtcagtgtcatgaaggacaaaaagaatcctgggttaaaagagactaaagaagtacccagaggaggtgtgtgcttcttgatcagagcctgaatctgggatgaggagctataaagtatgcttttgggggcagtgggaaaaattttaatttggacaggaggctgttcttcatgctaaatttcataggtatggaaagtgttgtggctgcgcaagagaatgacttgtgatgtgtttagggtcagatgtcagatattcgtaacttactttcaaaggatcgggaaaaaatttgtgtgtgtatacatatatccataaatagaaaaagcaaatgtggtaaaacgttaatactgaatgagtgaagggtatactgatgttcgttatagtattcttccatttttttcttaggtttgaaatttttttactcctaggttttgttgttatttttcttttttgagacagggtctctatcacccagggtggagtgcagtagcacagtcatagttcactgcagcctcgatctcctgggcctaagcaatcctctcaccttggcctcctgagtatctgggactacaggaacatgccaccacacctggctgatgaaatttttttaaataaaagaattgtcttgaaatagccctagagctagagaggtgggtagcgcttcctcctacatgctctgtcagggcgcaccacccaggggataagctagcagcacattcctctcagggccctgtcaacacaggtcttctctaggaggtgggctctggcataccctatgacattggaacagggattctgaagtgcaaaatgaacagaaaaccaagaatacacaacgagagagaaagaacaagccccagtgactcttcagcaacaccctcataggatgacagataaggggcctgagcttgctaagtaaataggaaagctttgcagggctggagcaaaaaggcaagatgggaagcaggtccataagggcgagagtgggtttgtacacagcgcctctaggaccatggcgtgtagagcaggcaggagcttgtgttttaaccctcatgtggggaccagtgataagtcttgctcaaaggcttggtggccaactggagttgagtaccctgtgtagacccctgggagggttttagccctagggaagggactaataaacttgccccaagaggcagcaaatatgcttctctgttgtatctggggaggagggcagggaggttatttgttagacatcgaagccctaggtctgtgccttatgttttggagtctaaatgtaaactacttatgtgctgtaagaaatgccaagtggatactgcagtttgcttttgattagtaaaaaagaaatgccaggttgagcatttaatccacaagttggttcctgacatggtaatccacctgaggtacctgattgaggcaaagataaagcctgtgacacatgagagacatttaagcaattcatacctcatatatttcctatgaaaacaaaaaacaagctgggcacagtggcccacgcctgtaatcccagcactttggaaggccgagttgggagggtcacttgaagccaggagtttgagaccagcctgggtaacacagaccctcatctctacaaaaaagaaaaaaaattagccgtgcctgtgattccagctactcaggaggctgaggcaggaggactgcttgagcccaggagtttaagactgctgtgaactatgatcatgtcaatatattccagcctgggggacggaatgggaacccggtctctaaacaaaacaaaaatttgaaaaggagccctacttaaacgtttacaaagcgcaatagaaggtgaccctcgtgagcagaccttcctaatggaaggctttgcttttagcgaggacctgaggtaacaagactacatttaaaggagaatgtgaactaagtgtattagaaatggttaaagccatgaatagagctttagacgccacaagaaaagaatgagatatggagggtaaatcagacaaatacgaacaaacagcagcggaggttaaaatagagtcattgagaggatcctgggataatggcagagcaggaagctgtgtccccacctagaccacagttgcaccagaaggacctgtctgatgtaaccattttggaactctggaagctactgaaggcttgcaacttccaggggaggcttggatggcaaattggggttaattttggtttcagctcttggcacagcagcggctacccatgccccacagacagccatgcacatgttcttggagcacctcgcacacagcttgaggggttcagggtgagcaagaaggatccttttctccaaatagtgggtatctgtgctcaggatccctgattgctgcttctgatcacagaggtgcagacaaagaggtgcgctgcgctgccgttgttatcacacctccctcagtcgttacaagcccctccccctccagctgaagtatcttcaagagtatttaaagggccagcaccaattgcccccctctttcatttttctctttttccccttttgggagccagacattaaaagactaggaaattcaaaaacaactatggggaaaataagaaaatttagaaaattagacagtgactgcatgctcagggaaaggtacagctcaaaaaagatctggaaagaccttaaatttccatcttgggttgatcctctgcacagaaacagcctgcaacaatcaaaacaagaacaataaataaaaataacaaaaacagcaaacctagggcaaggggaggaagaatctaatttctagagttaccacattattagacttaacatgtccagtgttcagcaaaaaaaaaaaaaaaaaaaaaaaaagcctacaaagagacaggaaaatatggccatttaaagggaaaacaaaatcagcagaaactatccctaaaagaaaggccagatgatagatctactagacagagactctaaaacatctgccttaaagatgctgagaaaactaaaggaaaacctgcagaaagtcaagaaaatcatgcatgaacaaaatggcagtatcaatgaagagatagaaaacctataaagagaaacaaacaaaaaaaggaattgttgagcctgagaaacagaaaagaagattgaagaaaagtgaacggatcataaggggtatgtgggctaccaccaagcagaccaatatatctattgtgggagtcccagatggtgaagagagaaagaggcagagacaactttgaaaaaataatggctgaaaaattcccaggtttgatgaaacacacaaatataaacatctaaagaagctcaataaactccagatgatcaaactttcgaaaaccagaaaaagaatcttgaaaaccgcaagaggaaagctactcattacatgcaaggtgtattagtctatttttacactgctctagagatactacccaagactgggtaatttataaaggaaagaggtttaattgatgactcacagttccacataacaggggaggcctcaagaaacttaccatcacggtgaaggtgaagggtacctttgcacatggcggcaggagagagaagtgtgtgagagcccaggaaaaactaccatttataaaaccatcagatcttgagagaactcactcactgtcatgagatggcatggaggaaaccctcccataatccagtcacttcccaccaggttcctcccttaacacctgaggattacaattcaagatgcgatttgggtggggacacaaagctaaatcatatcacaagggattctcaatgagattatcagcaaatttctcatcaggaattttgaaggcctacaggcagtgggccaatgctaaaagaagaaaaaaaaatgttaaccaagacttgtatgcagtaaaactgtctttcaaagataagggtgaaattaagacattcccagataaacaaaagctgaagaagttttttagcactagacctgccttgcaagtaatggtcaagagaggtaatggagagaagtcttgtaggttgaaatgaaaggataccatacagtcactacaagttgtatgaagaagaaagatctcaaagtaaatacatggtcagctataaaagtttgtattgttgtaaccgtggtttataactccatttgtttgtttgttgtctgcatgattgaagagatagggctgggcatggtggctcacgcctgtaattccagcgctttgggaggctgagatgggtggatcaccaggtcaggagatcgagatcatcctggttaacacggtgaaaccccatctctactaaaaatacaaaaaaattagccgggcgtggtggcaggcgcctgtaatcccagctactagggaggctgaggcaggagaatggcgtgaacccgggaggcggaacttgcagtgagccaagatcgtgccagtgcactccagcctgggtgacagagcaagactctgtctcaaaaaaaaaaaaaaaaagagacatacatttaaaaaacaattactagtttaaaagctggtattgtaatttagtttgtaaattctaacattttgttttctatataatttaagctactcatgtattactagttttactcatgaattactggcttgtgttttagggcactcaatacataaagatgtgattttgtgatatgagcaactgaaaaggatggggacagagctgtaaaggggcagggtttttatgttattgaagttaaacttaatataatcaagttataacattatatagagaattggaaaactggagaaaatcaatgaaaccaaaagtttgttttttaaaaagatcaataaaattgacaaacctttaactagatggactaggaaaaaaagagaaaagactcacataactaaaatcagaactgggtgtgtgaagacattattactgcttctacagaaataaaaaaggattataagacagtactgtgaacaactgtactccagtaaattggataactgagatgaaatagacaaattcctagaaacacaaactaccaagactaaatcatgaaaaaaatggaaaatctgaatagacttataactagtagagagattgactcagtaattaaaaatctcctgagaggccgggcacggtggctcatgcctgtaatcccagcactttgggaggccgaggccggcagatcacaaggtcaggagttcgagaccagcctggccaatatggtgaaaccctgtctctactaaaaatacaaaaattagctgggcgtggtggcgggcgcccataatcccagctactcagtaggctgaggcaggagaatcgcttgaacctgggaggcagaggtttcagtgagccgagatcatgctgttgcactccagcccaggcaacagagcgagactttgtctcaaaaaaaaaaaaaaaagatatttccaacttaacagtgggtttactgggacatagccccattgtaagagtgttgccagacactgaggtttcagcctaggtctgctttctcgctgcagggaaagcccatctctgacacagtcagtgttgccagagaagaaaggctttcatgtgggtgacatcagacgagaccagcctcaaatccatcttcccagccaactcaagtggttatacaggagttggtcaacaggcagcaggtggttggatgaggggtctggcatctcattgtaaccatgtgtgggaaaacaggaattagggagggataaggaaagggagttggtcaacaggcagcacgtggtcagtctggtgtcttattgtcaagatgggttatctgggaaatttcagttctttgatactatctgggagagaaattgggccaggttcaagtggagcatctgtacttgcaaaccaaattggcagcatattaaaagaattacacaccagggaaaataaccctagaccttgcattctagtgctctgcttatctgtgacttcagacaaagatggagagagctgaccatcagtataatttagctgaatgaaataatgagatattttaggaagaagaacattgaatgtcagaagttaaatgtgagatccaagaagtaacagtgaacagacaagtttgtgggtatgtggatatgtcttaaataagtcaggttgtgtcaaattatgatggatgatgatgactgcgaggcaggaaggaagatgaaaaggaggaggcattgaacactaatggtcacagggagcaccgggagcgtggtgacgccagggtgagctgcttgttctgtgagggtggagggaagagatttattaaccttagactttgttaaagtatacatgtgacgtctacatgggaaactgctaaatgaatagaagtggaaggtgtaacttccacaccattaaagggtaaaaaggagaatgaagaaaagtcaatttagtagaacctgcgggaggaagatgggggaaggagaaataatagtaattagaaagcacagattaaaaaaaaatcaaaatgtcaataatcacaatatatgtaagtggtttaaatgtataagttaagactaagattcacattagggtcagtacatagtaacaacaaggaaaggctcccacaggccttaatgtttgtagttattggggtggaggagacacaggagacagcatggagaggaagaactagattagatgcacgtccgacagttggaaagatcctaaaggtagtgttcaaagaaaaaactaagagaatgtgattcacagccaaacaaatctatacataggattctggtagcagatggcagctgctcacttccagaacaaaaaatgtacacaaagtacatcttcactgaaactgtgggacaaacagacccatccactgaaagtccaacaggcagaggaaagtactggagacctgcagtgtcacccggacacagggggtgcagagacacgggagtgcggcctggcaggcagagccagcacctggggcctgcccccagcggcgctgagagttgaaagggagcagtgggaaaagaaggcatggggagctcctgggaagaagagatgacacatctttgaaaggatcaccttccaaaaggaaggcaacatgctggaaggcagagagaaagggacctgaggctctgagggcccacagagacttgggttctgtggtgaggagacctccatcaagccgacagcagtgagacaaacctgggacccagccagtacccgctccaagaaatccgacttcttcagaaaacaatgaaaaggttatgtaagaaaaccccagccaggtgcaatggcgtgtgcctataatcccagcactttgggaggccgaggcaggagaaccgcttgagcccagcctggagtttgagaccagcctgggcaacacagcaaggccttgtctctactaaaaaaaaaaaaaaaaatagctgggcacagtggcatgtgcctgttgtcccagctactcaggaggctgaggtgggagtatcgcttgagcccaggaggccaaggcgcgcagtaagccaaggtcctgtacaattgtgctccagcctgggcaacagattctgtctctaaaacaaacaaaaacaaaatcctgacccaaaacagcagaacttccttacagatggagaaaagccacttagaaaaatttttatcacaaagtagataaaagttatactctaatattcacagattttttgaatatgaggattcagagatagccaggcagaaaggagagctaggattgggaacttgtagaactcaggagtgaaacaaggaaaagaaaattattttctaagcaaagcctaaacctcaaggaacacactagagagtaggaaccacaagaacggcacgaaggtggatgtggggagtgagcagagtgcagctgaaagaacctgggaaagagagaaagaaggaatgtaggaaagaaagagaaggatgcgagtgacgccttgggcaggggctgctgaggagaggcactgtgcattcaagcaggccagaggatggttcagcggggctgagtcacattgggcgacgtcgtaagtaggattactggacgcaaccaagaatcctgtagatacccaggcaaaaaaacaaaacaaaaagcctaaattgcttctaaggggagaaatagggccaagtggaggctgttcacagcaggacccagtgctcgggacagggtgggctcctcagaacgagccaggggtgtctatccaggcatgtggctctctgggtgtaacagctacagagatgcaggttggagcatagagaattaaaggaacatgtccttcctgagtcagctgctgagagatgagctccaggcctccagcagaatcaggtgaagctccagcaacaagttgggcagtggcagctgccgggggtgagtgtgccagaaggagtgatgcgtactcagaatgttgcccccaccagaaggggcagtgggaggagcagggagaaaggagggtaagttcacccccaacaccggcgagccagagccgctgagtcaggtgggagcagaagctgaggtgtgttcaggagcaaaggagagcatgaagataatgctactgatgagagctgggctctaggggcggttgagggagggggtccaggctgatttcagtgtgcacaagcagggacatgtaatgtccgggacattacatgtgggcatgcaggctgacgggtcacataaagggccgccaacaggacaggacggagtccccaacagcaggaaatcaagcagctcctctgcctcacagtgaaaggctgaaagcccatagaaacaagcaagacatgaatgtgttctgactgtggccagcatatctggaaagaggaaaatgggctcgcttactttttaaaggacttccagattggatcataaaaccgaattctctgcagcatgcaaggaacaaagagattctggaaggttaaaaataaaattgtgggcaggccgggtgcagtggctcatgccagtaatcccagcactttgggaggctgaggcgggtggattgcttgagctctggagttcgagaccagcctgggcaacatagggagaccctgtctcaattaaaaaaaaattgtggccaaaggtatgccaaggtgaagtcgaagaaaggagttgttctcagacaaggcagaattcaggccctaccactttcagtgacacagaagaaggcttttttgacaccagagccaccactggggatgagatgcaccctaaatttagggccttcccactggcctatgggatccaggagaaaggccagtgaatacagctgacggtgagttcacctcttaattgaaggcagagatcctggacagatgatgagcatgaattcagcactgtcgaaaagaaggacagaatacactggaggaagtgtttagagaccaagcagagacttagagaacagaaacaatagaaataaataaatctcttcttacgagcccacaatagtgccgtgtacttttcagaggcacatgtactgaggcgtgaggtccgagccagggcgtggacctgtatgtgaacatgggaggaggggacctgggacctgtgagggtgtgtgccagccggtggggtgcacctgaaaagcatggagagcagttccttgtgaccgagtggggtttaccccaggactgcaaggagggcttaacaaccctatcaggtaaaggaggaaaacaaatccagagtcattttcatgaacaccagaaaatcatttgagaaaattcaaacctattcctgatgaaaacttcccaagaaaccaggactacaagtatgcttagcttgctaaaagacatcagcggctgccagctgatgctcagtgagccagacacttgtggccggttcagaaataaggcaggacgctcacgccgctcctgtacccccaaggctgcgggtgctgggtgatgcaggcagggcagaaacagcagagcagcaagaggcaaacagtgtctctcggagaatgtgacggctgtgtttggtgatggccttatgtgaactgtagtgacaacagtgagaggccaggtccacaggttttcccctgccctcctcatgtatgcagagccacaaagagcattgatgcgtgtattgaatggagcaggcttctgtggaaagttcggcagtgtcactgacggacacaagagatgatatggatgagtggcggtacaggctatgtctcagctgggaaaggagaggctgtgagggtggaaatcttccccagtgcaagctcgttgtaggtgcgataaaaatagcaaaaacgtttaaatatacctggacaggcaatttcaaagtccatgtagaaggaaagatctgcaggtctagccagtgctttatcttgaagccttactgtgggaagggtgggcgtgtcctgggggtgacagtgttccccatggcattcctgtgactccagcggggcccaaacccaggcggatggccagggggagtggggccaaagccagggccgggcagcccacgtaccacgcactgatgcctcccctcacaccacttataaaggccaattccagatggattgaacagctaggagtgggggagatgcattttataatctgtgtggtgggaaaagctgcatgcaactactcagcaaaccgaaaacgcatgaagcaaaagggtaaaatagttgcataaggcggaggcagctttgtgagaaaagacattgtgcacggaagattccattgggagctgggaagctatgggaaagtttttgacacatttttttttctttttggagacggagtctcactctgtcgcctaggctggagttcagtggcacaatctcagctcactgcaccctctgcctcacaggttcaagccattctcctgcctcagcctcccgagtaactgggattaccggtgcccaccaccatagctggataattttttgtatttttattagagacagtttcaccatgttggccaggctggtttcgaactcctggcctcaagtgatccttggcctcccaaagtactgggattataggtgtgagccaccgcgcccggccgacatattgttataaaggggtctgatgtttggaatatctagggaacatctgtaagtcagttaagataaataaaacagggtcaagacatggcgggcaacccacagatgaaaactggcccgataagaaggaagtggcactgggccccgctggtaatggtaggaatgtaggttagacacggtgctgccaggcgtcagaggctgggttgtcctgttggcattggtggcatgtcccatgtgcatgccccgtgctgtcctcgtccccagggccctgcagaagtggtgtgcatgccaacgtgcacatcagcaccgcggctcagcgcgtcatgacaaagcatctgcagagggcagatgagcacccccacttctgtgttgaagagtggcactctgggttgattagtgcattttattattgtgaaaagcatcttgcagagaaccacattctggtaccatttctggttttaaagggtggcctgtgtgggtatgtagaaaggacacggggccagcggtcccagacaggggcaccctgggagattgcaccagggctgggtgcgtgggcagttgtgtcagaggccgcgtgtgaatagtgactccgaagcctgccgcttcctgggaccatgtttatcccagtgtttatccctgttcacacacgtggttttgtttgaacacgtgactgttacgctttatgtggccttttgatttctccccacgcggttgtgcggtggatctggcggctcctcaggtggaggccggggccgtccattccctgctgctgggtggagatgttgtctccagttcctgcctttggcctccaggcacctggatttgagtgggtcagttctaggccacatcgtgcttgcatttgtgattcccgtggcccttatcaggttgctgcctcgaaagccttcctgccggccctgcagccacccctcatctcagccaacgccacatcagcgccatgggtgcaaagtcagagctcactgtcactcggatctgcatttctccacctctgcctggatttgctctttgggaattgtttctttgcatcctttgctggttttcggttgggtgagtcttttttttttttgagacggagttttgcttttgttgcccaggctggagtgcagtggcgcgatctccactctctgtaacctccgcctcccgggttcaagtgattctcctgcctcagcctcccgagtagctgagattacaggcagccaccaccacgcccagctaattttttttgtatttttagtagagatgggggttcaccatgttggctagtctggtctcaaattcctgacctcaggtgatctgcctgcttcagcctcccaaagtgctgggattacaggcgtgagccactgcgcccagccagggtgagtcttgttcttgtccttgagtgccacttggctaggctgttgctgctgaccttagctcccttgtttgccatcatggaggatgctgggagctccagctccctgtcctgtcctccccggcgctcactaaggctcggtcctctccacgtggtcctgacctgtcctctgtgagcaagagaaacaggactggtttgggggtgtcctgtctcagtggacacaggacaccacggttttcagtacaacaaggaacacaacttgttcaatgtgctttatgatggtgaaaattccctttaaaaataacatgcgattgctaacacttgaccgaatatatcacttgaccttacaggaccgtataatagacgctggccccaaaggaaactactctcgatttatgaatcacagctgccagcccaactgtgagaccctcaagtggacagtgaatggggacactcgtgtgggcctgtttgccgtctgtgacattcctgcaggtacaagctctggggaccctgcatggggctcctggctatgggggcagagtggccatcgctgagggctgcgtggggctggactggaaaggctctgggggaggtgggtgctgatgtggagtctcttttggtttgaatatctcttttaccaagcaaaattgaaaggccatgggtcaagccagtacagatacaaaaataataagagtatttttgttgacctaatacacgccccttagcttttgaagagaaaggcaggtgtttccaatttggtgtctgtctcctcttctcccagggacggagctgacttttaactacaacctcgattgtctgggcaatgaaaaaacggtctgccggtgtggagcctccaattgcagtggattcctcggggatagaccaaaggtaaggctgtggcgccctccttccccccaggctctgtgttggcattttgcactcctggagacctgtgtcccccgtgaacagcggcttcctccaggctggcttgttgccgggacaggtgggagcaagttccctgctgtgggctggggaggatggctctcaacaaaggccagtggttaagagttcctcactgaacgtgtttcctggggctgccagaacaatgcctcacagacgcgtggtttcgcagttctgggtgtgggcagggccgtgcgccctctgaaggttccttgggaggctctttcccaggcctgtctcccgttcctggtggcggccacagtccttgctgctccttggcttgtagcagcaccgcccaaccattctccctgcgaacatgactgttgacttgcccttcttataagagcactggtcctgttgacttagcgcctgccctgctaccgtgtgaccccatcttaacagatctcattgacaatgaccctatttccaaatacagtcaccttccaaggttccaggaaggacagagatttgggggggcactcttgcaccccttccctgtgctgtgtagaacctggtcctgaaagcctggcggtggcaccagctcggccctgagccggtgtctgtcctcagccgtgttgctgaggatggtcactgccctcaggtcactgccgcccacctgtgcccacgttcctgtggaatttcctaatgaggagaccctgggtggcgggcgggagctgttctgcctgtggtggcctcctttgccagtgggtcccatcagcagatcctggagctgtgtgtctgctgagatgctgctgagatgcgtcattgcaggcttccgacaaagctcactctagtcgtagtctttgttcagctttttcacgctgagtcgagtgagtctaaggatgtctggggagcacgaggaggacactcctctcctctcctcttagtgttgggcacctgcagagatctctgaagttcctggagtgtagctcgctcttctgccctatttgcttcagcctgtgtaattctttccggtgatctgtgcttaattcttgactctagacctcgacgaccctttcatcagaggaaaagggcaaaaagaccaagaagaaaacgaggcggcgcagagcaaaaggggaagggaagaggcagtcagaggacgagtgcttccgctgcggtgatggcgggcagctggtgctgtgtgaccgcaagttctgcaccaaggcctaccacctgtcctgcctgggccttggcaagcggcccttcggtgggtgtgcagcctcgcggtggcttgcagctgtgtctgtgtggcaggctcctgatggcggctgctgccgctcttcctgctgaccgggcctcatctgggtgcaggcacatcaggcgctcatgcagcgaaggccctgatccagggtggcagagcctttctttgttccaccagccgcacattctagatctctgcatcgagcagagaagatatgtggtgacggggtagcccctggaacctccaggagggattcaggcagcccaaggcccagctgcagaattggggccctcatccatgctgtgggggcggggcggccaggaaggaggcgacgctgggaactaaagcccctcctaggagaaaggcctctacaacagtgtctccctggcagcccagaggggcctggcctggctgcactacagtgggaatggaggggcccagagcccctgtcctggatgtgcagggcaggctgtccccagagatggtgctgtgcaccaggaggctccgccggttgacgaaggagctgcagctctggctctgtttgagggaaagtagagtgggctccaccttccagcacccgcatttcagagatgacaggcgccagtgggaaaacagtagcgtcttgttccacttggtgatgagacagtctgagaaatgggtcgtgagatgactctggcggtgcgcagacatcatggctcacacctaagggtgcagccacctccgttacaatcttgcagtgtgtcgccatgaggctcttgactgtgtggaatcacagaagaaaaattaaatggcccttacccaaaacaagaaacccaaaagaggccaggtgcgggggctcatgcctgtaatcccagtactttgggaggccaaggtgagcagatcacctgaggtcaggagttcgagaccagtctgaccaacatggtgaaaccccgtctctactaaaaatacaaaaattagactggtgtggtggcatgcacctgtaatcccagctattcgggaggctgaggcaggagaaatgcttgaacccgggaggcggaggttgcagtgagccaagattgcagaaagctgagatagcaccattgcactccagcctgggcgacagagcaagactccactcaaaaaaaaaaaaaaccaaacaaacaaaaaacaaaactataaaaagaaaatccaggccaggcacggtggctcatgcctctaatcccagcacttctgagaggccaaggtggatggatcacttgaggtcaggaattcgagagcagcctggccaacatggtgaaacctcatctctactgaacatagaaaaattagctggtcgtggtggcgggcgcctgtaatcctggctactcggaagggtgaggcagcagaatcacttgaacccaagagacggaggctgcagtgagccaagattgcgccactgctctccagcctgggcgacagagctagactccatctcaaaaaaaaaagaattcagatatttgtgtaaaaacatttttgtacggtaaagatgacacacgatagagaaaagtgttggccatgggtgcgagagggtggtccctaacgtgacagagcttttacagagtcatgccagaaagatgaatacccaagttgaaaatcagtcccttgggagagggcaggtcacatggaaatcagcacagcagcccctgcctgtccacgccgcgctgggggacactcctgcacccggcacagctcctctcagttgccgaaacataaagagacgctaacaggtggtccttaggggcctggcaggtactgtggagtcaacaggccctgccagggagcccgcccgggctgtggtagacagtttgtctgcccgtcctgttcgctggagccagcactattttgtgttcatttgacctgacagttgtaagtcatcttcaaccacgataatgttgaagtcgtgattccatcacttctgtgtgctcacatcttgtgttctgttgcagggaagtgggaatgtccttggcatcattgtgacgtgtgtggcaaaccttcgacttcattttgccacctctgccccaattcgttctgtaaggagcaccaggacgggacagccttcagctgcaccccggacgggcggtcctactgctgtgagcatgacttaggggcggcatcggtcagaagcaccaagactgagaagccccccccagagccagggaagccgaaggggaagaggcggcggcggaggggctggcggagagtcacagagggcaaatagcgccaggcggccgcttggccggatccaggggcggtgcagggcggccggccctgcctgcgggagagggcgagcatgaactggcccggaggacccagctcgagccgccaggacacagacgtacaggcctcctcgggagggagcgcctccccaccactgagccatcctcagcagcgtccgctgcgtctgcactgatgaccgtctgagcccagctcagcgttcctggacaaacagcctcactcctcagcgttaccgccacacttgaatttctccgaatgtcaaggttccctcccactctatttttttaggttaaagttaattggcatatggaatgttttaatctcctctgaaatgtgtagcgtaggcttttcccaagggtcgctagaaactcgtcttcgcgttgccccctttctggctctcagcgccgtcgccactcgggagaggctgggtgaggcccgtgtgaggactgaccctggattcctcgaaactgccattgtgatcattactctgctctttggaaatggctgtatcatttttttgtactaatgtgaattgttcctcagaaacgcttcttttccatccctagtgagaagctggccctgcaggtggtggcagcaatggtgttgtaagatttcctcccgtagttttttctcctcatggatttgaatgaaatgccaataacacgtccactttcaacgtgtagtttacgcggagcactttcgaggcctggccgggttgggcctacttctcacctgggcctatcttctgaactcgctaggttcttatcaacatttgggggataactttgtatatttttttcatttggcttttctttaccagtttctgatttttattctcaatatatttttgctaaacctatttcacaaatcaccaccgactgaagtgtgtgtttactgatgcggccctgagctccatggcgaaaggagtgactttgcagggcgtgagaccgcagtctgcttagagcacaggaagtgacaacttagggagccccgtagggcgctgcaggccccggggaccccagcacgtgggtctaaagagagacggagtctagctctcctgccacccagagtggcttccatctcagcactctgtgggtctggtgatggaagatgcagtctctgctgatcacatgtgccctctgccagggcacctactgagaggtgcggtcctgggggtggaggcctgcctggcaggtgtgcgtgcctcgtacgtgtgttatgggcactggtctaggccaggtatgacacccactctcctgtgagatttcactttagtttttaaaaggtccagttctacagagtgagacctatctatctgagtactacatatgttttaagacttggttctttttttgagggatccttgaccctgggaagtctggagcaccctgagaagggggcaccatgtgtgcctttgcccacgtgtcctgaggggctgcttgtctgggagggagggagagaacattcagcagcaggtgcttttttatggccttttcttaaaataacctaagggggacacatccatcttgcagagaagtttacagaactccccttgaaaactgctgctgaggctcctgttaaattttctgtggcatcttttatgccttggtaaaaactgcagtgtctttggacctgagagtggctactccgtggttttgtgacctgtaagcgtggggttcaggggtgtgtggccctgcagggtcccacgcctccctgagcactgactggaagtttcactggctggtggctgtcccttctcccatcagggtccccagcaaagttaactacacagaggacccaggggaaacgagctgtgtagccactgacttgctcgcgcggccgtggcctctgaggggcactcgccggttaagacagggtgggagtagtgctttccagttcagactctaacttctcccaaagtgtcctaagaaaatactggatcggctcatagatttatgctccttatgatgccctaacttggaaggttgttctagggacaggccgggcagtgtccccacacacaccttagagtcgaaggccccagggccccgctgtcacttgcccaaaagatcccttccggcaggtaagggactaccaatgcttacgtcaaaacagcagaatcggctttgcagtgcactttggggagcagatattaacttatttttgtgttggacagtagtgaaatcttgtgatttttaatcgctttgataatacttccaaattttatgatttttctgaaggaaataatgcaaacattttaaatatgtttctccccctttccaaaaactgttaaactaatgagcaagtaacactaactttgaatgtctctacaatacccgttgataactcagtggagccaggctttggggtagcggccctgagcttgcagggtttctcgccactggggctgaccacgcccccagctgtgaccgtgggtgtggctggctctcggccctgcccagctttgttctgaggacgtggtgacttcctgaacatcagcttcaatcctccatcattaatgtgaagcaaaacacaaaaaccgccccaatccctcaggattccttggcatccgaaaccagcatctgcacctaaacccatacccacccgtgtgcgcccacagggggatgtgtccgaatgggcagcttaaaatgtggtcacctgtgggggaaactcttcaggcacctgaagtgagaacccagctgtccgtcctcaggccggcctttcttccggcgacacccgtccatggctggctgggtccccttcgcagtgtttgtctgtcttgacatctaaaccccggcgtgtgcagtgcccatcttccaggactaccttattttccagaattaaacctgttttataattcaagttaatgcaaatgactgtcagttgccaaatatcttgatcctgtgagtgtagttgatgactgtttgttagtcagtagagtaaaatgctgtgtccacggggtgtcacagcctcaccataccctgttgaggtgtgaaatgccccgtcagaaattaaatacaaacttaaatgtgcctattggtgtctaaacttcatacaatgtaaggtcagattccttttaggaatactgggtgctgtcaccaggtttgatagttagacttaaaaacttgaaattcactttttggggggagggatatactgaaatagagagttgagacttgccagttgggggaaaatagcatttaaaatggaaagctgtgtttggaaaattgtgtatgagtatttttgtattaaaaacattttaaaggcttttttcttaactta

SEQ ID NO: 3063 - DNA, 8894 bp, Homo sapiens
tatggtggctttctttagaaaagctcgactttaatggttcagatagttttacaatgaaaataggtacccaaagactgtcttaaatgtccacaactatacaaaagatgaatacaaaactcccaggcaggcacaggcaggggacaaggcccaccgtctcccacgctctggtgtggtcgggtgtccctgccgcacccccagtaccaccgtgccaccttggtcccctcaaccctgggggtaggagggcactgccccagcgagggaaaatagaaaagattttaaaaagtaagagtctaacaggcagagctgtcactaaaattaggaagttgtaacttttttggttaatttacttactacattcaaaaatgtaacgttgagtcaaaaagtgtcttaaatcacacaaaaaagaacccatattaaaattttaaaaataagccccaaataccccagagaaatgcatccagaacttaaaacaggctgggtcagcagcagggcggcggccgggggacctcgggggccaggtgtccgccatccggttactttaagctggcaaagccatcgtcccgtggacccccacaagtgacggccagctgtgaggcaggtggttctaggacacattggtcatgggcttgtacttcttgaagcgcgtccactggcccgtggcatagttcatctcaaacactgtgtccaccagcatggttgtgctaccctggccgtccgccttgggcaggtcctccgtgtgctcgctcagcttgatctggatcacgtccccctgctcctggcacgggttctctgcagagagcaggagctgctgggtgggagtgtctgggggcacccccccacccggcccggtgcacccccaggccctgccttatgaacatacctcgggagccggccatgaagcccaggatgagggccttctcgggccgcgtgactttgttggccgtcttgaacatctcctgggcagcgaacatctgctctctctacagcggggagaggggtgtgggtgccagggccccgccaggaccacctcctgcatccccctgcaggcaccgtggcacccccacgctaggggaggtggccagggccgtaccacctacctggtggcctgtgggccctaccagtgtacacctaccgtgagggacaggttcttcttaggctgctgctgagcaggggcctgggtctgcggggccaccatggcaaccgggggtgtctgagtggtaggggcgacagccggaggtgtggtgggtgtcagaggcgaggtgggcgccgcaggcgtgggtgtggcagggctcaggccgctgttgtacatgggcgcccgctgcttgaactgcgctggcaacgtggggctcggggcgctgggctcctctggtgggcggctggcttcccgggaagatggggctgcaagtagaccggggcctggtgagggggctggacccccaccctgttcccaaaccctagtgctcctggaggtgacaggctcagctccccttctctgtcctgctaccctctgacaagaactccctgtggcccccagccaaggcacaggccccagaagccccagccagaggaacaaggccagtggtctcaggcctttccagactcgcagataagatgtctggactctggccagctgctggcctgcagcaggtccccataccgtaggcactgctgggaagacaggaaggctgtatcctcaagccccttgggcccaggacctggcctgaggtgctgtgagcctggcagtgccctccgtctgggaggggatggctctcagctcccctcccgcctacccagcaacaagagctgggtcacctggcagaaaaccctttcgaacccaatccccttcctgccgtgtcccctggggccgctgcctgtctgtgcccaggacgggcagggtggggcaaagcagctggtttatgtcttggagctcaagctgaacagcggggcatctgcccccagcagattctggctgaggcagaagggggacaacagagatgcaggagtgagaaccgcagccctggcagcgcccgtgggcaaggtcatgtcctggcaggcagcttggctggttccaggctggggccagcagactcacctgggggcgtctcggagctggggatgtaggaggaggcgggaaccacgctgggcgtggagggaaggtagctcgtggagggcagcgcaggctcattgttcagggacccaagtttctggaacacagagtttaaggttccttccagaagaggccatgcttccggcatgtgctaacacatggcccgacccggagctccactgccacaggctgtggccccccgagctagagcaggaaggcgggggccactctcccgagctccctgggctagacaacgggacccctggcccctggcgccccagcagagttggggactgagccgctcctgtgtaggagaggggaggggttgaggagcccaaacagcccatcttgagcacagaaggagcgatgctttttcttaccacgaagcattgatataaaggaagatgctcatgttaagaaacgcagaacacgcagcggcgggaagaaaggagcttattatcctgaagtgaccccacagtgtggcctcctccaggccctggcctcagacgacccactgcagcctctgtgcacctgccgcgccccgtggctgcctcccacccgcaggcagggcctggtctccgggacactgaggcctctgaccacccagcacccccacaggcctgtcctgcacccattcacggccacgtgcaaggcttaggtcccaccagccctgcctgacgggacactgaggcacagggttgaggaggactcccctggcagcccctccagcaagcgtggggcaggttcccgctccaagcctgagtcagatgcccatgtcagggcacggcccacactgcctctcatgtacatatacgtatatatacataaatacagactgcacacatatgtacatacatatatatattctccgacagagcacactagtggccacaatcggaacaaaaggggcacccgcagtggtgccagacatggggtgcagccccgagccctacctgcgtggacaccaggccggctgcgtagtccggggtggcgttctccaccaccgtttcctccttggccggcttctccaccacctccgcatctgtggacaaaacaggagtcctcgccagtgcccgggcgcgtctgcagtgtcagctcagggcagcggcagggaatcaaacagcttcccaggggaggccaccaaggagcgaggagaaaagcaggcacccacccacggagagcagcctcacggggcacagccctgcccgccgagcgtgggcacaacccaccccaactgggcagggcccgcagggacccccattgccgccgacacgcaggccccaacccccaccgagagtcttccttctccgcttcgcctctcggccagcgccaaccatatccagctcagagatgtccagcagctgccaagacaagcacagccctgccttagtgacggcaccagggcgcaacgggccccggggtgccacaggagctgggggacgggcctaccttcacacctcgttccttccgcagcagcgtcctggaaggcgggatgggggtccggttccctgtggggctgaagacgctgggcgccgtggggcttctgaagggcgcctgcttcgggatgcctttgagtggggctggaggacggcaacagtcagggcgccagcagcagtgaccggcaaacgtcccccaccccctgagcccagaacgtcccaccctcttctaggctagcgccgcagaggggaagggccaaacccctggcgggcggcgggcaggacccccaggatcccggacctcaaggagcaggggaacgcctggagccacgacctcacactttgccaagacaccaaacaaagacagcggcaccccagcccagccacaggatctcaccaggtggagtctctcaccagtgtggcgggggctgagctctgcctccttcctgtgcctccaccggcaggggcatgaagccaggcgcctgggcttgagggccgccctcccaagccttctccccctgtcccctgaggacactcctgaggcctacctacgctgttacccaccagcgcccacacgcaccctccaaggcgtgcgtggctctcatggtgccaggcccggagagaggacgcccgggggatggtgccatcagcacaccgggccaggctggacacactgctcaacggctggcccaccctccctgggccagcaggtgcagccctggccctgggatgcctggtgggggtggaaagacaagggtctgctccaggcggggtagaggagagcaaggtggaacctcggctgcggtgggcaggaacatgacccagggacggccccccacacagcgacaatagtcagcagacccaagatgccttctactaggtcccatgtgaacactgtgggattatgggagcccaaataaactaagccaggctggtctgggagctgcatggagagcgcctgtaaggctgccctttcagccccacccatctgcaagtttacccagctgtctcagcacaggacgacacccgtcctgccctctggcccccaggtcactatccagcaccctctggggtgagtatgccctgccatggttcccaggggcacgccgtcttcctgtgatcagggtgcatcctgcttaagctcacgcccagccctgagagcacaaatcaggaagggcagatggaggggtgcggggggcacagccccacgggcagctgagcacggtcacgtcctccccgcggagccgcccagggacactcggaacccaagagcagcacttggggccgaaagcccgagctgggaaggccgagagccaccggtgccaacagcagaggagcaggggccagcactgtcctcagatcccggccttcctgtctccatgcccagcggtgtcctcagatcccggccttcctgtctccgtgcccagcactgtcctcagatcccggccctcctgtctccgtgcccacacatcctcccaggggagctccccaaggggagaagccggtgaaattgccccagtgccttcgctttcccacgggctcccaacactgctgcctgaagaccattcacaggcaccacctccccaacagggagcgggtctccaggtgaagcccttagctctgccccaaaagcaaggctcacggcaccagggtgggggccttactggtggtgtccatcttccgcagcagcccccggcccttggcgtggaagggcaccccggcgctccgcttcaactgctgggcggtctccgtggctggaaggaagaggtcacatatgtcagggatcctcagagcgagagcccttggcccttgtaaaaacatctctgtcaagtggattcatccgacggcctgagccgtgaacgctgcattctctctaaatgagcagctgttccgagccgggcctgacaccagctcgcactttacaacgagtcagaaactcactcaggtgagcaagtttcgggagctgggtggctgtggctgcacctcccaggaccccatggcaggggggaggcagccgaggaggagctgagggacctcatgagccctctccatcgacccgggcctccccctggcccagtggtagcaccgtcctcgctgagggtcagcaggcacggtctagatacaaaaatatgaggaagaaacaaacgaagagatattcctgacttggttcagtgtggctgaagggtcaggggacaccgagtgcccaaagcagaccctgtggccactgctggcctccaaagggggtggggcccaaggggccagcagagtccttcctgggctacccagtgggcccggggctgcacggagcctcccggacagcgctgggccctggctgctgcccgttccagccaagatccatgcacagctgctgtcagccttttatttggattctctggaaacggggtattgatgtacattataaatattaattccataaccattcaaaataaaacgatgttattgaaatctttgtcgtgctttgggaaaacgttaactgaaatgattaaatatctttcaagtggaattgagatcacccgccactccagaaggcagcaacgtgagagtaaggaacgtgcccctccagccattcaccctggcacccaccgtgcccaacagcgtgactcagctggcacagagttcatttggtcacagagattagagatgccttcacctaaaattctgaagttggtgggttttttttttttttttgagatgttgtttcgctcttgttgcccaggctggagtgcagtggggcaatcttggctcactgcaacctccgcctcccaggttcaagtgattctcttgcctcagcctcccaagcaactgggattacaggcatgcaccaccacagccagctaatttttgtatttttagtagagacggggtttcaccatgtgggccaggctggtctcgatctcctgacctcaggtgatctgctggcctcagcctcccaaagtgctgggtttacaggtgtgagccaccatgcccagcctaaattctgaagtttttaaagcatgttttcagaacataaagtttaatatagtgataaacttctaacaaaaaactttatgcagaactttatcttctttttcttgagacagggtctcactctctcccaggctggagtgtagtggtgtgatcacagctcactgcagcctcaacctcgtgggctcaggtgatcctcctacctcagccttccgagtagctgggagcacaggcacgcaccaccatgcccggctaatgttttggtacttttggtagagatggggtttcttggctggtctcaaactcctgggctcaaacgacccacctgccccagcctcccaacaggtgtgagccaccatgcctggcccagaacgccaccttgaaggggcagtcttggtaccttagaacctaagaaacctatgactggaaactacaaagacaatgcccgatggcggccgcggccactcacacttctgcagcagctccgcccgcagcgtggcgctcttgggtttccgctttaactgaaaatgcttcaccgggggagtgaggggtcccgcgagggtcgtcagggcgtttttgttcaagtactggcactccagtggcagcatggcagacgcttcacactcacccactgccggtaagaaccacatgaagttaggggcgcccaggccgcagacctcccggctgagaggagctggcggctgcccagccccacaccctcctcagttagggttaggtcatgggagcttcggctgtcccctgaggtcctcgagactgactccccacggctccagcagaacacccaggagcatttgcagaacaggaatgcctgagaggcgggcatgccttgagagggctgtaaactggaaacctctggcaccgcggacaccaagaaccacaggcggacatagatacagtgattcctggagggctccagacacttgtagaacatgaaatgttaacagatcccacccccacgtaagaaggacccccgatctgtggcttctctcttcccgtccccgagggtagccaggctggtggtctctcctggaaccctggccctcatccaaactgcccacatccatttcctcagcctgtgtgctcacccacggttcagatcccagaaactgccccacgagggacaggcgacctcccacctgaactggctacgtgccccacctggagaaaaagcacaggcaggcacatgagagttcaccggcctcagccttcctgcccgcgggacactcctgagacacgaacgggtggggtggggtggacctgtccagaccactgctccagaggcatctgtgtggtgtgtgtgacctcacaggtggggagaggtgccacttgcaggggggtggccagcagggcccctgcaggagtgtgcagcctcgatgtctccatcccacaaccctgtctctctgggtgctgcccttgaaggagctggggcacaacgtttgggctctgaggagccagttccaattgtccaaagcaggagagaaactcagaaaagcacaagcatcaagcatcccatcaagacatgttcttcaaatccatctacaaatagttgtttcttttaagagatacattctcaccctgttacccaggctggagtgcagtggcgcgatcatggctcactgcagccttggcctcccaggctcaagtgatcctcctgactcagcctcccaagtacctgggaggacaggcatgtgccatcacgcccacctaatttttattttttgtacaaatgggttcttgctatgtttcccaggctggtctcgaactcctgggctcaagcaatctggccatctcagcctcccaaagtgctggggttacaggagtgagccacggagcccagccttgtgaatattttctaagtgactttcagttcacatttaaacaactaaatcgttgatattttcaacatgcatttctgagcatgtactctgggccagggaatgctctgggccctagaacctaggatctacagataccacctgaatgggcagagcccctaccctcacggagccgaccagagagagacggcgagtggcgtgacacagcctcccactgacaccgcagcagtgaggatggggcctgtgggctgtttggagtttgttttcaaagatggcaaaagccaggcagcagcttacgggggaggatggtgcatatacagttaatattctagggaccaggacacacggaaaaacgtaaaggtctaaaaatcaaattcatttcagaaaaaaatttttcaagaaagatccatttccctccacccaacatgaattaaagcagcacaacatacccttttctctaagttctcccaaaatatcctgaacgttgggattctgctcctccagctccag

SEQ ID NO: 3064 - DNA, 513 bp, Homo sapiens
gcctcacagtgacagagccttaaagtgtgcactgctctgattagtgttcatgacgctagtccatcttcctggaaaaggtgaggaaaccaagattaagaggctgcgttttctttagactttgtgctgtcaggagatgtatctagtgagaagagaagagtggctcacatctgtcaccacccacagtcaccagtcagaggcgacggaagcccttggaaaaagcccactctggctgggtgcggtggctcatgcctgtaatcccagcactttgggaggccaaggcgggtggatcacgaggtcaggagttcaagaccagcctggccaacatggtgaaaccccatctctactaaaaatacaaaaaatttagccggacttgttggcaggtgcctgtaatacccagctactcaggagactgaggcaggagaatcacttgaacccaggaggcggagtttgcagtgagctgagattgtaccactgcactccagcctgggcgacagagcaagactctgtctcgag

SEQ ID NO: 3065 - DNA, 1273 bp, Homo sapiens
caattcggaagtggaggtgaaatcagtggtagatttcatccaaaaacatgggaatttcaagggcttcatcgacctgcacagctactcgcagctgctgatgtatccatatgggtactcagtcaaaaaggccccagatgccgaggaactcgtgagtcacagctgcctcccacccagcctggggcccgcctgaccctcctggcgctgctaaggtggtagctctgcagctttatagggagggtccaggagcctaggcatgtttcattgaaggtccaatcttctctccctgccctttgggatatgctgtcatctgctggggacaggaaaacagtgccctttatttctgtgtctgctatgagttcccagaaccgtgcctgccccgcctttccgtctcccttgtttttctgactgccatgtattgtggacccactgcttgccaaggactgtgggtggcacctgggtgggcaagggggagagatcctcactctagtgaaagaagagtttaaggagggcgaaggccacagcctggggtgctctgtgtctcatccagaacgtgggccatcaggagcaggcctggcatctggagggtgactgcaggtggctgcccaggctcacagccagcccttaaacctcaggcagatgcagcccctcccaggctcacggcaaagtgcgggcttgattctgctcccccacccccacccggcctctcaggcaggcactctacacagggatcatccacctatggcggtccttctcctcctccactctgcaacacccaactctttgagagctttctcttgagcatatttggccctccctcatgtgtgcatgacgtctcccttctcaggataggtgaagacggtggtgcctttactagattcctagtgggtcagtgagcagccccagaacccccatctcttccaatctgagtacataatgcacaggcttccacttccctcctcatctcctcccccaaactgggagtcaagaactgggggtgtggtgggagaaggagttgaaggaaccatgccacctccctcagtttacagttgggccttgcgactgggcgaaggggaaacaagggaccagaaaggaaatcggggggggctgagaatcttccaaaccatcccagagcagagcagctgaggaaggtcaagcttcaggatcgattttttctcactccacggattcccccttcccaggacaaggtggcgaggcttgcggccaaagctctggcttctgtgtcgggcactgagtaccaagtgggtcccacctg

SEQ ID NO: 3066 - DNA, 1273 bp, Homo sapiens
caattcggaagtggaggtgaaatcagtggtagatttcatccaaaaacatgggaatttcaagggcttcatcgacctgcacagctactcgcagctgctgatgtatccatatgggtactcagtcaaaaaggccccagatgccgaggaactcgtgagtcacagctgcctcccacccagcctggggcccgcctgaccctcctggcgctgctaaggtggtagctctgcagctttatagggagggtccaggagcctaggcatgtttcattgaaggtccaatcttctctccctgccctttgggatatgctgtcatctgctggggacaggaaaacagtgccctttatttctgtgtctgctatgagttcccagaaccgtgcctgccccgcctttccgtctcccttgtttttctgactgccatgtattgtggacccactgcttgccaaggactgtgggtggcacctgggtgggcaagggggagagatcctcactctagtgaaagaagagtttaaggagggcgaaggccacagcctggggtgctctgtgtctcatccagaacgtgggccatcaggagcaggcctggcatctggagggtgactgcaggtggctgcccaggctcacagccagcccttaaacctcaggcagatgcagcccctcccaggctcacggcaaagtgcgggcttgattctgctcccccacccccacccggcctctcaggcaggcactctacacagggatcatccacctatggcggtccttctcctcctccactctgcaacacccaactctttgagagctttctcttgagcatatttggccctccctcatgtgtgcatgacgtctcccttctcaggataggtgaagacggtggtgcctttactagattcctagtgggtcagtgagcagccccagaacccccatctcttccaatctgagtacataatgcacaggcttccacttccctcctcatctcctcccccaaactgggagtcaagaactgggggtgtggtgggagaaggagttgaaggaaccatgccacctccctcagtttacagttgggccttggcactgggcgaaggggaaacaagggaccagaaaggaaatcggggggggctgagaatcttccaaaccatcccagagcagagcagctgaggaaggtcaagcttcaggatcgattttttctcactccacggattcccccttcccaggacaaggtggcgaggcttgcggccaaagctctggcttctgtgtcgggcactgagtaccaagtgggtcccacctg

SEQ ID NO: 3067 - DNA, 632 bp, Homo sapiens
ctcatgaggagactggggctcagagagttttagtgctctgatttatatgacttgtctaactcagcttatatgaggaggagctgagatccatccagaatttaaggctcagatcagggctgctccttgaggggagccctgttctggggctagagctatgcctggatgcttgtcattggctctgctgttttgtgctgaacatgccatggtctttttcacaccaagggcaggatttggtgatatgactgggaaggtagagccctgcagtgtgggagtcagggagcaggcaggtgagaaggaagagccaaccccagccttctgtgtgaaccagttaaagactgtttatggccgagggtgggaagtgcctttgctgggcacacagtgcccattatcacccactgacttagcacattcagaactgccttgcaatgtctcctcaggggcccaagctgtcttcagcagaacactcaatttccctttaataaagggggtgggggccaggtgcagtggctgacatctgtaatcccagcactttgggaggctgaggcgggcggatcacctgaggtcaggagttcgagaccagcctgaccaacatggtgaaaccccatctctactaaaagtacaaaaaaaaaaaa

SEQ ID NO: 3068 - DNA, 632 bp, Homo sapiens; identical to SEQ ID NO: 3067

SEQ ID NO: 3069 - DNA, 331 bp, Homo sapiens
caggtgattttcacctttctccttctcctcatggaaccagattttaaaacactacctcattgagaaaaaaaaatacaaaagaataaaagcagaaactctctggtagagcttgggcagagaaggcctgagctctgtctgtggacttctggcctgaatgacccccaaggttccttctttctctaataggccagagcagcagggacctggtgcagggtcctcacaggcatagatagcactgggttccaggactgacacaggggctacaggccactgtgggaatctatccacgtcatggatgtgtgtacacgttcccttagctgctttcctgact

SEQ ID NO: 3070 - DNA, 331 bp, Homo sapiens; identical to SEQ ID NO: 3069

SEQ ID NO: 3071 - DNA, 607 bp, Homo sapiens
gtgaattgtctgagttctgctaaggaaaaaggacttctgcttctgctgcctgtgaggactgtgctgtcagcagtcacggcccttcaggccctgcacctcgaggcagagccctcccccggccatggccagctctcctaaccaagtgtctctttcccccagaatggctgcagtctgtccaggccaccatgatcctgtcgatcatcttcagcattctgtctctgttcctgttcttctgccaactcttcaccctcaccaaggggggcaggttttacatcactggaatcttccaaattcttgctggtaagttgtggatggtaaagtccatgtggaagcggggtgcatccaagtctgcggaatgattagtttagtagaaggatgtggcctcagaatgactgatgttcatgagtctccccactggatgctttccataaagtgagggtgggtgcttgtatgtgtgggtgtgtacctgtatgtgtcttagaacttgggacttagaactctccccttctccctggaatgagatgcatatgaaagagaacttagaggatctggaaggaaggtccccacccaagccaggcgtatcaacaggaatgaaactgcaatctgg

SEQ ID NO: 3072 - DNA, 607 bp, Homo sapiens
gtgaattgtctgagttctgctaaggaaaaaggacttctgcttctgctgcctgtgaggactgtgctgtcagcagtcatggcccttcaggccctgcacctcgaggcagagccctcccccggccatggccagctctcctaaccaagtgtctctttcccccagaatggctgcagtctgtccaggccaccatgatcctgtcgatcatcttcagcattctgtctctgttcctgttcttctgccaactcttcaccctcaccaaggggggcaggttttacatcactggaatcttccaaattcttgctggtaagttgtggatggtaaagtccatgtggaagcggggtgcatccaagtctgcggaatgattagtttagtagaaggatgtggcctcagaatgactgatgttcatgagtctccccactggatgctttccataaagtgagggtgggtgcttgtatgtgtgggtgtgtacctgtatgtgtcttagaacttgggacttagaactctccccttctccctggaatgagatgcatatgaaagagaacttagaggatctggaaggaaggtccccacccaagccaggcgtatcaacaggaatgaaactgcaatctgg

SEQ ID NO: 3073 - DNA, 208 bp, Homo sapiens
gagatttcaaaaccagacagtgctttgctacttacacatgtcttatgacaccaagccaagctcctggatggttgctggctctgttaaatgactaattatgcaaggagatatcatttctaggtacgttaaagtgaagagttacccttactcaattttcagttggaataaaaacaactgtaacatattctggggtttctttttttttttc

SEQ ID NO: 3074 - DNA, 390 bp, Homo sapiens
cagttactgagctgaaaggattaaatgctgcagcttccccagttgcccttcctccatgagagcagtgcctgcccccagcattctgtggcacttggaagacaagacagaggccaaatgcagatttttaccctgggcttccctctacagtgtggaactcaggttgtttcttctttcctccctgaaatgacatgagtttgcagcggatggtgaactgaagaaaccataggaggctctgtcttcttgcctgaatttcagttggaagcttggagatttggggttcaacagagataaggaagtgtaagccttcatcccgtctggtggttggcgatcacacaccgctctgtgctgaggctaatggccatgatcagagttgaccaaaaaaaaaaaaaa

SEQ ID NO: 3075 - DNA, 734 bp, Homo sapiens
gtgaagagtgctagactagaatcaaaggcctcttagatttggctgtgtcatttgggctcatgaaaacacctctggaaatctctttcagtgcaaaggagctggactagttgatctctcaggtttcttccaactctaaaatatctccagtctgtgccttggaaacatcttaggtgaaaatctaggaacagttaacctaatttgcacccttaaaattctgccatgagctgcttacaactcaaaacaagtttatcttactcagttactaattataaaccatccagatttcagagctgtgagtactgggtgaagcattgaaggtatgcttttgaagccattacatatggcagttactgagctgaaaggattaaatgctgcagcttccccagttgcccttcctccatgagagcagtgcctgcccccagcattctgtggcacttggaagacaagacagaggccaaatgcagatttttaccctgggcttccctctacagtgtggaactcaggttgtttcttctttcctccctgaaatgacatgagtttgcagcggatggtgaactgaagaaaccataggaggctctgtcttcttgcctgaatttcagttggaagcttggagatttggggttcaacagagataaggaagtgtaagccttcatcccgtctggtggttggcgatcacacaccgctctgtgctgaggctaatggccatgatcagagttgaccaaaaaaaaaaaaaa

SEQ ID NO: 3076 - DNA, 208 bp, Homo sapiens; identical to SEQ ID NO: 3073

SEQ ID NO: 3077 - DNA, 6153 bp, Homo sapiens
actgaatgtgagagctgctgtacccctgctgctgtgggctgggaaggctgtttaagcactgcaggagacatgtatggagaaaagacttcagtataattgcaatcacaacccacgcactgacactttcccataacacacattaagagtgacatggtgccaggccgggcgcggtggctcacgcctgtaatcccagcactttgggaggccaaggcaggcggatcacaaggtcaggagatcgagaccatcctggctaacacggtgaaaccccgtctctactaaaaatacaaaaatttagccgggcgtgatggcgggcgcctgtggtcccagctactcgggaggctgaggcaggagaatggtgtgaacccgggaggcggagcttgcagtgagccgagatggcgccactgcactccagcctgggcgacagaggtgagactctgtctcaaaaaaataaaaataaaataaaattcagggccctgaatctgcgtattacctacccccaccccatcatgtgcagctatctgtaactgcacagactttaatacaaatttctagtcctgtcctaacatcttggggagggaagacctgctgctgccttgaagacccacagtggcagcaacagcccactaaattgcagaaggacgccgctgtagtagaaggtacagtggaatagtttgaaagtttgaactcacgttttttacttcctctgctgcagtccagggctcacttgaaaagctaaaaccttacctgctaggagctccaggctgctgttatcaggtgcgtcctcagtgccctgggctgagtcctttttttctagggttagctgcttaaaaaaattagaagtcctaagtgagttttgtagaaacatgaacgagccctagtgaaacaggagtgtgcctggtggcttcactgacctcacaaggttatctgccctcacctggaactccctcttcctcctggctcatgaatccccctacccaccctccagtcttcaaggtttccctctgtggatccttctccactctggccattcacggcacatcctttcttctctgagctccagtctcttggctactgcctgcccattcctcgggctctgcatactctgcaagtatcctgtgtgcccattcatcaagtaatgtgcaaatgtccattttctacaccctaaatcccttcaaaggcaagggccatcatgcctttatcactttacagctagcagagtgccttacaccaggtaagtttgactgagaaagtcaaacctgggaagccacagggtatattctgtagtcatcggtagcctcctagagccctgccacactggttagttcaataatttggacagagaaaaagaggttcttactgagaccagaacccaatcctcccagctccttttcaagaatacagatgtataaaaataggtatcttcttcctcaaaattaaaaattcatagccaggcgcggtggctcatgcctgtaatcccagcactttgggaggccgaggcaggcagatcacctgaggtaaggagttcgagactagcctggccaacatggtgaaactccgcctgtactaaaaatacaaaaattagctggctgtggtggtgggctcctgtaatcccagctactcaggaggctgaggcaggaaaattgcttgaacctgggaggtggatgttgcagtgagctgagatcacgccattgcactccagtctgggtgatgagtgagactccatctcaaaaaaaaaaaaaaaaaattaaaaatttgtgcttctcggccaggtgcagtggctcaagcctgtaatcccagcactttgggaggccgaggcaggcggatcatgacgtcaggagattgaaaccatcctggctaacacagtgaaaccccgtctctattacaaatacaaaaaaattagccaggcgtggtggcaggcgcctgtagtcccagctatgcggtaggctgaggcagaagaatggcgtgaacccagaaggcagagcttgcagtgagccaagatcacaccactgcactccagcctgggcgacagagtgagactctgtctcaagaaaataaaaataaaataaaatttgtgcttcctatgaacaaaagtgaaaagtcaatccacaagaatgggagaagacatttacaaatcatacctgctaaggtactgttacccaaattaaagaactctttttaaaatttatttataggccacgcacggtagctcacgcctataatcccagcactttgggagactgagccaggcagataatgaggtcaggagtttgagaccagcctgaccgacatggtgaaaccccgtctctactgaaaatacaaaaattagccaggcgtggtggcgcacacctgtaatcccagctactcaggaggctgaggcaggagaatcacttgaacccgggaggtagaggttgcagtgagctgagaatgctccccttcactccagcctggggggcagggcaaaaatccatttctacaaaaaaaaaaaaaaaaaatcatattttctgtagtgacgaggtctcactatgttgcccaggctggtctcaaactcctgggctcaagcgatcctcccacctccgcctcccaaagtgctggggattacaagtgtgagccaccttgcctggcccaaggtaaagaactctcataactcaataatttaacaaaccaatttaaaaatgggcaaaagagggccaggcacggtggctcacgtctgtaatccctacactttgggaggccgaggtgggcggatcacaaaatcaggagattgagaccatcctggctaacattgtgaaaccccgtctccactaaaaatacaaaaaattagccgggcgtggtagtgggcgcctgtaagtcccagctacttgaggcaggagaatggtgtgaatccgggaggtggagcttgcagtgagccgagatagcgccactgcactccagcctgggcaacagagtgagactccgtctcaacaacaacaacaacagcaaatgggcaaaagatttgaatagacctttcttcaaagaagatatacaaatggccaataagcacatggaaaagatactcagcatcagtattcactagagaaatgcaaatcaaaaccacgaaattacttcacatgcactagaatggcagtaagaaaaacaatgacaacagttaatgagggtatagagaaattggaaccatcacacagtgctggcaggaatgtaaaatgatgcagactgtggaaatcagctcgaaagttctttaaaaagttagaacatagtgttatcatatgactcagcaattctactcctagatatatacccaagacagttacaagcatgtccacacaaatatgctgttcgtaacagcatattcataatagccgaaaagtggaaaaaacttgtgttcatcaactaattaatggataaaatgtggtatatcaatacaatggattattattcagccataaagaatggatgaaattgttatatggtacaacatagatgagccttagaaacatgctaaatgaaagaaggcacataaaggcccatgttgtatggtcccatctatatgaagtgtccagaataggcaaatccacagagatgggaagcatactagtggttgccaggggttgaagggagaggggaactgggactcactgcgaataggtactgctaatggcatgatggagatgttctgtaattttagtggcgatggctgcacagcacagtgaatatacttaaaatcaatgagttttattctttaaagtggtaaattttatggtatatgaattatctccatgagagatctatcatatattgtttactaaaacaagttttagttcccaagtaattatattccaaggaacataggaggggcaaaaataattctaaagacataaagaaagaaacaggatattttctaaatatttttatcttgagacagaacttggttttttttttggctttagcttggaaaatctcgtgtcatagataaatctttctcctatcttgaaattggtcttatcaaggaactacccgcattgagatatgaagctctgggcctctctggtagccttgcacacccttcattcatcacctggtcccccagataagacagccctgacctcagaatacaccttggatttaacattctatgggacatttatttctagtctaccccctcccccgacccgccggaaacaatgcctttccttagaaaattgcctccttgatactactcctgctcattctgggtttaagttctcagtccctacatatatctatgacactaaaccctggagtactatcttgttcactccttcctggcccactgtctctgttcaaacattcaggcttaaaatatccactcctcgccaggtgcagtgatgcacgcctgtagttccagttactcaggaggctgacacaggaggatcacttaagcccaggagttcgaggctgtagtgcaccatgatcacacctatgaatagtcactgcactccagcccgggcaacatagcgggaacctgtttctaaaaaaataaaaacaaaataataccttctccattcctgcatgacctttccctgaatatattcactctgaatacacactccctcattttttcagtttctcaataaagcatataatagatggttttcttccctgttactcaagaggtcagctattctacctttcctgtttagaaatggaaacagaatggcccagaggtcaaagaatttgacctatcatccttagtcttgtagttctagctgaagccactgggtgccactcttgtaccactaacaagttatttatcactaaatggccattaccagaggatgttgagtggagaatcatgggttctactcaatgacctggatcactcatctgccctgggcttgcaacctagtcctctgtgttaacaatattaccaggtttcagagccgggagctctcggtacaaattctagccttgctatttactgactgtgattctgggcaaattatgaaagttctgtaatcagtttcctcatctgtaaaatgggaaaactatgacctaatttataacatctttgcagagattaaagtgaaaatctcggcacagattagggattcagtaagtgttccttctttccaagacctatgactactggtaagaccttgagttcactagccatatgccaaattaattgggctatgaatggccctgaggctatgagccatgactatagcaaaagaacagggtaaaagaggtcagatctttttttttttttgagacagagtcttgctgtgtcacccaggctggagtgcagtggcatgatcttggctcactgcaacctccgccccctagattcaagcgattctcatgtctcaccctcctgagtagctgggactacaagggtgtgccaacaggcctggctaatttttttatttttagtagagacggaattttgccatgtttgccaggcaggtttcaaactcctgacctcaagtgatccacctgccttgccctcccaaagtgctgagattacaggagtgagccaccgcacctggcccagattatcttttttaggtcttactgggataccacagaggcccaagtaaaagtacttcagaggctgaagcactcctagatcctgaggagtccctctgcgcttatatcctgggtcctatgataacagcacatgccttaccctgaacctgtccctagaaagctgaagatgtggatggctgtagtgaactgcattctcccccaccccaaatatgtccaaatcctaacccccagaatttgtgaatgtgagcttatttgagaaaagtctttgcacatgtaattccagatcgcaagacaggattagcctggatttagggtgggccctaaatccctaattacctgcctgtaatcccagcactttgggaggccaaagcagccagatcacctaaggctaggagttcgagaccagcctggccaacatggcaaaaccccgtctctactaaaaatacaaaaattagttgggcatggtggtaggcgcctgtaatcccagctactcgggaggctgaggcaggagaatcacttgaacccaggaggcggaggttgcagtgagccaagatcgttgccactgcactccagtctgggcgacagagcaagactcggtgtcaaaaaaaaaaaaaaaaaaaaaaaggg

SEQ ID NO: 3078 - DNA, 471 bp, Homo sapiens
actgaatgtgagagctgctgtacccctgctgctgtgggctgggaaggctgtttaagcactgcaggagacatgtatggagaaaagacttcagtataattgcaatcacaacccacgcactgacactttcccataacacacattaagagtgacatggtgccaggccgggcgcggtggctcacgcctgtaatcccagcactttgggaggccaaggcaggcggatcacaaggtcaggagatcgagaccatcctggctaacacggtgaaaccccgtctctactaaaaatacaaaaatttagccgggcgtgatggcgggcgcctgtggtcccagctactcgggaggctgaggcaggagaatggtgtgaacccgggaggcggagcttgcagtgagccgagatggcgccactgcactccagcctgggcgacagaggtgagactctgtctcaaaaaaataaaaataaaataaaattcaggg

SEQ ID NO: 3079 - DNA, 399 bp, Homo sapiens
gctgctgttatcaggtgcgtcctcagtgccctgggctgagtcctttttttctagggttagctgcttaaaaaaattagaagtcctaagtgagttttgtagaaacatgaacgagccctagtgaaacaggagtgtgcctggtggcttcactgacctcacaaggttatctgccctcacctggaactccctcttcctcctggctcatgaatccccctacccaccctccagtcttcaaggtttccctctgtggatccttctccactctggccattcacggcacatcctttcttctctgagctccagtctcttggctactgcctgcccattcctcgggctctgcatactctgcaagtatcctgtgtgcccattcatcaagtaatgtgcaaatgtccattttctaca

SEQ ID NO: 3080 - DNA, 790 bp, Homo sapiens
caaaggccagaaaggcagggggaaggactgacaaaccaaaggctcctgagtgagtggaccaccaatggatggtggcatcaacacacagtttggtgattttcttcagcagggctgcccatgtgaggcgtagaatggatgctgagagccacaggtctgtaggacagaacagcccaagccatcctccaggggttccaccagattataaacacctagattttaaagctcatgttgcacactggagaaaacatgggctttggaggcggcaaactgaaagtcattacctcctgctaagcgttctgcctcacctgagcctgggtcctctagtttgttaggatccatgcctccccctgccccccagaagggcactgtaaagactaaatgagataaggctgtggaagaccccagcatctccccagggtccacagaaggtactgaattaaatgttaatttttttccttgtatgggaagatacttattcctttgtctcttctgactgcataaatactgaattgtatgtatcatatttgcattttttaaaatctccagatctaaatttataaaaatagattctttgctttgtacaagcgttcacagcagggttcttttcagtagcaacagcccccacaacatttaaaacatggttcagttgacagtgatttcagggacacatcttaggcctaagcataaacgcgtatgtgttgtggttgtgaccctagaaagagggatttaccaaccaagcataggtgctgacgtcacgatccccagcttcccttgacccagatactgtttt

SEQ ID NO: 3081 - DNA, 789 bp, Homo sapiens
caaaggccagaaaggcagggggaaggactgacaaaccaaaggctcctgagtgagtggaccaccaatggatggtggcatcaacacacagtttggtgattttcttcagcagggctgcccatgtgaggcgtagaatggatgctgagagccacaggtctgtaggacagaacagcccaagccatcctccaggggttccaccagattataaacacctagattttaaagctcatgttgcacactggagaaaacatgggctttggaggcggcaaactgaaagtcattacctcctgctaagcgttctgcctcacctgagcctgggtcctctagtttgttaggatccatgcctccccctgcccccagaagggcactgtaaagactaaatgagataaggctgtggaagaccccagcatctccccagggtccacagaaggtactgaattaaatgttaatttttttccttgtatgggaagatacttattcctttgtctcttctgactgcataaatactgaattgtatgtatcatatttgcattttttaaaatctccagatctaaatttataaaaatagattctttgctttgtacaagcgttcacagcagggttcttttcagtagcaacagcccccacaacatttaaaacatggttcagttgacagtgatttcagggacacatcttaggcctaagcataaacgcgtatgtgttgtggttgtgaccctagaaagagggatttaccaaccaagcataggtgctgacgtcacgatccccagcttcccttgacccagatactgtttt

SEQ ID NO: 3082 - DNA, 244 bp, Homo sapiens
acagtcgagtcggggacacgtgagagtctgtggtggtgtgcgtggaaggcaggcaaaagttcttcattttgttttaattccatagtcatattttaataggaaatatattgacttggtttaaaattgatacaaaagcatatatagtgaaaagtttccctctcatcactttgtaggacacaaattctcctcccagaagtcatcacttttttgatttcttaggaaagttcaggagatcatttaggaa

SEQ ID NO: 3083 - DNA, 244 bp, Homo sapiens; identical to SEQ ID NO: 3082

SEQ ID NO: 3084 - DNA, 934 bp, Homo sapiens
gcaagtgtgggtagcatgctctcttctgggactcctggctgagggtgcttggatggtggcattgagctatcttctgccatggataggctcccaacagtgggagctgtaaggaatcaacagttccaggctatgtccttatggcacaataactcccatgggaagagtttttcccctcccctcagtagttccagcaaaagtcccaggacctatttgcattatcctgagccaggcactgtgactctggttggcgaggtctctcaggcaccgatcccagtttgtgtggactgaaagggacagaaagaagggcgaggctctgaaggaaagccagtgtttctgttcccagaagacagaatagatgctgggtgagcaaaaacaacagatgtccatctcagaatcacagtactaattcccaccgtcacccccccccactgccacctgcctccagactgcctttgcttgcaataccagcctcttccctctgtctcagaagcaaagcttgcctatgctgggttctgctcctgcagtcaagtcctgcctgggatcactgcaaggatgtcctgtagtgcagggatccccaacccccgggccaccatggcctgtaaggaactgggctgcacagcgggaggtgagcggcgggcaagcaagcattactgcctcagctccgcctcctgtcagatcagcggcggcattagattctcataggagcgcaaactctattatgaactgcacatgagagggatctaggttgtgtgttccttatgagaacctaatgcctgatctgaggtggagcagtttcatcctgaaaccatcccccaacccgcatcccctatctgtggaaaaattgtcttccacaaaactggtccctggtgccacaaaggctgggaaccgctgctgtaggggtgtgcttctgcccctataatagggtcagtctttt

SEQ ID NO: 3085 - DNA, 934 bp, Homo sapiens
gcaagtgtgggtagcatgctctcttctgggactcctggctgagggtgcttggatggtggcattgagctatcttctgccatggataggctcccaacagtgggagctgtaaggaatcaacagttccaggctatgtccttatggcacaataactcccatgggaagagtttttcccctcccctcagtagttccagcaaaagtcccaggacctatttgcattatcctgagccaggcactgtgactctggttggcgaggtctctcaggcaccgatcccagtttgtgtggactgaaagggacagaaagaagggcgaggctctgaaggaaagccagtgtttctgttcccagaagacagaatagatgctgggtgagcagaaacaacagatgtccatctcagaatcacagtactaattcccaccgtcacccccccccactgccacctgcctccagactgcctttgcttgcaataccagcctcttccctctgtctcagaagcaaagcttgcctatgctgggttctgctcctgcagtcaagtcctgcctgggatcactgcaaggatgtcctgtagtgcagggatccccaacccccgggccaccatggcctgtaaggaactgggctgcacagcgggaggtgagcggcgggcaagcaagcattactgcctcagctccgcctcctgtcagatcagcggcggcattagattctcataggagcgcaaactctattatgaactgcacatgagagggatctaggttgtgtgttccttatgagaacctaatgcctgatctgaggtggagcagtttcatcctgaaaccatcccccaacccgcatcccctatctgtggaaaaattgtcttccacaaaactggtccctggtgccacaaaggctgggaaccgctgctgtaggggtgtgcttctgcccctataatagggtcagtctttt

SEQ ID NO: 3086 - DNA, 2847 bp, Homo sapiens
ctgccctccgtctcccttccggcgacgtgctcaggcacacaggagcagtcacagccttgctcaggccggttgctgggccctctacccaggagcttgcagccatggcagtgactctgccttcacagacatcaggctccacctcagaccccagaaatgtcccagcaaatgtggagggcattttctcacagggcttaagccttgttttttgctctccgggcatcctgccccaccaccaggcctgagatcctgaagcatgagatgaaggtgttcttcgtgaagtacaacgaccctatctacgtgaagctggagaagctggacatcatgatccgcctggcctctcaggccaacatcgcccaggtcagctgcgtgtgatggtcaggacacgggctcagtgtgggaccattccaccaccaccagactgtaggctctggcccaggtgaccagtctcaccattaacggtttatctcatgaagagtgtttagcatgggacatggggcttcgtaagcaagtaaaagaactgatgtttttattactaaagaatgtttctccatgttatcacctgtcatcccttacaacgtggtgttggatatgttagctaaatcaaccccaaacaaggttgtccaggccttctttccttttcaggcacctgccagctctctcccttgggccttctacctggagcaggaggcagaatcccattctcctagggagtctgtgtatattcactgcccaggagtgttccagcagattgccccatcaggtgccccagccccatcttttctgtttgggccacaggtgttggcagagctgaaagagtacgcaacagaagtggatgtggactttgtacggaaggctgtgcgtgctattggccgctgcgccatcaaggtggaggtgaggctctgggactctgtccttggctggagaaggaaaagggggctgaaaccgggaaaccagtctgattcaagcagaatctgccagcttgcttgtggtctgggaaggcctgaggctcatcactggagcccccatggcaagcattgtgcagatctggtggggttccttctcactctatagtatcctttaggccttcgagttgctgccgatcaaattaacccatcataatcatggttctcctgcagcatttgttaagatgctggggcagccacaagttaatggacttagcattcacttcacagagctctggggtaagggccctgcctgttgaacacttcttggcaaatattgtcatcattcagctgcccacgtgcctctgtgtcccagcgtcccagggccactctagactcctgtgtcctggcattttatccccgtcctttctctgtctgtggagatgttcctcgaccactaagccagattctccttaaatgggtccactggtggctacagtgtcctaggataggtggtcgcccccgacctatccccttgaggcgtgctcaccctggagcctatgatgccgtcctgagaaatctccttcagagcaggccgtgagagcagtgtgtggaagtaaaggcagaagcagtcagaggttctgtgagtgtttttggacataggagccccctttctgaaacaagtaaaaagagaggtggggttggactgcagcgtagtcaccttgccctcaggtcctgacttagaggagctccaaggaccctcctggctctcaggaactcttcctctggcttctcctcagtctcattccccatgtccccaccatcctagggccatgatttggtactggttctctcctgttacctggggagagggttctcctgttttcccactgtgatgaggaaggtgtgccagaagtgatttgcagcccttggccgaggcgtggacatcagaggctctactggaaatggggtgcggggacctcgcccacactcttctcttcccatgcagcaatctgcggagcgctgtgtgagcacgctgctcgacctcatccagaccaaggtcaactatgtggtccaggaggccatcgtggtcatcaaggacatcttccgcaagtaccccaacaagtgcgtgcccgccctcctagggagagggcatctagctctgcctggggacagggatggcggggcagaaaaggaaggaggaatctcctcttccttacttcttggccacaagcgtcattctcaaaagaaaccctttgttttttatttcgtccacactgcccctcctctactccccaggccaaaataagggctaacgtgtgacagatgaaactcagatccccaggccaggtgtggtggctcttgcctgtaatcccagcactttgggaggccgaggcgggtggattgcctgagatcaggagttcaagactagtctagccaacatagtgaaaccatgtttctactaaaaatacaaaaaaattagctggatgtggtggcatgtccctgtaatcccagctacttgggaggctgaggcaggggcattgcttgaaccagggaggtggaggttgcagtgaggtgagatcacaccactgcacaccagcctgggcaacagagtgaaactccatctcaaaaaaaaaaacaaaactcagatcccctttacctgccaccttggggtcttaggaggcaggtccccttccctcctggcccctgtctggcttccctgggtttcccgttctccttgagggctcccataccaactgtgccctggtctcccaggtatgagagtgtgattgccacactgtgtgagaatctggactccctggatgagcctgaggcccgggctgccatgatctggattgtgggcgagtacgcggaacggatcgacaacgcagatgagctgctggagagcttcctcgagggcttccatgacgagagcacacaggtg

SEQ ID NO: 3087 - DNA, 2847 bp, Homo sapiens; identical to SEQ ID NO: 3086

SEQ ID NO: 3088 - DNA, 276 bp, Homo sapiens
aaaatataaactgtaggccacattgccagaacacagaccaaaatgagcaaaaacagttgctaggaaacaggcccaaatgcagaactttagcttataggaggaagtcagaaagagctggaaatgagaacattgaggaatataacagaggaggaacaaccagatggtgtgatttttagaattcaaacagtgaccacttaggatcagtgtttgaaatttggtgttccttgagctagctggacttggactctttgacagtatgtgaacaaactgcctaat

SEQ ID NO: 3089 - DNA, 276 bp, Homo sapiens
aaaatataaactgtaggccacattgccagaacacagaccaaaatgagcaaaaacagttgctaggaaacaggcccaaatgcagaactttagcttataggaggaagtcagaaagagctggaaatgagaacattgaggaatataacagaggaggaacaaccagagggtgtgatttttagaatgcaaacagtgaccacttaggatcagtgtctgaaatttggtgttccttgagctagctggacttggactctttgacagtatgtgaacaaactgcctaat

SEQ ID NO: 3090 - DNA, 276 bp, Homo sapiens; identical to SEQ ID NO: 3089

SEQ ID NO: 3091 - DNA, 248 bp, Homo sapiens
tcttgtataaaatatagaagatatcaaaacattttaaatttaaattttttaattgaattatctgaagcagtacatagcaaactgtaatgtgcttacaaatcacttgggtatctttttgaaatgcagatcctgactcattgggtctggagctgatactgagattctgtatttctactgaggtctcagctgatgccagtgctgattcagggagagtaaacagtaatgcatttccaactatattaaggaag

SEQ ID NO: 3092 - DNA, 463 bp, Homo sapiens
attttttacctaaaattaaaattaatagagtaaatgaaattaccctaaagggtaaaaatgtattattactatggacagataaggtttctaaagtaattagtttcctaaatccaagatgcttttcctatcaaatatgaccatggtagcccaagttttgaatattaggaaatagctttatggcaaaaaaagttccattatagatctgtggctaaaaactggtgatgattacctccaaataaaaacaatctctggcattaacaaaatactaagcattattttctgtacagtgatgagggatagttgtcctagtttcccttgtattaagaaaggtcaggccaggcacggtggctcatgcctgtaatcccagcactttgggaggctgaggcaggcggatcacgaggtcaggagatcgagaccatcctggctaacatggtgaaacgccatctctactaaaaatacaaaa

SEQ ID NO: 3093 - DNA, 476 bp, Homo sapiens
attttttacctaaaattaaaattaatagagtaaatgaaattaccctaaagggtaaaaatgtattattactatggacagataaggtttctaaagtaattagtttcctaaatccaagatgcttttcctatcaaatatgaccatggtagcccaagttttgaatattaggaaatagctttatggcaaaaaaagttccattatagatctgtggctaaaaactggtgatgattacctccaaataaaaagaatctctggcattaacaaaatactaagcattattttctgtacagtgatgagggatagttgtcctagtttcccttgtattaagaaaggtcaggccaggcacggtggctcatgcctgtaatcccagcactttgggaggctgaggcaggcggatcacgaggtcaggagatcgagaccatcctggctaacatggtgaaacgccatctctactaaaaatacaaaaaaaaaaaaaaaaa

SEQ ID NO: 3094 - DNA, 248 bp, Homo sapiens; identical to SEQ ID NO: 3091

SEQ ID NO: 3095 - DNA, 248 bp, Homo sapiens
tcttctataaaatatagaagatatcaaaacattttaaatttaaattttttaattgaattatctgaagcagtacatagcaaactgtaatgtgcttacaaatcacttgggtatctttttgaaatgcagatcctgactcattgggtctggagctgatactgagattctgtatttctactgaggtctcagctgatgccagtgctgattcagggagagtaaacagtaatgcatttccaactatattaaggaag

SEQ ID NO: 3096 - DNA, 6277 bp, Homo sapiens
ttccatcagtgagtatcaccagccttttgcgacagctaatgaacctacctcaaagtgcagctacaccagcactctccaatcctcacctcactgctgtgctccagaacaaggtgatcttgcccttttaactccttgaactttgtgaaatgtcttaatttgcgttatagattaaaataatggctgctgtatctctagcaacttgggaaaaaggcttctttcagtcaagagttacattaagctcctagtaaccggctagaaataacagtgttttcaacaaaatgggattttatgtgtctagtgtgaaataaatttgatttagtagctcgacagagtcatcagggatccaggctttttcactttttttcctctgccattcttaccagtggcttccatgttcattattcctcatggtccaagatggctgtggaattcatgattcagctttacatcaagaaggacaggtggatgtggagggcaaaaagatgtggaccagctgtccatcttccttattgagaccttttccaggagttctaaccagaaacttctacttactgttaatagccaggacattgtcacatggccacacctaagtgcagggaaggctggaaaatatcttttagtttatgccattgtcatgacacataagagttctgataatgggtaggaaggcatattaggcaattagcagtctctgtcataacactatgaatagtagaatcatccatttcatattttatttgcatcaagtttaaagattcagagattcctaggggaaacataatatgaaataaagaatatgaatttttagtccttccctgctactgtctagctttgtgaccttggacagatgatatcacattgctgaatcagtttcctggtctataagatggaggtgatgatgtagacttcatagagttgtcctggtacttaaatgagataacagttgtaagtggttcgatataatgcctggtacatagtagttactcattaagggccattctatgtacagtagagatgaaaaagtggtctcaaggcctcttgctcctttgcaccagaaaacctaccaaagcatgactctaaaggtcagtgtatcagaggaagaagaggtgacagtgcctctggggttctggagtgatccggaatgtgcctttctgttatttggtctcttagttttaattttagtaaaggcagtagtattttttttctgagaataacatgaaaagggattttttttttttaaatcagggtcttctctgtcacccaggccagagtgcaggggcaagatctcggctcactgcaacctctgcctcctgggctcaagccatcctcccacctcagcctcccaagtagatgggactacaggcacatgccaccacgcacaactaatttgtgtattttttgtagaggtggggtttcgccatgttgtccaggctggtctcaaactcctgagctcaagctatcagcctgcctcgacctcccaaagtgttgggattacaggtgtgagctactgcaaccggccatgaagggaaattttgtggaaaagtgagtgagtctagaaagttggaatggaatcccaaagtactgccagccttccttttatgatccatttataggtatgagtcatacatttaacctaaaccttcttgtccctatttgtattttcttttttgagacaggatctcactctgtcacccaggcttcagtgcagtggcacagtcacagctcattgcagcctcaactttctgtactcaaagcgatcctcccacctcagcctcttgagtagcatgtgccaccatgcctgattgacttttttttttttgagacagagccttgctctgtcactcatgctgcagtgcaatggcgatatcttgtctcactgcaacccctgcctcccaggttcaagcagttctcctgcgtcagcccccaagtagctgggattacaggtgcccgccaccataccaggctaatgtttgtgtttttagcagagacagggttttgccatgttggccaggctggtccggggctcctgacctcacgtgatccacctgcctcagcctcccaaagtgctgggattacaggtgtgagccaccacacccagcctccgattgatttttatattttttgcagaaacagggtctcactatgttgctctggctggtctcgaactcctggactcaagcagtactgcctccacctcccaaagtgctggaattacaggcatgagccaccatgcccatccccagccccctgttcatttttttttttcttttgagatagagtcttgctctgtcacccaggctggagtgcagtggcgcgatcgcagctcactgcaagctccgcctcctgggttcaagccattctcctgcctcagcctcccgagtagctgggactacaggcacccgccaccacgcctggctaattttttgtattttttagtagaggcagggtttcaccgtgttagccaggatgatctcgatctcctgacctcttgatccacccgccttggcctcccaaagtgctgggattacatgcatgagccaccacgcccgtcccatattttaatcctatgccccaaagactacatttcctgattttactgtccactaaataaaacacatttttatatgttacttttttttttttttttggagatggagtttcactcgtgttgcccaggctggagcgcaatggtgcgatcttggctcactgcaacctccagctcccgggttccaacaattctcctgcctcagcctcccaagtagctgggattacaggcatgtgccaccgtgcctggctaattttctatttttagtagagacggagtttcaccattttgatcaggctggtctcaaactcctgacctcaggtcatccacccaccttggcctcccatagtgctgggattacaggcatgagccaccacacctgaccatttttatatattgcatactctaaagcatgttgctgaattttaattatagatacggtgtatacatctgtttaccctttctctctttttattttttagatttttattaacattctgtctaagactttgtatttccagatagagatgtgctttttaatggaaagtttctctttataccatgtttatttcagttgtgtttatttgtatattttcctacagtttacaccttgtttcttaattcaaaatatcttactgtaatgcttttttcttattttttcctgatttttaatttctgtaccaaaattggtcttcatttactttcttttttagcctatttctgttctcataaataggagaaaagtcaaattctacattatccatggcaaggaaaaaccatcttttaacctcagcatggggaacagagaggcgtgttggacaccatgactttccgtttctgttggctgcgcctggtcactgctatggcagaataaagcctggagagagacatagcctttcaactcatgcttgtctgatctttacctggttttacagaaaagcacagtagtgaggttattttgatttagagctgttccccatctgatgccaggatcccttcaacagtggtggaggaggtttagacacagtgttgagtttgattccctctgtcttttctcgtagtttggcctgtcactgctcctcatcctcctgagccgtggtgaagacctacagagttcagaccctgctacagaatcaacacaaaataatcagtggtcagtgtggactgtttcttctcttattttaagttctttgaggtaatcttttaaatttttttctcctgatattattatgggtcttccctgtcaggacggaggtgatgttcatggcaacacgagaacttctgcggattccccaagcagccctggccaagccaatctctatacctacaaacctagtgtccctcttttctcgctatgttgaccggcagaaactgaacttgctggagacaaaactgcagtaagtttgaaacaggagagtttcacatctcactaaagttgggactttagaagttatggttgggaggctgggtacggtggctcacacctgtaatcccagcattttaggacacccaggagggtggatcacttgaggccaggagttccagaccagcctgaccaaaatggtgaaaccctgtctctactaaaaaaatacgaaaattagccaagtgcggtggtgcatgcctgtaatcccagctattcggtaggctgaggtatgaaaatcatttaaacccgggagacagagattgcagtgagctgagatcacgccactgcactccagcctgggtgacagagcaagaccctgtctcaaaaaaaataaataaaaagaagttatgattggggtggaggggggaataaaactgaatttggtggaagagattgactttttattaactatttgtgtatctgttagatataaaacactgaactgggtacaacagggccttcataaaagatgaccaaatgctaagggtagagaaataatctcgggtattttgttatgagaagtcttacaaagatgtaactgtaatatgaaagattgccttctgttttaactcatttatacaattttcctttctctcctttgtactcctaggctagttcaggggatacgataaaagatctccaaatgtgtcctgtacctccttttggctgccacctgcactgctgccatcaccaatggagtgtttttaatgagggaaggaaggtagctttttccccaaagcaaagtcttgtgggatcgattcctgtttacaggggttgtctctctaaatgtcagatatttccccactgctctatgaaatttggctgggtgatacttctgctggtttctttaccttctgtgttacagttctgcatgtcctacttttactcagttctgttttgcattttctttgccctagagacacaagtgtaatctctccctttatccctccactactccacctcagagtagattgtagcctgccaaaggattccttccctcatcctattgaagttgttttttcattgccccatattaatatgactatagaagagccaattaagtagaaatcaagatatacacacacacatagatacacacacacacaccccatacatgtatttatgtggtcttcagagggtccttaaagaatgaattttagattgaaaaatatttagttgtctcattacctcttctaaacacaaaccagctgatgtattttaatctgtttctgttctatcttgtaattaatttggtgggttctacttgttttaacataaataaagagtatgcagcacgtttaataaaatcagaactcttaattggcttatgcccaggtctaggctgagaagtcctttttcttcttcccacctttatttccttagtttctgtccaccttaatcgaaacaacacatggttatgtctttttcctgctacaactacagggtacttgagcctttcccctcaagtgcattcgaagtcacccaggatgatcctcactagtagcctgctttggcagtgtggctttttgcacacttgccctgtcttcctgagactacttcagtaagccatgcttccttcttccccacttttatttggtgtcatgaatagaaacttccaaatgtaaccatggaagctaagtttggcctgctttgctttttagtctccacaccatgggcagaactgctgtctttactacttcatctcacccaagtcccgttcccaggcagccaggggcctgggtttgaataattgcagggccagcctgccatgatctttctcacttactcctctcccattcagcaatcaaccagactaaggagttttgatccctagtgattacagccctgaagaaaattaaatctgaattaattttacatggccttcgtgatctttctgctgttcttactttttcgaatgtagttggggggtgggagggacaggttatggtatttaaagagaataaacattttgcacatacatgtattgtacaacagtaagatcctctgttaaaaccagctgtcctgttctccatctccatttcttcccatgctgtaaccccaggctccaccagctgttccccagtgatgttacctagcttccctctaccgttgtctactgaccatttccactacatgcctttcctaccttcccttcacaaccaatcaagtgaatacttgattattatctcttccttactgtgctttatcttttttgtttggattggttctaattaatgaaaataaaagtttctaaatttacatttttatagggtattgtaaataaaaacaaattgtatacttaaaaatga

SEQ ID NO: 3097 - DNA, 217 bp, Homo sapiens
aataactccacagcccataccttgggaacaactgagctaactcattcagttttgtccattacatcgaagggtgttttttgtaaactcatatgtctagaatgtgtttgccatgttttaatcacaagtagatattttctcagagtccagtgcagtgaagtatggtaagatcctgattgtgttctggaacacagaggaaagaccaccttctgttatagca

SEQ ID NO: 3098 - DNA, 217 bp, Homo sapiens
aataactccacagcccataccttgggaacaactgagctaactcattcagttttgtccattacatcgaagggtgttttttgtaaactcatatgtctagaatgtgtttgccatgttttaatcacaagtagatattttctcagggtccagtgcagtgaagtatggtaagatcctgattgtgttctggaacacagaggaaagaccaccttctgttatagca

SEQ ID NO: 3099 - DNA, 219 bp, Homo sapiens
  SITE (64): n equals a,t,g, or c
  SITE (79): n equals a,t,g, or c
aataactccacagcccataccttgggaacaactgagctaactcattcagttttgtccattacantcgaagggtgttttnttgtaaactcatatgtctagaatgtgtttgccatgttttaatcacaagtagatattttctcagagtccagtgcagtgaagtatggtaagatcctgattgtgttctggaacacagaggaaagaccaccttctgttatagca

SEQ ID NO: 3100 - DNA, 217 bp, Homo sapiens; identical to SEQ ID NO: 3098

SEQ ID NO: 3101 - DNA, 217 bp, Homo sapiens; identical to SEQ ID NO: 3097

SEQ ID NO: 3102 - DNA, 390 bp, Homo sapiens
gtgggacagtggtcaagacatatacaaccacaaacacccaaacattaacatcagcaagcatcattacatccttgggtggtattgccaagggacttcaaaggccaagattatagagtcatcacacttaggaggtcaaagggactttggaaagcacctttgtcactcattttgttttataagtgaggcggctgaggtgtaatacagctaagcgaattagcctttattacataactcattagaatgtagactgggactaagagctgtttctccagatcccattaggcaatctaaagattctgcactatttctttttcatttttggtatccaaataggtacagttgtttttgatctaggaaaatccttttagactaaacagtaagctttttaaa

SEQ ID NO: 3103 - DNA, 468 bp, Homo sapiens
agactgtaaactggaagataaggatgtttgtaaagttcttgtataaataaagcatggtttctcattgcagtggttactgatttcatagtctgagtgaagatgaatgatgctgtgaatcaacagctttaaagtccgtaccacttcagcttctttttggtttaggtttcttaaaatcagtgtgtatttaatgctttattcagatgagggggtgaaaaacctaacacatgtaaactaagtgaggtggggtttcagagataattcccagcctcacaattcctcatgaagttcttttcctgtgggaaacttttaatttggaagcatgcaacctaatgtgggaaccaagattaacattttctgaaatacttctacaagaaaagcagaaatggtctgtccaggaagctgaatttacatagtagaaaaatgagctgccctgcagtatttggtagtctttgtgtattagttgtgata

SEQ ID NO: 3104 - DNA, 468 bp, Homo sapiens
agactgtaaactggaagataaggatgtttgtaaagttcttgtataaataaagcatggtttctcattgcagtggttactgatttcatagtctgagtgaagatgaatgatgctgtgaatcaacagctttaaagtccgtatcacttcagcttctttttggtttaggtttcttaaaatcagtgtgtatttaatgctttattcagatgagggggtgaaaaacctaacacatgtaaactaagtgaggtggggtttcagagataattcccagcctcacaattcctcgtgaagttcttttcctgtgggaaacttttaatttggaagcatgcaacctaatgtgggaaccaagattaacattttctgaaatacttctacaagaaaagcagaaatggtctgtccaggaagctgaatttacatagtagaaaaatgagctgccctgcagtatttggtagtctttgtgtattagttgtgata

SEQ ID NO: 3105 - DNA, 468 bp, Homo sapiens
agactgtaaactggaagataaggatgtttgtaaagttcttgtataaataaagcatggtttctcattgcagtggttactgatttcatagtctgagtgaagatgaatgatgctgtgaatcaacagctttaaagtccgtaccacttcagcttctttttggtttaggtttcttaaaatcagtgtgtatttaatgctttattcagatgagggggtgaaaaacctaacacatgtaaactaagtgaggtggggtttcagagataattcccagcctcacaattcctcatgaagttattttcctgtgggaaacttttaatttggaagcatgcaacctaatgtgggaaccaagattaacattttctgaaatacttctacaagaaaagcagaaatgctctgtccaggaagctgaatttacatagtagaaaaatgagctgccctgcagtatttggtagtctttgtgtattagttgtgata

SEQ ID NO: 3106 - DNA, 390 bp, Homo sapiens
gtgggacagtggtcaagacatatacaaccacaaacacccaaacattaacatcagcaagcatcattacatccttgggtggtattgccaagggacttcaaaggccaagattatagagtcatcacacttaggaggtcaaagggactttggaaagcacctttgtcactcattttgttttataagtgaggaggctgaggtgtaatacagctaagcgaattagcctttattacataactcattagaatgtagactgggactaagagctgtttctccagatcccattaggcaatctaaagattctgcactatttctttttcatttttggtatccaaataggtacagttgtttttgatctaggaaaatccttttagactaaacagtaagctttttaaa

SEQ ID NO: 3107 - DNA, 468 bp, Homo sapiens
agactgtaaactggaagataaggatgtttgtaaagttcttgtataaataaagcatggtttctcattgcagtggttactgatttcatagtctgagtgaagatgaatgatgctgtgaatcaacagctttaaagtccgtaccacttcagcttctttttggtttaggtttcttaaaatcagtgtgtatttaatgctttattcagatgagggggtgaaaaacctaacacatgtaaactaagtgaggtggggtttcagagataattcccagcctcacaattcctcatgaagttcttttcctgtgggaaacttttaatttggaagcatgcaacctaatgtgggaaccaagattaacattttctgaaatacttctacaagaaaagcagaaatggtctgtccaggaagctgaatttacatagtagaaaaatgagctgccctgcagtatttggtagtctttgtgtattggttgtgata

SEQ ID NO: 3108 - DNA, 390 bp, Homo sapiens
gtgggacagtggtcaagacatatacaaccacaaacacccaaacattaacatcaacaagcatcattacatccttgggtggtattgccaagggacttcaaaggccaagattatagagtcatcacacttaggaggtcaaagggactttggaaagcacctttgtcactcattttgttttataagtgaggaggctgaggtgtaatacagctaagcgaattagcctttattacataactcattaggatgtagactgggactaagagctgtttctccagatcccattaggcaatctaaagattctgcactatttctttttcatttttggtatccaaataggtacagttgtttttgatctaggaaaatccttttagactaaacagtaagctttttaaa

SEQ ID NO: 3109 - DNA, 145 bp, Homo sapiens
ctgtagtcccagctgctcgggaggctgaggcaggagaatggcgtgaacccaggaggcggagcttgcagtgagccgagattgcgccactgcactccagcctgggcgacagagcgagactccatctcaaaaaaaaaaaaaaaaaaaa

SEQ ID NO: 3110 - DNA, 170 bp, Homo sapiens
tagctgggtgtggtgacgggcgcctgtagtcccagctacttgggaggctgaggcaggagaatggcgtgaacctgggaggcggagcttgcagtgagccgagattgcgccactgcactccagcctaggcgacagagtgagactccatctcaaaaaaaaaaaaaaaaaagaga

SEQ ID NO: 3111 - DNA, 301 bp, Homo sapiens
tggccgggcggcggtggctcacgcctgtaatcccagcactttgggaggccgaggcgggcggatcacgaggtcaggagatcgagaccatcccggctaaaacggtgaaaccccgtctctactaaaaatacaaaaaattagccgggcgtagtggcgggcgcctgtagtcccagctacttgggaggctgaggcaggagaatggcgtgaacccgggaggcggagcttgcagtgagccgagattgcgccactgcactccagcctgggcgacagagcgagactccatctcaaaaaaaaaaaaaaaaaa

SEQ ID NO: 3112 - DNA, 5749 bp, Homo sapiens
  SITE (1222): n equals a,t,g, or c
atggaaaatcacaaccacagcaagggtatgtggagagggggcctcaccttcctgaggttgtcagagcttttcatcttttcatgcatcttgaaggaaacagctggaagtctgaggtcttgtgggagcagggaagagggaaggaatttgcttcctgagatcatttggtccttggggatggtggaaatagggacctattcctttggttgcagttaacaaggctggggatttttccagagtcccacaccctgcaggtcatcctgggctgtgaaatgcaagaagacaacagtaccgagggctactggaagtacgggtatgatgggcaggaccaccttgaattctgccctgacacactggattggagagcagcagaacccagggcctggcccaccaagctggagtgggaaaggcacaagattcgggccaggcagaacagggcctacctggagagggactgccctgcacagctgcagcagttgctggagctggggagaggtgttttggaccaacaaggtatggtggaaacacacttctgcccctatactctagtggcagagtggaggaggttgcagggcacggaatccctggttggagtttcagaggtggctgaggctgtgtgcctctccaaattctgggaagggactttctcaatcctagagtctctaccttataattgagatgtatgagacagccacaagtcatgggtttaatttcttttctccatgcatatggctcaaagggaagtgtctatggcccttgctttttatttaaccaataatcttttgtatatttatacctgttaaaaattcagaaatgtcaaggccgggcacggtggctcacccttgtaatcccagcactttgggaggccgaggcgggtggtcacaaggtcaggagtttgagaccagcctgaccaacatggtgaaacccgtctctaaaaaaatacaaaaattagctggtcacagtcatgcgcacctgtagtcccagctaattggaaggctgaggcaggagcatcgcttgaacctgggaagcggaagttgcactgagccaagatcgcgccactgcactccagcctaggcagcagagtgagactccatcttaaaaaaaaaaaaaaaaaaaaaaagagaattcagagatctcagctatcatatgaataccaggacaaaatatcaagtgaggccacttatcagagtagaagaatcctttagttaaaagtttctttcatagnacatagcaataatcactgaagctacctatcttacaagtccgcttcttataacaatgcctcctaggttgacccaggtgaaactgaccctttgtattcaatcattttcaatgcacataaagggcagttttatctatcagaacaaagaacatgggtaacagatatgtatatttacatgtgaggagaacaagctgatctgactgctctccaagtgacactgtgttagagtccaatcttaggacacaaaatggtgtctctcctgtagcttgtttttttctgaaaagggtatttccttcctccaacctatagaaggaagtgaaagttccagtcttcctgggaagggtaaacagatcccctctcctcatccttcctctttcctgtcaagtgcctcctttggtgaaggtgacacatcatgtgacctcttcagtgaccactctacggtgtcgggccttgaactactacccccagaacatcaccatgaagtggctgaaggataagcagccaatggatgccaaggagttcgaacctaaagacgtattgcccaatggggatgggacctaccagggctggataaccttggctgtaccccctggggaagagcagagatatacgtgccaggtggagcacccaggcctggatcagcccctcattgtgatctggggtatgtgactgatgagagccaggagctgagaaaatctattgggggttgagaggagtgcctgaggaggtaattatggcagtgagatgaggatctgctctttgttagggggtgggctgagggtggcaatcaaaggctttaacttgctttttctgttttagagccctcaccgtctggcaccctagtcattggagtcatcagtggaattgctgtttttgtcgtcatcttgttcattggaattttgttcataatattaaggaagaggcagggttcaagtgagtaggaacaagggggaagtctcttagtacctctgccccagggcacagtgggaagaggggcagaggggatctggcatccatgggaagcatttttctcatttatattctttggggacaccagcagctccctgggagacagaaaataatggttctccccagaatgaaagtctctaattcaacaaacatcttcagagcacctactattttgcaagagctgtttaaggtagtacaggggctttgaggttgagaagtcactgtggctattctcagaacccaaatctggtagggaatgaaattgatagcaagtaaatgtagttaaagaagaccccatgaggtcctaaagcaggcaggaagcaaatgcttagggtgtcaaaggaaagaatgatcacattcagctggggatcaagatagccttctggatcttgaaggagaagctggattccattaggtgaggttgaagatgatgggaggtctacacagacggagcaaccatgccaagtaggagagtataaggcatactgggagattagaaataattactgtaccttaaccctgagtttgcgtagctatcactcaccaattatgcatttctaccccctgaacatctgtggtgtagggaaaagagaatcagaaagaagccagctcatacagagtccaagggtcttttgggatattgggttatgatcactggggtgtcattgaaggatcctaagaaaggaggaccacgatctcccttatatggtgaatgtgttgttaagaagttagatgagaggtgaggagaccagttagaaagccaataagcatttccagatgagagataatggttcttgaaatccaatagtgcccaggtctaaattgagatgggtgaatgaggaaaataaggaagagagaagaggcaagatggtgcctaggtttgtgatgcctctttcctgggtctcttgtctccacaggaggagccatggggcactacgtcttagctgaacgtgagtgacacgcagcctgcagactcactgtgggaaggagacaaaactagagactcaaagagggagtgcatttatgagctcttcatgtttcaggagagagttgaacctaaacatagaaattgcctgacgaactccttgattttagccttctctgttcatttcctcaaaaagatttccccatttaggtttctgagttcctgcatgccggtgatccctagctgtgacctctcccctggaactgtctctcatgaacctcaagctgcatctagaggcttccttcatttcctccgtcacctcagagacatacacctatgtcatttcatttcctatttttggaagaggactccttaaatttgggggacttacatgattcattttaacatctgagaaaagctttgaaccctgggacgtggctagtcataaccttaccagatttttacacatgtatctatgcattttctggacccgttcaacttttcctttgaatcctctctctgtgttacccagtaactcatctgtcaccaagccttggggattcttccatctgattgtgatgtgagttgcacagctatgaaggctgtacactgcacgaatggaagaggcacctgtcccagaaaaagcatcatggctatctgtgggtagtatgatgggtgtttttagcaggtaggaggcaaatatcttgaaaggggttgtgaagaggtgttttttctaattggcatgaaggtgtcatacagatttgcaaagtttaatggtgccttcatttgggatgctactctagtattccagacctgaagaatcacaataattttctacctggtctctccttgttctgataatgaaaattatgataaggatgataaaagcacttacttcgtgtccgactcttctgagcacctacttacatgcattactgcatgcacttcttacaataattctatgagataggtactattatccccatttcttttttaaatgaagaaagtgaagtaggccgggcacggtggctcacgcctgtaatcccagcactttgggaggccaaagcgggtggatcacgaggtcaggagatcgagaccatcctggctaacatggtgaaaccccatctctaataaaaatacaaaaaattagctgggcgtggtggcagacgcctgtagtcccagctactcggaaggctgaggcaggagaatggcatgaacccaggaggcagagcttgcagtgagccgagtttgcgccactgcactccagcctaggtgacagagtgagactccatctcaaaaaaataaaaataaaaataaaaaaatgaaaaaaaaaagaaagtgaagtatagagtatctcatagtttgtcagtgatagaaacaggtttcaaactcagtcaatctgaccgtttgatacatctcagacaccactacattcagtagtttagatgcctagaataaatagagaaggaaggagatggctcttctcttgtctcattgtgtttcttctgaatgagcttgaatcacatgaaggggaacagcagaaaacaaccaactgatcctcagctgtcatgtttcctttaaaagtccctgaaggaaggtcctggaatgtgactcccttgctcctctgttgctctctttggcattcatttctttggaccctacgcaaggactgtaattggtggggacagctagtggccctgctgggcttcacacacggtgtcctccctaggccagtgcctctggagtcagaactctggtggtatttccctcaatgaagtggagtaagctctctcattttgagatggtataatggaagccaccaagtggcttagaggatgcccaggtccttccatggagccactggggttccggtgcacattaaaaaaaaaatctaaccaggacattcaggaattgctagattctgggaaatcagttcaccatgttcaaaagagtcttttttttttttttgagactctattgcccaggctggagtgcaatggcatgatctcggctcactgtaacctctgcctcccaggttcaagcgattctcctgtctcagcctcccaagtagctgggattacaggcgtgcaccaccatgcccggctaatttttgtatttttagtagagacagggtttcaccatgttggccaggctggtctcgaactctcctgacctcgtgatccgcctgcctcggcctcccaaagtgctgagattacaggtgtgagccaccctgcccagccgtcaaaagagtcttaatatatatatccagatggcatgtgtttactttatgttactacatgcacttggctgcataaatgtggtacaagcattctgtcttgaagggcaggtgcttcaggataccatatacagctcagaagtttcttctttaggcattaaattttagcaaagatatctcatctcttcttttaaaccattttctttttttgtggttagaaaagttatgtagaaaaaagtaaatgtgatttacgctcattgtagaaaagctataaaatgaatacaattaaagctgttatttaattagccagtgaaaaactattaacaacttgtctattacctgttagtattattgttgcattaaaaatgcatatactttaataaatgtacattgtattgta

SEQ ID NO: 3113 - DNA, 1712 bp, Homo sapiens
tacatgcattactgcatgcacttcttacaataattctatgagataggtactattatccccatttcttttttaaatgaagaaagtgaagtaggccgggcacggtggctcacgcctgtaatcccagcactttgggaggccaaagcgggtggatcacgaggtcaggagatcgagaccatcctggctaacatggtgaaaccccatctctaataaaaatacaaaaaattagctgggcgtggtggcagacgcctgtagtcccagctactcggaaggctgaggcaggagaatggcatgaacccaggaggcagagcttgcagtgagccgagtttgcgccactgcactccagcctaggtgacagagtgagactccatctcaaaaaaataaaaataaaaataaaaaaatgaaaaaaaaaagaaagtgaagtatagagtatctcatagtttgtcagtgatagaaacaggtttcaaactcagtcaatctgaccgtttgatacatctcagacaccactacattcagtagtttagatgcctagaataaatagagaaggaaggagatggctcttctcttgtctcattgtgtttcttctgagtgagcttgaatcacatgaaggggaacagcagaaaacaaccaactgatcctcagctgtcatgtttcctttaaaagtccctgaaggaaggtcctggaatgtgactcccttgctcctctgttgctctctttggcattcatttctttggaccctacgcaaggactgtaattggtggggacagctagtggccctgctgggcttcacacacggtgtcctccctaggccagtgcctctggagtcagaactctggtggtatttccctcaatgaagtggagtaagctctctcattttgagatggtataatggaagccaccaagtggcttagaggatgcccaggtccttccatggagccactggggttccggtgcacattaaaaaaaaaatctaaccaggacattcaggaattgctagattctgggaaatcagttcaccatgttcaaaagagtcttttttttttttttgagactctattgcccaggctggagtgcaatggcatgatctcggctcactgtaacctctgcctcccaggttcaagcgattctcctgtctcagcctcccaagtagctgggattacaggcgtgcaccaccatgcccggctaatttttgtatttttagtagagacagggtttcaccatgttggccaggctggtctcgaactctcctgacctcgtgatccgcctgcctcggcctcccaaagtgctgagattacaggtgtgagccaccctgcccagccgtcaaaagagtcttaatatatatatccagatggcatgtgtttactttatgttactacatgcacttggctgcataaatgtggtacaagcattctgtcttgaagggcaggtgcttcaggataccatatacagctcagaagtttcttctttaggcattaaattttagcaaagatatctcatctcttcttttaaaccattttctttttttgtggttagaaaagttatgtagaaaaaagtaaatgtgatttacgctcattgtagaaaagctataaaatgaatacaattaaagctgttatttaattagccagtgaaaaactattaacaacttgtctattacctgttagtattattgttgcattaaaaatgcatatactttaataaatgtatattgtattgta

SEQ ID NO: 3114 - DNA, 100 bp, Homo sapiens
cttgaacccaggaggtgcaggttgcagtgagctgagattgtgccactgcactccagcctgggtgatagagtgagactctgtctcaaaaaaaaaaaaaaaa

SEQ ID NO: 3115 - DNA, 306 bp, Homo sapiens
ttttcctttgaatcctctctctgtgttacccagtaactcatctgtcaccaagccttggggattcttccatctgattgtgatgtgagttgcacagctatgaaggctgtacactgcacgaatggaagaggcacctgtcccagaaaaagcatcatggctatctgtgggtagtatgatgggtgtttttagcaggtaggaggcaaatatcttgaaaggggttgtgaagaggtgttttttctaattggcatgaaggtgtcatacagatttgcaaagtttaatggtgccttcatttgggatgctactctagta

SEQ ID NO: 3116 - DNA, 384 bp, Homo sapiens
ccataggtaaatgtaccacggtggtccggtgaccagagatgcagcgctgagggttttcctgaaggtaaaggaataaagaatgggtggaggggcgtgcactggaaatcacttgtagagaaaagcccctgaaaatttgagaaaacaaacaagaaactacttaccagctatttgaattgctggaatcacaggccattgctgagctgcctgaactgggaacacaacagaaggaaaacaaaccactctgataatcattgagtcaagtacagcaggtgattgaggactgctgagaggtacaggccaaaattcttatgttgtattataataatgtcatcttataatactgtcagtattttataaaacattcttcacaaactcacacacatt

SEQ ID NO: 3117 - DNA, 1110 bp, Homo sapiens
ccataggtaaatgtaccacggtggtccggtgaccagagatgcagcgctgagggttttcctgaaggtaaaggaataaagaatgggtggaggggcgtgcactggaaatcacttgtagagaaaagcccctgaaaatttgagaaaacaaacaagaaactacttaccagctatttgaattgctggaatcacaggccattgctgagctgcctgaactgggaacacaacagaaggaaaacaaaccactctgataatcattgagtcaagtacagcaggtgattgaggactgctgagaggtacaggccaaaattcttatgttgtattataataatgtcatcttataatactgtcagtattttataaaacattcttcacaaactcacacacatttaaaaacaaaacactgtctctaaaatccccaaatttttcataaactcagttttaaactaactttttttcaaaccacaatctgatttaacaatgactatcatttaaatatttctgactttcaaattaaagattttcacatgcaggctgatatttgtaattgtgattctctctgtaggctttgggtataatgtgttcttttccttttttgcatcagcgattaacttctacactctaacatgtagaatgttactacaatattaaagtattttgtatgacaattttatttgaaagcctaggatgcgttgacatcctgcatgcatttattacttgatatgcatgcattctggtatctcaagcattctatttctgagtaattgtttaaggtgtagaagagatagatatggtggatttggagttgatacttatatattttctatttcttggatggatgaatttgtacattaaaagttttccatggcagaaatcttttcaaaaactttttttttccgggatggattgaaggccctgatttcaccacaatgcaatatattaatgtagcaaaattgtacttgtaccccatgaatatatataatcttaagaaaatttttttagccaattattattacttactagatattaggctgtgttctgaatcttaatttaattcctccaaagaatcttatgaggtaggtaggagctattgctgctattctgttatgcttatgt

SEQ ID NO: 3118 - DNA, 514 bp, Homo sapiens
cttcagaggaaggcactaactaccacctacccctctattcctggctccttagtgcaagcattttctggatcagtgtttacacttctcatttatttcacagttaggccctctacacattccttttctgcccttgtccctctgggctttaaagctacaataattgctagtggcagccagctgcttatgaatatgcaagtcttgctctagtaaatggtggccttagatgctccaataaagagatggctcaaacctatcaaggctcctgcttcccctctcctctcagctaggcagcaccaatcttccctatctatggtgggagaactttctgcctgggtctcatggtcactagtagattagaggacagatactttcttgctggtggtaggtaaaacagttaaaaatgagtcctgggtaactgctccttgggacttccaggggtttgagttgagggttgcccgcatctcactgagtaacaggacacttagcagtattggcttgtgctgccagcatataa

SEQ ID NO: 3119 - DNA, 513 bp, Homo sapiens
cttcagaggaaggcactaactaccacctacccctctattcctggctccttagtgcaagcattttctggatcagtgtttacacttctcatttatttcacagttaggccctctacacattccttttctgcccttgtccctctgggctttaaagctacaataattgctagtggcagcagctgcttatgaatatgcaagtcttgctctagtaaatggtggccttagatgctccaataaagagatggctcaaacctatcaaggctcctgcttcccctctcctctcagctaggcagcaccaatcttccctatctatggtgggagaactttctgcctgggtctcatggtcactagtagattagaggacagatactttcttgctggtggtaggtaaaacagttaaaaatgagtcctgggtaactgctccttgggacttccaggggtttgagttgagggttgcccgcatctcactgagtaacaggacacttagcagtattggcttgtgctgccagcatataa

SEQ ID NO: 3120 - DNA, 513 bp, Homo sapiens
cttcagaggaaggcactaactaccacctacccctctattcctggctccttagtgcaagcattttctggatcagtgtttacacttctcatttatttcacagttaggccctctacacattccttttctgcccttgtccctctgggctttaaagctacaataattgctagtggcagcagctgcttatgaatatgcaagtcttgctctagtaaatggtggccttagttgctccaataaagagatggctcaaacctatcaaggctcctgcttcccctctcctctcagctaggcagcaccaatcttccctatctatggtgggagaactttctgcctgggtctcatggtcactagtagattagaggacagatactttcttgctggtggtaggtaaaacagttaaaaatgagtcctgggtaactgctccttgggacttccaggggtttgagttgagggttgccctcatctcactgagtaacaggacacttagcagtattggcttgtgctgccagcatataa

SEQ ID NO: 3121 - DNA, 324 bp, Homo sapiens
ttctttttcttttttttaaattagagatgggggtcttactatgttgcccaggctgttcttgaacacctgggctcaagtgatccacacaccttggactcatttcacactaaaagattctgtaatagctcctgagattttactcctctgatgttggaaatttccatagtgtgaagttttgttatgcataaaatcacctggggtgcttgttaaacatgcagattcctggatggccagaaaacttgtcattggtcaagagcaacattaagatctgcctgttactcatactgatgcttcctgcccagcaagttcatcagagggcgagga

SEQ ID NO: 3122 - DNA, 259 bp, Homo sapiens
tgagacggagtcttgctctgtcgccaggctggagtgcagtggcgtgatctcggctcactgcaacctccgactccctggttcaagcaattctcttgcttcagcctcccgagtgggattacaggcatgcgccaccacgcccagctaatttttgtatttttattagagacggggtttcaccatgttggccaggatggtctcgatctcctgaccttgtgatccgcccgcttcggcctcccaaagtgctgggattacaggcctg

SEQ ID NO: 3123 - DNA, 247 bp, Homo sapiens
tgagacggagtcttgctctgtcgccaggctggagtgcagtggcgtgatctcggctcactgcaacctccgactccctggttcaagcaattctcttgcttcagcctcccgagtgggattacaggcatgcgccaccacgcccagctaatttttgtatttttattagagacggggtttcaccatgttggccaggatggtctcgatctcctgaccttgtgatccgcccgcttcggcctcccaaagtgctggg

SEQ ID NO: 3124 - DNA, 324 bp, Homo sapiens; identical to SEQ ID NO: 3121

SEQ ID NO: 3125 - DNA, 326 bp, Homo sapiens
ttctttttcttttttttaaattagagatgggggtcttaaactatgttgcccaggctgttcttgaacacctgggctcaagtgatccacacaccttggactcatttcacactaaaagattctgtaatagctcctgagattttactcctctgatgttggaaatttccatagtgtgaagttttgttatgcataaaatcacctggggtgcttgttaaacatgcagattcctggatggccagaaaacttgtcattggtcaagagcaacattaagatctgcctgttactcatactgatgcttcctgcccagcaagttcatcagagggcgagga

SEQ ID NO: 3126 - DNA, 361 bp, Homo sapiens
ggcttttttcatttggtaatgtgtacttaaggtttctccacgtcttttcactgcttgatatttcgtttctttttatcactgaaaaagtttctgttgtctggttgtactacagttgatttatccatttacatactgaaggacatcttggttgcttctaagttttggcaattgtaaataaagctgttgtaaaataaatccatgtacaggtctttgtgtagatacaagtttcaactcctttggttaaataccaaggagcatgattgctggattgcgtgataagagtacgtttagttttgtatgaaactgccaaactatcttcaaaggtggctgtaccattttgcaatcctaccagcaatgaatg

SEQ ID NO: 3127 - DNA, 469 bp, Homo sapiens
cccatggagccgaggcaggataatcagttgaacctgggaggtggaggctgcagtgagctgagatcatgccactgcactccagcctgggtgacagagtgagactctcaaaaaaaaaaaagaagaagaagaaaaaattgttcaagcatacacaaaagtagaatagtatagtgtatgcatctatagcaattgtccatattaatcatctatccctctacttttttttctggaaagttttaaaggaaattccagacatactccatttcacccacttcagtatgcacctctaattgataaggatttttttcttttttaacataaccataatgccattataatacctaaaagatgtaacaatacttccttaatatggggtatttaaatgaagtagagagataccaatcggatttgacaaaatgttgatgatttgttaaatttacttccaatattattattattactggtagaagga

SEQ ID NO: 3128 - DNA, 301 bp, Homo sapiens
ccttggccagggtcaccataaactggaaataggcaagccagggtttgaatccagatggtcaaacttgaaggcagctgtactaagcatgttcccatctgcatatgcacatgcgttcaccagcagtcgctccacacacacgtgctcgctcaggcctcctttctgaggtgctgccactgcccggcagcagcccagacgcagcaggcgatggcccggtccatcagacagcctgtctttccagagatgagtcagctgggccaggacctaggacagagctagggatggtgggtgcacccccacccac

SEQ ID NO: 3129 - DNA, 134 bp, Homo sapiens
attataggcacgtgccaccacacctggctaatttttgtatttttagtagagacggggtttcaccatgttggccaggctggtctcgaactcctgatctcaggtgatccacccgcctcagcctcccaaagtgctgg

SEQ ID NO: 3130 - DNA, 3981 bp, Homo sapiens
actgaacctgtacagcctttttttccttgcttgtcattattccctagacagtgcaatataaaaactttacaaagcatttacattgtataatattgggtgttataaggaatctagagatgatttcttagattgtcttttgttttgtttgttttttgctataggatgaagaggaaacaaagaaagaggaatctcttaaatctcccttgaagccagagtcacagctagatcttcgggtacaggagttaataaagttgatctgtaatgttcaggccatggaagaaatgatgatggaaatgaagtataataccaagaaagccccacttggtaggacttcacattttcttctgcattctctccttataattcctagctcctttaatggatactttattatcattatgatttaaagctttctcatagtactgaatgaagaaaatgggatttggggtgacaggttgtatggagggaagaggaactattttgaaagttgaggctgggtgtgatgggtcatgcctataatcccaacactttgggaggccaaggcaggtggattgcttgagcccaggagtttgaaaccagcctgggcaacatggtgagaccccatctctactaaaaatagaaaaattagccaggcatggtggtgtgtgcctgtgatctagctacttgcgaagctgaagtgggaggatcactggagcccaggaggttgaactgcatttagctgtgtttgtgccacggcactcagcctgggcaacaggagtgagaccccatcttaaaaacaggaaaaaaaaaagttgaaagatgaaagtcttttttagggaaggatgttaagtacagttcactagatgggatcctagtttggagtctgatctctgggtgggcctgcagggaagctgacagtggcacaaatcaaggcaggttaccagtctcttaagaagattgaggattgtattcgggctggccagcatggacgagctctcatggaagcatgcaatgaattctacaccaggattccgcatgactttgggtaaggcctgtgctgttacttcactttgttcttctacctatacatatcccctgtatccatcagcagcagctataatcttttaaatcttttattcctaagaaaatggtcgtcttgaataggtacagaaacaaaatgatatataggtagcctatttaatcagcttacaaatatgggatgcaatctcctggcttgaccacagccatattctctgacaaagtggaagttaccaacccaagagagaatgggtctagctatccaaccacccaagtaaaacaccttcaggcatatcacccccttttcctatttgagtaactaaaaccacacaaacaccatttctgtgaactcaagtgatattagatagacaaaataacattttacatttgttgattctgttttctggtttacatccgatttctatttcttttattgctttatagagccccgtgacctagaaataaccctgagtggtcaacaggtctacctgtgcttctagatagaactgtatccaactgttccctgttgatatcaatataacttatttttaaatgattttataaaaaataattttaactctagtctcaaaagtcaaaatccacatagttcatcttataccgagtatatatttaatattattttatatatttggaagttaagatctctttacagatctctttctctctcaaatggaaaacctgtttctcatacctgttttctaaaggacctatctgtcattttctatttttagtcatgcgccttttagccacatgtcagaaagctcattatgggttatatctctgttcttagactccgtactcctccactaatccggacacagaaggaactgtcagaaaaaatacaattactagaggtgagatatgtatgatttgagaagtattatatcccttataccagtgtcctcccacattgattctatatctcatcttctcaggctttgggagacattgaaattgctattaagctggtgaaaacagagctacaaagcccagaacacccattggaccaacactatagaaacctacattgtgccttgcgcccccttgaccatgaaagttatgagttcaaagtaagaaaaatgatcatttattttcatattcttgcacccttaaccacctcccccatcccactgttctctaactacttcttgtcaagagcaaattgtcaattagggcagactttttatgtactagggatttgggaaggccaagcttttcctagctgccttgtaagactgtttgggagcagaaaggtctgccaagttatatcagaatccccaaattcttcagttcagctcagtctcttgtagagtctacatcagcctttttgtcttatttttcacaggtgatttcccagtacctacaatctacccatgctcccacacacagcgactataccatgaccttgctggatttgtttgaagtggagaaggatggtgagaaagaagccttcagagaggaccttcataacaggtctgagtctagctttgcgtttggaaagacactccttgcccgaaagtacagctgtagaacttataagagggagtcagaggaaggtgttggcttttttatgcttatggcctatctgtgcagaacaacagagtacaataatattggcttttccttaggatgcttctatggcatggttccaggatgagtaactgggtgggaatcttgagccatgggcttcgaattgccccacctgaagctcccatcacaggttacatggtgagtgaaactgaactctgggaggagcacaggggaaagggatacagtaatgttctcagtgctttttttcctagattaggattagatggttcccctccccaagagttaagccagctcactgataaccttgtcatctcttactgtgtccctctttctttaaattcctaaagatacctcacctttccctcagaaggcggaaattcacaggggcttctaccctctctagaacagaattgtgaggggaaatggagaagggtctatattgtgtttaagggaatggaaaaacagggtcagtggtatgcaccttctctctaacacagtgggttagaagctgaccttggtattcatgtatatatttcagtttgggaaaggaatctactttgctgacatgtcttccaagagtgccaattactgctttgcctctcgcctaaagaatacaggactgctgctcttatcagaggtgagacaggagtatgtctgtgatctctagtttattaattccagtttttttccgatgagaaaagtttgaccccagaaccaagaggtttacctgggatagcttgagagaggaccaagtacaatttctagtacattggattcctctgctggagtaggggaaaaaagtactgatgggattttctgtttggctttggagccatctaattcttagtaggatatgggaattcaaaggttttttgctttgcaggtagctctaggtcagtgtaatgaactactagaggccaatcctaaggccgaaggattgcttcaaggtaaacatagcaccaaggggctgggcaagatggctcccagttctgcccacttcgtcaccctgtaagtactcagaaccaggaggactagaagactccttttggccagataagactacgttctctattgcagcttctgaaccagagactgatgttgacacactttttttccatttggcaggaatgggagtacagtgccattaggaccagcaagtgacacaggaattctgaatccagatggttataccctcaactacaatgaatatattgtatataaccccaaccaggtccgtatgcggtaccttttaaaggttcagtttaatttccttcagctgtggtgaatgttgatattaaataaaccagagatctgatcttcaagcaagaaaataagcagtgttgtacttgtgaattttgtgatattttatgtaataaaaactgtacaggtcta

SEQ ID NO: 3131 - DNA, 3981 bp, Homo sapiens
actgaacctgtacagcctttttttccttgcttctcattattccctagacagtgcaatataaaaactttacaaagcatttacattgtataatattgggtgttataaggaatctagagatgatttcttagattgtcttgtgttttgtttgttttttgctataggatgaagaggaaacaaagaaagaggaatctcttaaatctcccttgaagccagagtcacagctagatcttcgggtacaggagttaataaagttgatctgtaatgttcaggccatggaagaaatgatgatggaaatgaagtataataccaagaaagccccacttggtaggacttcacattttcttctgcattctctccttataattcctagctcctttaatggatactttattatcattatgatttaaagcttgctcatagtactgaatgaagaaaatgggatttggggtgacaggttgtatggagggaagaggaactattttgaaagttgaggctgggtgtgatgggtcatgcctataatcccaacactttgggaggccaaggcaggtggattgcttgagcccaggagtttgaaaccagcctgggcaacatggtgagaccccatctctactaaaaatagaaaaattagccaggcatggtggtgtgtgcctgtgatctagctacttgcgaagctgaagtgggaggatcaccggagcccaggaggttgaactgcatttagctgtgtttgtgccacggcactcagcctgggcaacaggagtgagaccccatcttaaaaacaggaaaaaaaaaagttgaaagatgaaagtcttttttagggaaggatgttaagtacagttcactagatgggatcctagtttggagtctgatctctgggtgggcctgcagggaagctgacagtggcacaaatcaaggcaggttaccagtctcttaagaagattgaggattgtattcgggctggccagcatggacgagctctcatggaagcatgcaatgaattctacaccaggattccgcatgactttgggtaaggcctgtgctgttacttcactttgttcttctacctatacatatcccctgtatccatcagcagcagctataatcttttaaatcttttattcctaagaaaatgatcgtcttgaataggtacagaaacaaaatgatatataggtagcctatttaatcagcttacaaatatgggatgcaatctcccggcttgaccacagccatattctctgacaaagtggaagttaccaacccaagagagaatgggtctagctatccaaccacccaagtaaaacaccttcaggcatatcacccccttttcctatttgagtaactaaaaccacacaaacaccatttctgtgaactcaagtgatattagatagacaaaataacattttacatttgttgattctgttttctggtttacatccgatttctatttcttttatagctttatagagccccgtgacctagaaataaccctgagtggtcaacaggtctacctgtgcttctagatagaactgtatccaactgttccctgttgatatcaatataacttatttttaaatgattttataaaaaataattttaactctagtctcaaaagtcaaaatccacatagttcatcttataccgagtatatatttaatattatcttatatatttggaagttaagatctctttacagatctctttctctctcaaatggaaaacctgtttctcatacctgttttctaaaggacctatctgtcattttctatttttagtcatgcgccttttagccacatgtcagaaagctcattatgggttatatctctgttcttagactccgtactcctccactaatccggacacagaaggaactgtcagaaaaaatacaattactagaggtgagatatgtatgatttgagaagtattatatcccttataccagtgtcctcccacattgattctatatctcatcttctcaggctttgggagacattgaaattgctattaagctggtgaaaacagagctacaaagcccagaacacccattggaccaacactatagaaacctacattgtgccttgcgcccccttgaccatgaaagttatgagttcaaagtaagaaaaatgatcatttattttcatattcttgcacccttaaccacctcccccatcccactgttctctaactacttcttgtcaagagcaaattgtcaattagggcagactttttatgtactagggatttgggaaggccaagcttttcctagctgccttgtaagactgtttgggagcagaaaggtctgccaagttatatcagaatccccaaattcttcagttcagctcagtctcttgtagagtctacatcagcctttttgtcttatttttcacaggtgatttcccagtacctacaatctacccatgctcccacacacagcgactataccatgaccttgctggatttgtttgaagtggagaaggatggtgagaaagaagccttcagagaggaccttcataacaggtctgagtctagctttgcgtttggaaagacactccttgcccgaaagtacagctgtagaacttataagagggagtcagaggaaggtgttggcttttttatgcttatggcctatctgtgcagaacaacagagtacaataatattggcttttccttaggatgcttctatggcatggttccaggatgagtaactgggtgggaatcttgagccatgggcttcgaattgccccacctgaagctcccatcacaggttacatggtgagtgaaattgaactctgggaggagcacaggggaaagggatacagtaatgttctcagtgctttttttcctagattaggattagatggttcccctccccaagagttaagccagctcactgataaccttgtcatctcttactgtgtccctctttctttaaattcctaaagatacctcacctttccctcagaaggcggaaattcacaggggcttctaccctctctagaacagaattgtgaggggaaatggagaagggtctatattgtgtttaagggaatggaaaaacagggtcagtggtatgcaccttctctctaacacagtgggttagaagctgaccttggtattcatgtatatatttcagtttgggaaaggaatctactttgctgacatgtcttccaagagtgccaattactgctttgcctctcgcctaaagaatacaggactgctgctcttatcagaggtgagacaggagtatgtctgtgatctctagtttattaattccagtttttttccgatgagaaaagtttgaccccagaaccaagaggtttacctgggatagcttgagagaggaccaagtacaatttctagtacattggattcctctgctggagtaggggaaaaaagtactgatgggattttctgtttggctttggagccatctaattcttagtaggatatgggaattcaaaggttttttgctttgcaggtagctctaggtcagtgtaatgaactactagaggccaatcctaaggccgaaggattgcttcaaggtaaacatagcaccaaggggctgggcaagatggctcccagttctgcccacttcgtcaccctgtaagtactcagaaccaggaggactagaagactccttttggccagataagactacgttctctattgcagcttctgaaccagagactgatgttgacacactttttttccatttggcaggaatgggagtacagtgccattaggaccagcaagtgacacaggaattctgaatccagatggttataccctcaactacaatgaatatattgtatataaccccaaccaggtccgtatgcggtaccttttaaaggttcagtttaatttccttcagctgtggtgaatgttgatattaaataaaccagagatctgatcttcaagcaagaaaataagcagtgttgtacttgtgaattttgtgatattttatgtaataaaaactgtacaggtcta

SEQ ID NO: 3132 - DNA, 312 bp, Homo sapiens
tttgtcgtttttttgtttttgtttttttttgatacggagtctcgctctgtcgcccaggctggagtgcagtggcgcgatctcggctcactgcacgctccgcctctgggttcacgccattctcctgcctcagcctccggagtagctgggactacaggcgcccgccaccacgcccggctaatttttttttgtatttttagtagagacggggtttcaccatgttagccaggatggtctcgatctcctgacatcatgatccgcccgtcttggcctcccaaagtgctgggattacaagcgtgagccactgcggctggc

SEQ ID NO: 3133 - DNA, 6145 bp, Homo sapiens
tatttttttttttttttttttttttttttttttttttgagacagagtcttgctctgtcacccaggctggaatgcagtggtgcaatctcggctcactgcaatctctgcctcctgggttcaagcaattctccagcctcagcctcccaagtagctgggactacaggtgcagtgtctggctaattttttggtatttttagtagagatggggtttcaccatgttggccaggctggtcttgaacccctgacctcaggtgatccacccacctcaccctcccaaagtgttggtattacaggcatgagccactgcgcccggcaagtcctttatattaatattagccattagtggttaaacacctgagtactcagccctagcacactcttatcagatagcagagtcctctgtgagaagatttttttttgcaaatttcatatcatttattgaaattgttaactctctgttcatatccttttgcacattttttttttttttttaaacagacaggatcttgttctgtcacccaggctggagtgcagtttgtacagtcatagcccactgcaaccttgaacttctgggctccagcaatcctcccacctaagcttcctgagtagctcggacttcaggcgcatgccacaaagcctgactaatttttaaattttttatggagatgagaatctcgctatgttggataggtggtcttgaattcttggcctcaaatgatcctcctgccttgtcctcatgaggcactgggattacagggatgagccactgggacaagctgttttgcacattttctaaagttattggtccttttcttactggtttcgaggaactttatataatatggagaatagccttttgtctgtaatacaaaccacttgtgttttccagatttgtcatttaccttttggttttccttatagtacactttttgcccatattgaagttttaaattttttctgtagttaaatttattaatttttcctttttaaaaaattttgggtttttttttttttaattttagagacagtgtcttgctatgttgctcaggctggccttgaacttgtgacctcgtgtgatcctccaacctcagcctcccaagtagctgggactacaggcatctgcccccaagctcagctttctttttaatcaacctttttctcttgtttacctttgtggttttgagtagataatacatttgcctcattaatatatttcctggatatgacttcatgtttgaatttattgatccaacatatataattttaacaaccaattagtatttatttcttactatttcttctacttaaaataccacgagcagatagaaaataccttaaggttagccaggtgcagtggctcacgcctgtaatcccagcactttgggaggctgaggcgggcggatcacctgaggtcgggagttcaagaccagcctgaccaatgtggagaaatcccatctctactaaaaatacaaaattagccaggtgtggtggcatatgactgtaatcccagctactcgggaggttgaggcacgagaattgcttgaacctgggagacggagtttgtggtgagccgagatcgtaccattgtactccagccctgggcaacaagagcaaaactccttctcaaaaaaaaaaagaaaagaaggaaaataccttaaggcagccaggtgtggtggctcatgcctgtcatcctagcactttcggaggccaaggctggagaatcacttcaggtgtgagttcaagatcagcctgggcaacatggtgaaaccttgtctctacaaaaaaatacaaaaacaccgggcatgggccagctactttggaggctgaggtgggaggattgcttgagcctgggaggttgaggctacagtgagctgtgattgagccattgcactccagcctgggtgacagagggagaccctatctcaaaaaaataaaaaataaaaaccataaaaacatttacaaaaaaattttttaaaggaaaagaaaatatcaagctgggcatggtggcttatgcctaaaatcccagcactttgggaggccaaggcgggcagatcacttgagttaggggttcaagaccagccttgccaacatgttgaaactccatgtctactaaaaatacaaaaaaaaattagtctggcatggtggcgtgtgcctgtaatcccagctactagggaggctgaggcacaagaaattgcttgaacctaggacacagaggtggcaatgagcggaggttgcaccactgcactccagcctgggcgacagagcaagactctgtctcaaaaaaagaaaatatcttaggctcctttttgttctaacatctaatgaccttttttttttcaccagtgggctaaggtcgtacaatggctttagaatgtgagcaagcaggagatagaggtaggaaggggcagcatgcttaacaaaaaagaatgcctccatatccagggctcggccatacaacaccagctgctatgccttatcatggacttctctctcttcactctgagtgatttacttacagatacctctttttagatactggccatattctctctcagtatctccaagtcaggtcaggttaggtatgggacggatgtggcagtggttttgcgtatcccttgtcccctcccattattgccctgctctcagctcattgtcaaatttctgcagctgacaaacaaaagctgtgagtagaactgtcaaggagtaagtcatttaacagttgagcataacaggtttagacctttggagcatccaaattgttttcatttgggaaataattattgggagtggattgggagctggaaaacacatatagcttagaaaatatctaaatagggagctgaggcaggaaaaaactggaggagccattcaatgtaggatatttgaggttggatagagggttttaggaagcttctaggctcccactttaattcctaagaatccaaagtttaatgtataagccctatttcttctttatatctttaatcttacaggaatctaattttcttgcctgatgctatccttttccttatggaaataactggcacctgtgacgaaggatgagtcattggtttatgtgatttccatttgcaaaactccttttttttgtttttgttttcactcaacatagaccaatctccagttcaacaacaacaagtactatctgattcagctattagaagatgatgcccagaggaacttcagtgtttggatgagatggggccgaggtaatgatttttattgagattttatgagttggcattcagaaagtcagaagcagcttagtgggtggccaaaggattctctgggtttaaattgggtcagtagaggctctgaagtctgggagagccttaggaatcaagttgagcatcttgaaattggggaatggcaggcatcctccttagagttcccactggaaaaactaagagcagcccattgagtctgaaaactcttctatagttgaactgctagtagtgctcatagactatggcagttagcaagtaacttgtatcaacatgattagttccctaaatcctttcacctttcccttctccctttcctgcctgtttgtcagatgttaagcagagagatcttggagagctggcctgttactcttagggaactatcttatgtgtggcatttcctttgcagttgggaaaatgggacagcacagcctggtggcttgttcaggcaatctcaacaaggccaaggaaatctttcagaagaagtgagtgctgaaaagtgactacaaaaaaatataccctcctcttcttagatgtatattctctaaaaaatttttttttagacagtttcactcttgttgcccaggctggagtgcaatggcatgatctgagctcactgcaacctccacctcctgggtttaagtgattctcctgcctcagcctccctagtagctgggattacaggcgcccaccaccacgcccagctaatttttgtatttttaatagagatggggtttcgccatgttggccaggctggtctcgaacccctgacctcaggtgatccgcctgcctcagcctcccaaagtgcgggattacaggcgtgagccaccgtgccctgccttctctaagaattttataagtgtgtggcttataaaaaacttttcgttttataggtgtgatttggcctaaatgttaatgtcttttcaccctgacattctgtggttgaaacaccaaactgcatccttagtgattaaatcaaactaataccttgaaagtcactaaaaacagaagaatctaatatatttaacacatgactgacaaatttaggaaatttgggataagtggagactatcctgggatagataatattcaactaggggctgagcacggtgatgcctgtaatcccagcactttgggaggttgaggcaggaggattgcttgaagctaggagtttgagaccagcctgggcaacaaagcgagacccctgactctcccccaaaaaaaaggaaagaaaaaaagagaatattcagttagaatttttaaaactttatgatatagatgaagaactttctggagaattggagaacatgtttctttcagggaaagagattagatggatatcttttgtttgaaatctcaatggcttttgtggtgtttgggaaggacaagcattgtttttcccattttttaaattccatttgtctccagagcttttttgtccatttagtgtcctcatttagaattagactaattttgatttatggaaagttgatgtgtaaaggagctcagtgctggaaaataaattctttggagattttctgtcttgtaagtccatcttcatagtagacctttatttgtaaagttttcttacaccttggactctacagattccttgacaaaacgaaaaacaattgggaagatcgagaaaagtttgagaaggtgcctggaaaatatgatatgctacagatggactatgccaccaatactcaggtaactctcactatacttttcgaaagaaacacatcttctttttttattttattttttagaggcaaaactgtgctctgttgcccaggctgggtggcacaatcatggctcactgcagcctcaagatcctcaggctcaagtgatcctcccacctcagcctcctcagtatcaggaactacaggcacgtgccactctgcccagctgattttttttcttttttttttgtaaagatgaggtttcactatgttgcccaggctggtctcgaattcctgggctcaagcagtcctcttgtcttggcctcccaaagtcctgagattacaagcatgaggcaccacacctactcctgtttcttcttactcagggtaaagcagaatagcttagatcattcctggactgggacaggccaggatatcttgaatcctttctacttctcacctcaggggtgctctcactgatctttgtaatcccaaagggacagtaagaatgaggatagaatgtgcctttctagtcttggctctgttatttactaaggttcttttttttttttttgagctggagtttgattcttgttgcccaggttggagtgcaatggctcagtctcagctcgctgcaacctccagctcccgggttcaagcgattcttctgcctcagcctctcaggtagctgggattacaggtgcccgccactatgcccagctaattttttttgtatttttagtagagacagggtttcatcatgttggccagtctggtcttgaactcgtgaccttgggtgatctacccgcctcagcttcccaaagtgctgggattacaggcgtgagccatcacgcccggcctactaagtttcttataaaatcttaggccctatttccagacgtttattgtttttttcgtttttttgtttttgtttttttttgatacggagtctcgctctgtcgcccaggctggagtgcagtggcgcgatctcggctcactgcacgctccgcctctgggttcacgccattctcctgcctcagcctccggagtagctgggactacaggcgcccgccaccacgcccggctaatttttttttgtatttttagtagagacggggtttcaccatgttagccaggatggtctcgatctcctgacatcatgatccgcccgtcttggcctcccaaagtgctgggattacaagcgtgagccactgcggctggc

SEQ ID NO: 3134 - DNA, 371 bp, Homo sapiens
aggtggggttttgttatgttggccagggtggtctcgaactcccgagttcctttttattgcagaatagtattccattttatggatatatcacattttgtttatctattcattagttgatggatatttgtgtcatttccacattttgactgtcatgaacaatgctgctgtgaacattcatgtacaagtttttgtatagacagatgttttcatttctcttgggtctgtctatacataggagtggaattattgggtcatatggtaactctatatttaactttctaagaaactgccaaactgctttccatgatggctgcaccattttttcatttttaccagcagtgtatgaaggttcagattttttcaaatttttt

SEQ ID NO: 3135 - DNA, 424 bp, Homo sapiens
aggtggggttttgttatgttggccagggtggtctcgaactcccgagttcctttttattgcagaatagtattccattttatggatatatcacattttgtttatctattcattagttgatggatatttgtgtcatttccacattttgactgtcatgaacaatgctgctgtgaacattcatgtacaagtttttgtatagacagatgttttcatttctcttgggtctgtctatacataggagtggaattattgggtcatatggtaactctatatttaactttctaagaaactgccaaactgctttccatgatggctgcaccattttttcatttttaccagcagtgtatgaaggttcagattttttcaaatttttttgccagtacctatctgtctttttaataaagccatcctagtgggtatgaattgg

SEQ ID NO: 3136 - DNA, 183 bp, Homo sapiens
aggctggtgtgcagtggcatgatctcggctcgctgcaagctctgcctcccaggttcacgccattctccggcctcagcctcccgagtagctgggactacaggtgcccgccaccacgcctggctaattttctgtgtttttagtagagacagggtttcaccatgttagccaggatggtctcgatct

SEQ ID NO: 3137 - DNA, 117 bp, Homo sapiens
aggctggtgtgcagtggcatgatctcggctcgctgcaagctctgcctcccaggttcacgccattctccggcctcagcctcccgagtagctgggactacaggtgcccgccaccacgcc

SEQ ID NO: 3138 - DNA, 3138 bp, Homo sapiens
gcatttaaccttgaaaaagtgtaattcttcaggttatcagacacagagaaattagtaaggagtagattcaaatgtagttcttgccagttcagtttgaatcctctccattgggttagttatctcttttcactttatcaataatgtatatattattgatgtagaatgtaacaaagtaaatcatccttcaactccattattctaatgtaagtataatctctttagtttagtgccccatgggttttttttttataataacacttaaaaagaaataccaacaacttcctttctggtatccctgcaaatggaaaactttctatgaaattataagtacttaaagtagaaaaggatcattaagagcttctctttaatctcctaacacataagtctgttctatatatttttgccaagtgaccgtttagcctttgcttaaagttctaataatgcaaaacgcattacctcataaggcaggtcattcattgcttagaaaattttagttgttagaacgttattccttacgttgagtcaaacgtggcttccctataacttctagtggtagttcctagttctgccctctagcatcatgaaaaataactttgttctgtctttcattttttattattttcttttttttttttttggagacagagtctgctgcccagactggagtgcagtggcgcgatctcggctcactgcagcctctccctcccgggttcaagcgattctcttgcctcagcctcctgagtagctgggaccacaggcgcagacaaccacacctggttaatttttgtatttttagtagagacacggtttcaccattttggccaggctggtctcgaactcctggcctcaagtgatccgcccaccttggcctcccaaagtgctgggattacaggcgtgagacagcacccagcccattttttattctttcagacattagaaataatgattctctctcctacaaagaaaaaaacttaaaatcacctataaatctatcctgccacctagaaataacaaaattaacattttgataattatctttcctgtaaggtagaatatatacagggaaattacatattaatagtttataatctgctttctttgtacttaatgtattttaaggaccttttcatgtaaaatatttgaaattaagatttttaatgattacaaagtattttattatataatttatttcatcttggtaaattagattgtgtccattttcattagtaatgctgcagtgaacattctggtcaataaatgtttatgtacaattcttatttctataggatgaatccctagaagtggaattgctgggtaaagtatataaacatttaaaaaactgttacatgttaccagatggtcctgccccaaaaaattgtattaatttttagtgtcaccaatttgataggtaaattttaacatattttgttttaataattggtcaggttaaatgttttttgtttattgataatttatatttaatcataatttttaaaaaatcatgtaatatatattccatattccaatttccttagttgtcccaaaaatatattcttgtaactttggtgaaatagcatctaatcaaagttcacatttagttattgtctccttaatctcttttaatttaggtcacttgttttatagattgtcccacattctgaattttgtctgtttcttgtggtatcatttaatttgttcctccattctctgtatttcctgtaaactagaagctgggtccagaggtgggattagattcaaattaagtgtttttggcagggataattcctaggtgctattgtgtattcatcctacactataccctacactatatccttctaatcaaatcagcaggcatatatgacacttaatgacaggttgttccacaaatagtaatactaagtttgttaaggtgttaactgccatgtcttcccattgtaaagtacatttacccctttttaattagtaaattatctgtggggtgatgctttggtaccatgtgaatatcctgttccccaacaactaactgttcacctaattgcttgagcatttattgatgatccttgcttgaatgagctgctgcactgggagttacatagaaaatgttcttttttggccaggcgcagtggctcatgcctgtaatcccagcactttgggaggctgaggcagatggatcatctgaggtcaggagttcaagaccagcctgactaacatgatgaaacctgtctctactaaaaatataaaaattagctgggcgtggtggtgggcgcctgtaatcccagctactcgggaggctgaggcaggagaatctcttgaacccaagaggcagaagttgtagtgagcgaagatcaggccattgcactccagcctgggcaacgagcaaaattccatctcaaaagaaaaaaatgttcattttctaaatatataatttcttctacagttattaactagcattcttttgtaaagattttctattactttactattactataacctcatggatttttttaaagaatcaatatgttgtaatcaattatagctactgttcttggtttttctttttgatgctcaatttgtctcaaatttgataaatgggagctccttcaagatgactcttgttcctattgacatgatcccattaatctttttttttaattgtggtaaaaaaaatacatctaacataaaattaccatcttaaccatttttaagtgcacaattcagtaatgttacatatattcacattgttgtgaaacatatctccagaacctcttcatcttgcaaatctaaaactctatacctacacaacagttccccctctctcccttcagtctctggtaaccaccattctactttctttttttttaaatatgactactttagataccttttataagtggaatcatacaatatttatctttttgtgactggcttatttcgtttagtataatgtcttcaagatttacccattgtggcatgtgacaggatttccttcctttttaaatatttttatttttattttttttctatttttctcaccactcaatttccttcctttttaaggctgaataatattccattgtatatatacacaccattttgtttaatccattcatctgtcagtagacatttgggttgcttcc

SEQ ID NO: 3139 - DNA, 618 bp, Homo sapiens
gatcagagctggcttctgtcctccacaagtttgcagcccagtcagtgacctgccaggtcataaaaacaccatggacaggatggaaaggagacagactgtgggctgtgagggcacttaagcaaagagaggtcactcttaatcaaagatggcaaggagggcttcttgaagatagtagcatctgggcaactgcttacatgaggcataaaggatcagtgggcagttttttcctatacatacagcatttcctatatatacagagcccatttttagacactgttcttagaggagcagacccctctgaggagagaaagcagctggacatctggcagaggctgacttatagatgcccctttgtagcactcaccaaagggcccttcccccagcagacatcaatgcttcaattcagggagcactgaacgatgcctgctgtggcccagaccctgggctggcgatagggggcccagatgtatcctgctcagcctctgccctcagggaactctcagggaagaagagcttcatgtacaaagaaagcagataaacactgacaaaggccgcaggacggaggcagccagcctctcggggtcaggggcagggcgcaaaacccccacactcagaaac

SEQ ID NO: 3140 - DNA, 618 bp, Homo sapiens
gatcagagctggcttctgtcctccacaagtttgcagcccagtcagtgacctgccaggtcataaaaacaccatggacaggatggaaaggagacagactgtgggctgtgagggcacttaagcaaagagaggtcactcttaatcaaagatggcaaggagggcttcttgaagatagtagcatctgggcaactgcttacatgaggcataaaggatcagtgggcagttttttcctatacatacagcatttcctatatatacagagcccatttttagacactgttcttagaggagcagacccctctgaggagagaaagcagctggacatctggcagaggctgacttatagatgcccctttgtagcactcaccaaagggcccttcccccagcagacatcaatgcttcaattcagggagcactgaacgatgcctgctgtggcccagaccctgggctgggcatagggggcccagatgtatcctgctcagcctctgccctcagggaactctcagggaagaagagcttcatgtacaaagaaagcagataaacactgacaaaggccgcaggacggaggcagccagcctctcggggtcaggggcagggcgcaaaacccccacactcagaaac

SEQ ID NO: 3141 - DNA, 618 bp, Homo sapiens; identical to SEQ ID NO: 3140

SEQ ID NO: 3142 - DNA, 618 bp, Homo sapiens; identical to SEQ ID NO: 3140

SEQ ID NO: 3143 - DNA, 498 bp, Homo sapiens
attgggaaaaccaaatgaggcaaagtatgtcaagggcttagcacagcacatgcctaggtacacaccatgtgattcccagcaccctgaaagagctgcagggctgactgggagtctgcagacctgggtcccagccccaaatctgccaccaactcactatgtggtcttgggccattggtttccctgacagagtctgtcatcagtttccccatcagtaaaacaaagacagcagtggaaaagaaagggatatacttcatctctcttggctcatctagacttgactctctagaacagaattggaggggaattcagttaattctttctttctttctttttgacatggtctcactctgttgcccatgctggagtgcagtggcatgatcatagctcatggcaaccttgatctcctgggcttaagtgatcctcctgccttggcctcccaaagtgttgggattacagacataagccagtgagccaggcccagttaattcttagggatgt

SEQ ID NO: 3144 - DNA, 498 bp, Homo sapiens; identical to SEQ ID NO: 3143

SEQ ID NO: 3145 - DNA, 115 bp, Homo sapiens
cacgcctgtaatcccagcactttgggaggctgaggtgggtggatcacgaggtcaagagatcgagaccatcctggctaatatggtgaaaccccatctctactaaaaatacaaaaaa

SEQ ID NO: 3146 - DNA, 105 bp, Homo sapiens
atcccagcactttgggaggctgaggtgggtggatcacgaggtcaagagatcgagaccatcctggctaatatggtgaaaccccatctctactaaaaatacaaaaaa

SEQ ID NO: 3147 - DNA, 112 bp, Homo sapiens
aggagaatcacttgaacctgggaggcggaggttgcagtgagctgagattgtgccactgcactccagcctgggtgacagagtaagactctgtctcaaaaaagaaaagaaaaaa

SEQ ID NO: 3148 - DNA, 498 bp, Homo sapiens; identical to SEQ ID NO: 3143

SEQ ID NO: 3149 - DNA, 542 bp, Homo sapiens
tcaagctggggggaacaaaggccgtgtttcttagtgtgtcttggctcttggggtttgtccccagtgaaccagtgaggctttgtaaacaagctgccccatagatctcaagatctggcctcacaagccctggacctagcttgctgggtcctccctcccaggagctattatagacctcttaccaggtcggcttgtccagatgtttgggtgggagatatccttttccagatgtgtctggacaaagccagagacatagcagtaggatttgacaaatgctatctggtctcttctgcaaccttctctgagcagttgatgaaaatgatccaaattcaaatgccaaaagggttgggacccttgggctgggacccttgtgttaagtcatatacgcccccattccacaaagtcctaggccatagattttatggtgcttacatctctgttccccagtgatgccaaagacatgggtgagagaagaaagctctaccatgagttctgctgtattccaagcccttgctgagtactgaagctgcaatagtgaatgtaac

SEQ ID NO: 3150 - DNA, 498 bp, Homo sapiens; identical to SEQ ID NO: 3143

SEQ ID NO: 3151 - DNA, 361 bp, Homo sapiens; identical to SEQ ID NO: 3126

SEQ ID NO: 3152 - DNA, 469 bp, Homo sapiens; identical to SEQ ID NO: 3127

SEQ ID NO: 3153 - DNA, 5183 bp, Homo sapiens
ggttgcgatgagccaagatcatgccactgcaccccagcctgggcacaagagtgaaactccgtctcaaaaaaaaaaaacaaaacaaacaaacctgcaaatactcattctgtccagagcttatgtttttgagttaataacatatttcctagcttacgtttggttttacttgtgcttttgcttctgagaaaatagatgtacaaagcatcggcatggttgcaggagcagtgacaggcatagtggctggagccctgctgattttcctcttggtgtggctgctaatccgaaggaaagacaaagaaagatatgaggaagaagagagacctaatgaaattcggtaaacctcccacatccctacttttacggggcttctgttttagggccagcactatagtgaccagccaacataaatgttcccagttttctcttaaccatgaatctgttaaaaggattatcctggtaggtaggaagttccagcctagggacagagggtatggtttacctggactttattgtgaaactatcttatcctcaacaaacacttaaaagttaaattaggctgggcgtggtaggtcatgcctgtaatcccagcactttgggaggccgaggcgggaggattacttgaggccaggagtttgaaaccagccttgtcaacatagttagactccatctttacaaaagaaaaataaataaataaataaccaggcatggtagcccatgcctgtagtcccagctactcaggaggctgagacaggaggatgactttagcccaggagtttaagactacagtgagccatgattgcacctctgtactccagcctgggtgacagagaaagagcatgtctcaaaaaaaaaaaaaaaaaaagtatgtacatatgtatatacataaaacagttcaatttacattacttctgattcacttctacccataatgggcatacaatgaagaatggacatagcctataggtcatgaaagggtttatgcagacaaaccctaaatcaggaggtgtgctgtctagaccatctcaatggtaaggtcctatcctcccagtataatagagttgacctgtgggctaacaaaatatacatttgtgtgagccaagcattaagtcttaagatacgaggaagcacctatgaccctaaatggttgccttccgatggtattatctgaggttcacagcttcggaaacctcagaaggaagcaatcatactggaagcaatcacagatctgccagtgttaatctttgctgttttttctcttcagagaagatgctgaagctccaaaagcccgtcttgtgaaacccagctcctcttcctcaggctctcggagctcacgctctggttcttcctccactcgctccacagcaaatagtgcctcacgcagccagcggacactgtcaactgacgcagcaccccagccagggctggccacccaggcatacagcctagtggggccagaggtgagaggttctgaaccaaagaaagtccaccatgctaatctgaccaaagcagaaaccacacccagcatgatccccagccagagcagagccttccaaacggtctgaattacaatggacttgactcccacgctttcctaggagtcagggtctttggactcttctcgtcattggagctcaagtcaccagccacacaaccagatgagaggtcatctaagtagcagtgagcattgcacggaacagattcagatgagcattttccttatacaataccaaacaagcaaaaggatgtaagctgattcatctgtaaaaaggcatcttattgtgcctttagaccagagtaagggaaagcaggagtccaaatctatttgttgaccaggacctgtggtgagaaggttggggaaaggtgaggtgaatatacctaaaacttttaatgtgggatattttgtatcagtgctttgattcacaattttcaagaggaaatgggatgctgtttgtaaattttctatgcatttctgcaaacttattggattattagttattcagacagtcaagcagaacccacagccttattacacctgtctacaccatgtactgagctaaccacttctaagaaactccaaaaaaggaaacatgtgtcttctattctgacttaacttcatttgtcataaggtttggatattaatttcaaggggagttgaaatagtgggagatggagaagagtgaatgagtttctcccactctatactaatctcactatttgtattgagcccaaaataactatgaaaggagacaaaaatttgtgacaaaggattgtgaagagctttccatcttcatgatgttatgaggattgttgacaaacattagaaatatataatggagcaattgtggatttcccctcaaatcagatgcctctaaggactttcctgctagatatttctggaaggagaaaatacaacatgtcatttatcaacgtccttagaaagaattcttctagagaaaaagggatctaggaatgctgaaagattacccaacataccattatagtctcttctttctgagaaaatgtgaaaccagaattgcaagactgggtggactagaaagggagattagatcagttttctcttaatatgtcaaggaaggtagccgggcatggtgccaggcacctgtaggaaaatccagcaggtggaggttgcagtgagccaagattatgccattgcactccagcctgggtgacaaagcaagactccatctcaaaaaaaaaaaaaaatcaaggaaggataaaaggaagttcagtattgtaccacacttggaacttcctccatttcttccattttagaaggatatgaacctggaacttttgatgattctaagccttaaactatcaaaaagatcagggattgccaatgcttctaatggcactgcaagtatatgccataaccgttccctcctaaaagtgaaaaatgagagaaattcagtattttcccaggctcagcatccagaagtctagctctgggctggaagaaaagggtactaatatttagggaagagatgagaataagtagtgggtggcaggagagggctgagctagtgcctgctaacattttagttgtatcttggaaagatttagcaaaaataactcaccaggatagctgctgaagagttgatgaatgggagaagaaagatgtttgagaaataaagaaaacagcagcctgcaatacaataacttgcctttttaatagttttgattactcttgatacctacagcacaaatgctggacctgaatcagctcttcaaggaccctagcacaaatgtcaactgatcacctctgggagagtagaaaacttttttttttttgagacgaagtctcgctctgttgcccaggctggagtgcagtggcaccatctcagctcactgcagcgtccgcctcttgggttcaagtgattctcctgccttgtcctcctgagtcgctggtattacaggtgcctgccatcacacccagctaatttttggagttctgatagagacagggtttctccatgttggccaggcttgtctcaagctcctgacctcaagtgacctacccacccttggcctcccacagtgctggaagccactgcacctggctcagaatacttttttttttgagatgcagtcttgctctcatcacgcaggctggagtgcagtggcgtatctcggctcactgcgacctccacctcccgagttcaagcgattctccttcctcagtcccccaagtagcttggattataggtgtgcgccaccacgtacagctaatttttgtatttttagtagagatggggtttcgccatgttgaccaggctggtctcaaaacgcctgacctcaggtgatccacccacctcggccccacaaagtgctaggattacaggtgtgagccaccatgcccggcccagaatactttttaaaagaagagcaggttagaggaaagaaaaaaattgatgctgaatgtggtgatgaaagcatgtttctaaaatgggaagcagatgcttaaagaggaaagactaatctgggattttgccccatttctctggtttttcactcctatatttaattctcacaatcgtgtcgtcacatagtgcaaaaaacaaaattcttgtaaagtccccaggagtttatgcttgggtgaaagttttagcctgagtattttcttcctctaaaaaaggtgggaaatgagacattgaggaattaacatataaatgtctgctatgggtttaagagaactggcgtatttggaatgcttcttacactaacactgtctcattgtaaaatataaaaccccttactctaactacatttttattcctctggtagtgtggtatccaggcaacatatcacttctgctatgtaattctaagaattctcatttctagagtacctgagccaaacaaatacacaacggaagctgcagctgtatcatcactagcaatttgctcatcattatttactacctttgaacctaaggtttcctgcctatgcttttgaaagcaaaaatcagtctcctttgcatgaaaaagagccttagatttttaaacatgttagttaccagaatgctaaaataccagttgattacccaaattattttggaaatctatccataatggaagtctacaacaaacacataaaacagattacactaagagctgagaaattcaaaggaactgaagattctgagagataaactgttcaagtcttagcaatgatactgcacttctctttgacaggttctgggcttaagttagaggccctactggttccaaaccatattccactgactttgcaagtaaaataaatttgattctgaaataggaaacaaaaaaaggagaaataaccgaatagtagaagaaaaactgtttgtaggaagacgatgcagatggaatgatgtggacattgagtaaccatgtcaataaaatatataaaccaaacttaaatttgtgaaataaggaagttggtacctttgttgttacagtgtataaaaacaatttcggaactgctgttgcaaaaagacatatatagttttgcttccttctggtgttaagctgtttatatttcagtttcagttttaacttctaagttgccttgtaattgggactgtgtttcagcatcacaaaaaccaaatatttattatggatgcatctgtatcagcaattaaaaaataaacaagtaaaagtgatactgtaggagaagctgaa

SEQ ID NO: 3154 - DNA, 1742 bp, Homo sapiens
gccatcacacccaagtaatttttggagtttttaaaaagacagggtttttccatgttggccaggcttgtctcaagctcctgacctcaagtgacctacccacccttggcctcccacagtgctggaaaccactgcacctggctcagaatacttttttttttgagatgcagtcttgctctcatcacgcaggctggagtgcagtggcgtatctcggctcactgcgacctccacctcccgagttcaagcgattctccttcctcagtcccccaagtagcttggattataggtgtgcgccaccacgtacagctaatttttgtatttttagtagagatggggtttcgccatgttgaccaggctggtctcaaaacgcctgacctcaggtgatccacccacctcggccccacaaagtgctaggattacaggtgtgagccaccatgcccggcccagaatactttttaaaagaagagcaggttagaggaaagaaaaaaattgatgctgaatgtggtgatgaaagcatgtttctaaaatgggaagcagatgcttaaagaggaaagactaatctgggattttgccccatttctctggtttttcactcctatatttaattctcacaatcgtgtcgtcacatagtgcaaaaaacaaaattcttgtaaagtccccaggagtttatgcttgggtgaaagttttagcctgagtattttcttcctctaaaaaagggtgggaaatgagacattgaggaattaacatataaaatgtctgctatgggtttaagagaactggcgtatttggaatgcttcttacactaacactgtctcattgtaaaatataaaaccccttactctaactacatttttattcctctggtagtgtggtatccaggcaacatatcacttctgctatgtaattctaagaattctcatttctagagtacctgagccaaacaaatacacaacggaagctgcagctgtatcatcactagcaatttgctcatcattatttactacctttgaacctaaggtttcctgcctatgcttttgaaagcaaaaatcagtctcctttgcatgaaaaagagccttagatttttaaacatgttagttaccagaatgctaaaataccagttgattacccaaattattttggaaatctatccataatggaagtctacaacaaacacataaaacagattacactaagagctgagaaattcaaaggaactgaagattctgagagataaactgttcaagtcttagcaatgatactgcacttctctttgacaggttctgggcttaagttagaggccctactggttccaaaccatattccactgactttgcaagtaaaataaatttgattctgaaataggaaacaaaaaaaggagaaataaccgaatagtagaagaaaaactgtttgtaggaagacgatgcagatggaatgatgtggacattgagtaaccatgtcaataaaatatataaaccaaacttaaatttgtgaaataaggaagttggtacctttgttgttacagtgtataaaaacaatttcggaactgctgttgcaaaaagacatatatagttttgcttccttctggtgttaagctgtttatatttcagtttcagttttaacttctaagttgccttgtaattgggactgtgtttcagcatcacaaaaaccaaatatttattatggatgcatctgtatcagcaattaaaaaataaacaagtaaaagtgatactgtaggagaagctgaa

SEQ ID NO: 3155 - DNA, 216 bp, Homo sapiens
tgggattacaggcatgagccactgtgcccggccctggagccaggatttaaacccagccactgttagtatattccatcagaactgacagatcctgattcatcatcatcttccctcctgaaatcctcaaacttttacactcagctataggctttctctcctctttgctttcttccttgacctaaagctgttcaccatacttgggacacacttagctca

SEQ ID NO: 3156 - DNA, 133 bp, Homo sapiens
ccaggctggagtgcagtggcacaatctcagctcactgcaagctccgcctcccgggttcacgccattctcctgcctcagccacccgagtacctgggacaacaggcgcctgccaccacgcctggctaattttttg

SEQ ID NO: 3157 - DNA, 302 bp, Homo sapiens
gcgcggtggctcactcctgtaatcccagcactttgggagaacgaggagggcggatcacgaggtcaggaggtcaagaccatcctggctaacacggtgaaaccccgtctctactaaaaatacaaaaaaactagccgggcgtggtggcgggcgtctgtagtcccagctactcgggaggctgaggcaggagaatggcgtgaatccgggaggcggagcttgcagtgagccgagatcgcgtcactgcactccagtctgggggacacagcgagactccctctcaaaacaaacaaacaaacaaacaaaaa

SEQ ID NO: 3158 - DNA, 17784 bp, Homo sapiens
aactttgaaagaactatcaggatttggattgactgaaaggagtggggaagcttagggaggaggtgcttgccagacactgggtcatggcagtggtcggtgaagctgcagttgcctagggcagggatggagagagagtctgggcatgaggagagggtctcgggatgtttggctggactagattttacagaaagccttatccaggcttttaaaattactctttccagacttcatctgagactccttcttcagccaacattccttagccctgaatacatttcctatcctcatctttcccttcttttttttcctttcttttacatgtttaaatttaaaccattcttcgtgaccccttttcttgggagattcatggcaagaacgagaagaatgatggtgcttgttaggggatgtcctgtctctctgaactttggggtcctatgcattaaataattttcctgacgagctcaagtgctccctctggtctacaatccctggcggctggccttcatcccttgggcaagcattgcatacagctcatggccctccctctaccataccctccacccccgttcgcctaagctcccttctccgggaatttcatcatttcctagaacagccagaacatttgtggtctatttctctgttagtgtttaaccaaccatctgttctaaaagaagggctgaactgatggaaggaatgctgttagcctgagactcaggaagacaacttctgcagggtcactccctggcttctggaggaaagagaaggagggcagtgctccagtggtacagaagtgagacataatggaatcaggcttcacctccaaggacacctatctaagccattttaaccctcgggattacctagaaaaatattacaagtttggttctaggcactctgcagaaagccagattcttaagcaccttctgaaaaatcttttcaagatattctgcctaggtaagtctgttgtctgcatgtctccccactaatgtgagtcatatagatggagtctcagggcacgactgggttttgtgtctctcgttgttgcttcacagcccttttggcatcacccatttatttaactaggataaaaacgaatattggtatagcgattccacagtttacaaagtgcttttgtatccactgtctcacttgatcaagcaaaaggaaaccagaggaccggagtgctgtcctgagtctaccttgatttgctaggcgacttgagggagacttttagcctcaaagggccacttaagtggaaattctaaaacagtacctattctgatcctaactcaagggaatgctgtgaatatgcatgagataaagacctcccaatatatgaagaactgggtgatttttggagaaagacattatatactcaatttcttttttaattaactttccttgaaagtattgcttaatagtttttacattctccatgtaacagactttctggatctggtcttcagtctgtacaccagatgtagatcttttttaccttctcctagaccttaaaattcctggcaacatgcctccaccctggattggggaataaaaaatgaaaagttttttttttttctttttgactttaaattttattaaagtttgaggtttttcaaactgatgtgctttatttaaaattcaagtgagacatttttagtctttttgatatttatattttctttgtcactatgatgtaaattacagggatttggggaaaatatgggatttttttttttttttttggagatatagatctcactctgttgcctaggctggatggagtgcagggatgtgatcacagctcatcatagtctcgaactcctggactcaagggatccttctgcctcagcctctccaataactaggtcttcaggcacacgccaccatgcctagctaattttaaaatttttttgtagagatgaggtctcactatgttgtccaggctggtctcatcctccaggcctcaagtgatcctcctgccttggccttccagagtattgggactgtaggcatgagccactgtgcctggcccagaaaagatgttttaaaaaaacattttgagggaaaagttgtgaacagtagtggtctgtctttgaggatcgccagcacagtcccagggaagacaatgtaaatttgactctgcccactgccatgagatgcctgatctctcctctttgttcctcccactaatccagacggtgtgaagggagacctgctgattgacatcggctctggccccactatctatcagctcctctctgcttgtgaatcctttaaggagatcgtcgtcactgactactcagaccagaacctgcaggagctggagaagtggctgaagaaagagccagaggcctttgactggtccccagtggtgacctatgtgtgtgatcttgaagggaacaggtagagaaactggtgtctacttcttggcttttgaaggtacctgagtgatggttggcaaaagcaacagacagatagggaccaaagagaaatccaaatggagaatgagtggtaacgagagagcgagagcaagagagatgagataggcccatgtgtgtgcgtgttagtaaatttgtgtatgtgcacgtgcatgtgtgcaccagagtaatggaagacacagggagagggttgaagaaatggatactgagcaaagaggagtaaacccccaaattttccaggcctttggggacaagagcagtgtgcagtcaagtaccttgggacctaggtttaggacagctgcaagtaaaaggctaacccagcttctcaccagcagcttttggatgtcagtgcttgtcccttgcctcactgccatgctgctgtagccatccaagcctatagaacttggctgtgagtgtggctaatgctgacatcaccagatacaaccaaaatctgactaggtttttaaactgaggtaagaaacataaaggaattacttgaaaagaatttattaatcaccatccatgaaagtagactttgtatactcacaactaatggtcaagatcttacactaccacatctacatgtaaatttatgcaaatgaatctcatttgttcatgtaaattttaatttcttccaacacgagaaattggcaatagcctattagccagaggtagccacgcctgcaattcactgtctttctcatatccttatgcacttccatcttctgctgattgtctgacaatatccagtctgttccccaactgaccattcactcctggagcaacatttctctgctgctatgcatattgctgagaccccacagacttctttgcaagctgcataaaaagatgaatgtttgcaattatagtatctgcaaataaaaataggttttgttcttctattccaactttatgctttttatttatttttctgcccttattatgttggcaaaaactttcaatacaatattgaatagaaatgatgacagcagacctctgtgccttattccatattctaggataaaaaatgttcaatgatttatcattaagtatattaactattggtttttcatagatattatttatcagactaagttctgcattcctagcttttttgaaattttaatcaaatgttgaattttgtcaaaatttgtttgcatttattaagatggtcttatgattttcctcctgtattctgaaaatgtgaattacattggaaaattttgaatgttacaccaaagtggcataaactacttggtcatgaagtataattgagctataattttcttctagtgtgcttcacaaattttgatatcagcatgatgctggctggagtcataaaatgagttgggagtgatatcccctcttctattttctgaaagagtttgagtattattagtataatttccttcttaaatgattgatagcatttaccagcgaagccaggtgaatctgaaatttttgtgcgagagaagactttattaaaaacagtatttctttaatggttacttggattttccgtttgttcttttgtctgttttggtaagtgatacttttcaagaagtttgtcctttttatcttggttgtcaactttattggcattttttttttttacaatatccttttaataccttattatgtctgtaggatctgtagtgatctctcctctttcattcttgatattggtaatttgtcttgttttctttctgttgtcttgatcaaccttgctacagattgatcattttattaatcttttccaaaaaccaacttttggctatgttgatttttctctattgtctgtccattttctatttcattgctttctgctcttatttttgatcactttctttcttctagttattttaattttaattcttttctagtttactttatttttttctagctttctaaaatgtcttgtttttaattcttcttttagcttcttaagttggaaacttatatcatttatttcacatatctctttttctaatgtaggcatttaatgctgcaaatttcctttagcactgttttaactgcatcccatgattcttgtatgtggtatttttattattttcaaattcagcatattgtctcatttcctttgtaatttcttttttgaccatgaattatttagaattatgttgcttaatttccaaagtattgggatttttctagctatcttattgttattgctttcaaattaaattttgttgtagtcagagatttattttgtggctctgcatatggtctatctcagtaaacgttctatgtgctttctacattgaaaagagtgtatattgttcagttgtagatatagtttctataaatatcaattaagtcaggcaggttgatagtatcattcaaattttctacatccttactgacgttttgtttactttctctgtcaattactgagagagagtgttaatgtctcaaactatgattgttgatttatcctttgctccctatagttctgtcaacatttgctatatgcattttgacacttgtttttagctctgttatatacatttttaggattgttatgtcttcttgatgaactgaccactttaccattgtgaaatatctccctttatttccagcaatgtatttgtcttgaagtctactttttctgatgttaatatagctacatcacccttcctatgcttgctgttttgcatggtgtggtgggcagcctctaagatggcccccaataatccttgtgtcagtattttcacctttgtgtaatccccttccctagaatatccactggatttagtgattcagtactgacaagtttggtagaatgcagcatagtgatgggatatcaattgtgatattaaattaaaaggactacagcaccactacacacctattagatctaggccagaatctggaagactgacaacaccaaatgctgatgaggctgtggggaaagaggaactcttatttattgttcgtgggaattaaaaatggtgtagccactttggaagacaattcgactattccttgcaaaactattcaatctagcagttgcactccttggtatgtaacccagaaagctgcatgtattacactcctcagtatgtaacccaaaaagctgtggtatgtctacacaaaaagctgcacacagatgtttatagtagctatattcataattgccaaaaattggaagcaaccaagatgtctttcagtaagcgaatgaataaataaactgtggtacatttagacaatggaataatatccagtgctaaaaagaaatgagctatcaagccacgaaaagacatggaggaaatgtaaatacaattactaattgaaagaagccaatcttaaaaggctacatgtatgattccaactatatgacattctggaaaatgcaaaactagggaagaagtaaagaagataagtggttgctaggggtcggggagggagagataaataggtggagtatagaggattttttagagcagtgagactactctgtacagtactataatggtggacacatgtcattatatatttgtccaaatccatggaatgtacaataccaagagtgaatcttaacgtagattacagactttgggtgataatggtatgccaatgtaggccttctgcttgattttgcggtgaacctaatattgctgtaaaaaacaaaatcaatttttaaaaaatgacagctttttattgggtattctgtctctatctcactctcttgtcctggggagtgagcttggaaccaaatttcccccagttgaaccagaaaaaacagagaaataagtgtttgtcatttttagctgctaaattttggggataatttatcctgcagttacatataactaatatacatgatatatctacatatctttttctacccttctgttttcagattatgttttctctttttaatccagactgacaatttctgcctctaactggattgtttagtccatttacatttaatgtaattactaatattacagggttgaatttaaatctaccatcttggtatatgatttctatctgtcccatctgattgttgttcacctgtgtctttcttcctgttttcccttggtgaatgcagtaatttttagtattccatttagtataagtgtacatatttttagtatttattttttatctcccctgttaacctcttctgtgtcttgtgtgagtttgtgtggtttttctaggaattgcaatatgcatccttgacatatctattgtctcatgaaggatgtaagatattccaaaagtgtaatttccttaaccgactttcctggcccttatgttcttgtcatgtattttatttctatgtataacactataatacatatattgttattagttttgctttagttagtagtgattttatttatttttattgtcttatttttaattttgatttttaaaataaaatttaccatctttactatgtttaagtgttagttgaatagtgttaagtatagtcacataagtcagtatacagttttaaacaatgtatataacaatatatattaaacataggaattttggactgaatgtttttatccctccctcccaatttctgtgttgaaatcctaacccccttatgatggtattaagaggtcggggctttgaaaggtcattaggtcatggaggtggagacttcatgaatgggattagtgcccttataaaaggaaccccatagagctctctagctctccttctgccatataaaggtacaatgagaagtcagctgtctgtggcccagaagagtcctcatcagaccctgaccaggctggcatcctaatctcagacttccagcctttagaattgtaggaaataaatttctgttgtttatgagccacccagtctatggtattctgttacaggagcccaaactaactaaggctatattatgcatatatttaagatcttttatatttacccacatatctttcttctctagtgtttttcattcctttcccaagatctgttcttctgtttggcatcattttccttcacctgaagaacttattttagtattagttataatgcagttctgctggagacaaattctcttaacttatcaagtcgggtaaaaagttagtaattgttttcctccctgctaacttgaggaatttaacaatttttgataaccaaagtcccctggcatctctcttaccagtatttattattgaaatctgagattttaaagttcaaatattgtaatttaaagtattatttttatattttctttcaagatcagtttggacatttgcttttggtttgtaatcaaatttagaattatttggacatatttggtgctcattttatacaatttttctagatattgagtctttaattttggttcatctgtcaactgaatagatcttcaaatatttatttcaagaggaacatacagtgacgtgttttctaagtccatgcatatatgagaatgtattttgtcactcttacacatgaacaaaatcataaaattgtttaaatattgccccactttttttctgacatgtagtaagaagttgagagaggctattctattttttttagacagggtcttgctctgtcacccacactggggtgcagtggtgagatctcactgtagccttgacctcctgggctcaggtgatttcccaccttagcctcctgagtagctgggactacaggtccacactgccatagctggctaattttttgtagagatgggagttttgctctgttgcccaggccggtgagagcctattttcatatgcattttaacctgtatacccctgacttagaattttatattggctatagccttcaaagtggggctatattcttcaatataaaaataatttcatacaccttttttttctgttgactatgtgattctacagaatgaaattgatattaactagaaacaattgcagctatgacaatttggacaatatctaaagttatttagtaaataaggaaattcccagggtttgtagaatctcagggaaactttgtaataagtaaataaatcttcagtcactgttagacaacacaccttgccaaagtccaaatcatctgtcaagaaggcctttgaaactttgttctcactttctgtatccaccaccggcctttccatctcattcaaaaataaacccttacaatctagcaggatagtaaaagcattacttatctcacacctgaaatgtcagcttggaacaactagctcttgagacactgtcccctcccaatcactctgttggacattgcatttttggcagtaaatttctgcattcttatccttatccttgtgctagatcctgtggctttaattattttaagaatgataatgatcctatgcaactcatgtctttcctgcatcttcaagtagctttatcaacctacaacctatttccttcaagatgatttcttctttatctgaagttttttcttgtgctaaaggctgccaaagacgtatgtactgtctcctgttcttctacctctgcatttaaataccactcattttaaattagctggccatagtggtgcacacccgtattcccagctactggggaggctgaggagagaggatcacttgagcttgggagatcgaggctgcagtgagctgtggtcacattccagactggctggcagagtgacactctgtctcaaaaataataaaaaataataataaaaataaataaccctcatttttacaactatccaaaaaagttttaagaaagtcaaacactaagatacaattactcaagcttatacaatgaacagaggaaaatgagctctttccttaagaaattgtagaagctgcattacttaacctatggttcctggaacttggaatgcatagcttaggcttgtggtccctggactagtagtttgacaacacgtgggagcttttagaaatgcaggctgtcaggccccactagctacctacagaatcagaaccttcactgtaagatctgctaagggtggtatgcacattacagtagaagaagcactggtgtctggagcagggcttccctctaggtgtgccagggcacacacacaggtgggtgggaatcagttgcaggcatgctgtccaagctgttttccttggccctcttgacagcaggtggggcatggaccacctcctggttgcctctgtagagagtggctcctcctttttttttttttaattttttattatactttaagttctagggtacatgtgcacaacgtgcaggtttgttacttatgtatacatgtgccatgttggtgtgctgcacccattaactcgtcatttacattaggtatatctcctaatgctatccatgccccctccccccaccccacgacaggccccggtgtgtgatgttccccaccctgtatccaagtgttctcattgttcaattcccacctatgagtgagaacgtgtggtgtttggttttctgtccttgagatagtttgctcagaatgatggtttccagcttcatccatgtccctacaaaggacatgaactcatcattttttatggctgcatagtattccatggtgtatatgtgccacattttcttaatccagtctatcattgttggacatttgggttggttccaagtctttgctattgtgaatagtgccacaataaacatatgtgtgcatgtgtctttatagcagcatgatttataatcctttgggtatatacccagtaatgggatggctgggtcaaatggtatttctagttctagatccctgaggaatcaccacactgacttccacaatggttgaactagtttacagtcccaccaacaatgtaaaagtgttcctatttctccacatcctctccagcacctgttgtttcctgactttttaatgatcaccattctaagtggtgtgagatggtgtctcattgtggttttgatttgcatttctctgatgaccagtgatgatgagcattttttcatgtgtctgttggctgcataaatgtcttcttttgagaagtgtctgttcatatcctttgcccactttttgatggggttgtttgattttttcttgtaaatttgtttaagttctttgtagattctggatattagccctttgtcagatgggtagattgtaaaatttctctcccattctgtaggttgcctgttcactctgatgctagtttcttttgctggcagaagctctttaatttaattagatctcatttgttaattttggcttttgttgctattgcttttggtgttttagacatgaagtccttgcccatgcctatggcctgaatggtattccctaggttttcttctagggtttttatggttttagatctaacatttaagtctttaatccatcttgaattaatttttgcataaggtgtaaggaagggatccagtttcaactttctacatatggctagccagttttcccagcaccatttattaaatagggaatcctttccctatttcttgtttttgtcaggtttgtcaaagatgagatggttgtagatgtgtggtattatttctgagggctctgttctgttccattgttctacatttctgttttggtaccagtaccatgctgttttggttactgtagccttgtagtacagtttgaagtcaggtagtgtgctcctcttaacctcagcatacctgacagaagaaagcttaggcccctgtcgaggtggcagttctctgaggtaaatgctctctgtgcaaagacctccatttctatttaaaaagatgtttgtatgttgtccaaaaatagacacagttgtgccaaatgtgttccacaaactagtgaaccacttctattccaaagcatctctggactttcacagcttgcaaaaggatattgataagctttttcaaaaccaggatcttgatgatcatgatgattgtttcagtgatacctaggaaacattcccgccttttacaaggatgcctctctcttaaataggtgctcttgccaccttatcgccccaggaaaattcacagggcaggttaagaaaccttcaactagctatttcctcaattgtaaacatttctactcacaggtctcagagcacttcaaactcagtgtgtccaaaacagagctaccatctgctccagatctgctttatttctggtattcttagctccttgaatggcaccatcatataataaattggacaagccagaagctggaagtcaatttgtcctttccctctctgtcatgttccatatctaacttaacatcaagctctgtccattttacttcctgacttcctctgtaacccatttcttcccgtgtttaccatcacctggtctcagctacccctgtctccctcctgactggcctcccacttccactcttgcccctccactcaattcttctctgttctgcagcccaagtgaccctctcaaaatgtaaatctgatcatgtcactctcctccttagtgctccctagtgactctccagagcttttggaatgaaaagcaaaattcctgtcatggtccacaaagccctgcctagtctggctcctgccaacctatttccccacaatccagccacgttggctctctcctcctgtgtttcctgccaccacgtggcctttgcacttgcggtttcctcttactggaatttcctcccgccctccctgcttgcttcagtctggttaactcctacatatttatcctctatatctctgcttgcccgactcctttttggaggagcttttcctgatcctctaggtcaaggggagctcccaacatctccccattagtgccatgctcctttccttccttgcatttgtcagttttaatttccactcctatgagtgatcactgggttaatgctttctcccgccacccacccgtctacaatctccatgaggttagaatctgtttctcatttgttcatccttgtgtccccagtgcccagcctatttcctgaacatagtagaggttcaaaacatatttggaaaatacatgaatactcacattttgcttttcagacttttcctcctagaatatcattcacctgattcgggtgtggggtgtggtctctgtcaaagatgcactaatgattgttccttgcccgtacaattctcacagtgacctccacgcttacttagccttgatttccttgacctgttttgatggttctttctcaggagagcctgcaggaacttctgaggatggggctttggggatgtgaggacaatggaaaacagcttgtcagggagatactgatgcactgccagccttgctgagacagggcaggaggaaccgcctctaaatctcaggatagttcacctggaatgtgggaagacattctcagaaagggttcttcccggggccctcctcttcatcctttcttgcctccctcccttcctccccatacccctcaggcttttatagatgcatatttacagaggacagggctacctttttttgcatattgattcttttgaaagggcagacctttagaactaaagaaatgaccacaccgctgttagctttctgcaaaacagcatagcactttcccggtgtgtgtttattacctaccccatgagctaaacatgaggcaaagtagtaattggctgggtctctggtgagtccatttccctgcgttgccccgaggtgtatgcaggctttacacagctaccttggcaactgacttccccaatgtttgctgtgtgtccaaggacaagcagggatctatgacactgggtgtttctagcaaatttccctctcaaattggcacattctctgtgagctttggagacttcacagtgtggctcacagtttgggaacaatttgcatcatcatctgactggtaagttccagttctgtggtaactcaagtgtttcaaatagcttaatacgcaatagggcacggaggttcgttctgcttctgttggaatcaaacacacatttccacaatgttcccgttatacaggatcatcccgaaacacatcccccagaacactatgttgtcactactctaccttttgatatacactttattattattcctatgtgcagataggttacttaagtttttctgttctagattagtttgtctattcaaatacatgtttctcacacacttctacagtgtttttctttttgttgttattcttaaagtgttctatgaaaacttccatgttgtatcaaggctgggtggtagctttgtaactagtttcccaccttagaatgactgtctgctttgtccaggactgcaagggggacttagaatatgggatttttcagtgctaaaactagaaaagtctgagacaaatcaggacaaagtggtcaccctgctaccatttctagccttgataaaggagcaggtagacccaaccaaggataatttttgttttctatgtagataccagtttagtggttggtaggaattcccccaaatcaacaccttgctaagctcatctctctctctctctcttttaatataacagcttattgagataaaactcacataccatacaattaatgcacccatttaaattgcgaaattcagtagtttttagtatactttcagagttgtgcaaccttcatcacaatcaattttacaacattttcataattctcaaaagaaatcctgtacccattagcagccactcccatttctctccaaatccctcagctcctggcaaccactggtctgctttcagtctctgtagctttgccttttctggacatttcatataaatggaatcatacaatatgtggccttttggttctggcttttttcatttagcctgtgtctagaaggtccatccatgttgtagcatgtgtcagaatttcatttctttttgttgccaaataatattccattatatgtatatatcacattttatttacctattcagaagttgacggttgcattgtttgcaccttttagctgtttataaacattcattacaagtttttgtatgtatatatgttttcatttctcttgggtatatacctagacagatttcctgggtcatgtggtaactctatatttaaccttttaaggaactgccagactgttttccaaagtaactggactattttacattgtcagcagcagtgtatgtaggttccagtttctgcaaatccttgccaacacttggtattatctgtcttttttattatagccgtcatagtgatgtgaagtggtatctcatggttttgatttgcatttctctgatgactgacaatgttgagcatcttttcatctgctaattgctaagctccttaaatggaaaattataggaagcataaagcatgtttgcaaagaagtgattatattcgctaggattaagattttaagtgaatatttaagatgcccatgactagtgtccactctctcgaatcaagttttatttaaaccattgacttttcctcataactggaaatggtcccagtgaaagtctccctcacttgctggaatgtggggccatctctgctgtctgtcaagccttgatgcccaagtggccattttctcctggagtctgcatcagatggtagagtgtgtgtttcctgagtgtgagactggatctgctccacaatgctttgctggttaactccttccaagagtgcaatacccaggggtcactcctactcttagtgctctggggcctgggcccttaacacactcaatgtttcttccccttttctcacttatctgatcttctgctacttctttctcctttgtccgcccctgctctctggtttctcttgtaccctctgtttatttaattttgatcatttgtttgtttgttcctttcttcctcctttaacaaattcaaataggatacaagccactctgtcccatctcctgcccttgccttctcttctttcattcttttattaactgatttttctcttgagaaatcaccactgggtcaggtgtggtggtggctcatgcctgcaattccagcagtttgagaggctgaggcaggaggatcacttgaggccagaagttcgagaccagcctgggcaacatagggagaccctgtctctataaaacataaaaaaattagcctggtatggtggtgcaagcctgtaatcccagtgctttgggaggctgaggtggggaggatcccttgagcccaggagtttgaggctgcagtgagctgtgatggcgccactgcgctccatcctgtgcaacagaacaggaccctgtctctagaaacaaaacaaaacaaaaaacccaaaacatgccattgatttggcagaaaaggacagggttcctggcaaggctaccaaaaacatgatctctgtcagaaaacatactatctgcaatatttgttggaatctgagaatgggaaatgtagctttcttctctccaggagtgccctgttcacagctgtgggataatgatcaatagttcctaaaaatatctatggaagacctcaccactcttattgatcagcaactactgcaaagataatgtttcagcatttgaaaccccttattattaatacttattctgtatgggtcaagtagccgctaacttacagtttggcagatggatcaagtataataataataacctataaatactaataaatgagccagtatagtataagtgagtactatactaagcagtgaaggaagaataatttcatggagggaagtccatggtagaagcaggctgctaggtattattatcgttttcacatactattcactttatgaagagatttaacatagctcagggtaatatggtctcattcaaatgccaaaatgacccctcagttcttctttctctcctttcccgatagaggtggccctaaggacacacatctgggacaatacggccatttttagccttgacccaagagatctgggttccccatgactggagtggaaaacaatgtctgtgggtttgtgtttttcagagtcaagggtccagagaaggaggagaagttgagacaggcggtcaagcaggtgctgaagtgtgatgtgactcagagccagccactgggggccgtccccttacccccggctgactgcgtgctcagcacactgtgtctggatgccgcctgcccagacctccccacctactgcagggcgctcaggaacctcggcagcctactgaagccagggggcttcctggtgatcatggatgcgctcaagagcagctactacatgattggtgagcagaagttctccagcctccccctgggccgggaggcagtagaggctgctgtgaaagaggctggctacacaatcgaatggtttgaggtgatctcgcaaagttattcttccaccatggccaacaacgaaggacttttctccctggtggcgaggaagctgagcagacccctgtgatgcctgtgacctcaattaaagcaattcctttgacctgtccagttgactttagtccttgtttctaactgccaagtcatgtgctgagtagaggctcagtggttggggcccaatggttcatctaggacgggactagagaggtcagtctacaagcaatccattgaccacttacttggtgctgcacacaaatgttggtgctatgggacccaaagatgagcaattagtattccagtcttcattgcctgtgcttacaaaagaagacctcacttccctaaacatctagttatggcggctcaagcccgtacctgcctacagagaagtgtctgcagttactcactattagtttcctaagggggcactgctggctccttctctcccaggaatgggcttctcctattctttaactcttgccttctccctggagaggctaccaaaccctggcctctgccgctgttcaggctgccatgtgggtatagctgtttgctagactccactctggcctcaggggccagagaacagctgtccagcatttctgttcatcccagcaatccaaaaaaaaatttttttaagctacaaagatcactccattttcaaattcagactctgccacttattagctgtttctcattaggcaagttatataaccttgcagtgcctcactttcctcatctataaaatgagattaaaatagtctttttattaagagaattaaagtgaattgtggccaggcactgtggctcatgcctgtaatcccagcgctttgggaggctgaggcagacagattgcttgagctcagaagttcgagactggcctggggaacatgcaaaaaccctgtctgtattaaaaatacaaaaaaattagctaggtgtggcggcatatgcctgtggtcccagctactcaggaggctgaagtgggaggatggcttgagcccgggaggcggaggttgcaatgaactgagatcgcaccactgtgttccagacagagtgcgatgctgtctcgaaaaaagtaaaataataaataaataataaataaaataaaataaagtgaattgttacatgtaaa

SEQ ID NO: 3159 - DNA, 861 bp, Homo sapiens
gacctagaatattgcatggtgcttgataaacattcagtaaatgttagttacaatcattattattatacgcatcatcgttaatattagttgccaaagcagctgagaaaagatggcttattctccaatcaggagagaggattcctgttctcggctacaggcactggactctttactggcattgcctttgagagaggctgtgatacaactcagtttctataccacatgctgccaattcctttttgatttaagaaatctctagcaaacatttagcactctccaagcatctttctttcatgcaccaggcacaagaatgaaaatgaaatcccagtgtcagctgactcaacagccctcatcttcatagtcccagaaacaccctaagtgctcccaggtccttccaagggcagtagtgtacctgcaccagcagtccctacccagaatctccctgttgaggctctcctgctcaggctgtgatgctggggcccctgagcccagcctgaggatgctggaaagggaccaatatgccctcttttgagaaggatactgcccatgcctaacactctgctttagatgcctcagagccatcctggtttcctcccagagtggtaagaaacacttttcatttattccagggattggtaaacttttcctgtcaaggcccagatagcaaatatttctggctttgtgggttatacagtcttaattgcagctactcaactctgcagttgtagcagaagcagctatagacagtatgtaacaaatgtgcgtgtttgtgttccaataaaactttatttataaaaacagatggatggatagattaggcccaagggttgtagtttgtagacccctgatctagacccttaa

SEQ ID NO: 3160 - DNA, 106 bp, Homo sapiens
tttttagtagagacggggtttcaccatgttagccaggatggtctcgatctcctgacctcgtgatctgcccgccttagcctcccaaagtgctgggattacaggcatg

SEQ ID NO: 3161 - DNA, 294 bp, Homo sapiens
tgaaaaatactttatatttgtttatatttttctatttagataaactcagcttttttgactggaacggttttctcataacttgccttgtgtttatagctcattcaaacaataaggtagtcaagccatatttatcaggtttcagatcagtcatgcacattaattccattatttgtgctgaacttttcaatttataaattgaatatgacttttttaaaattcttgaataatgtacccttttaacatcagccaacaacaacaaaaaggcttactgaacttgagagcttttggtttaaa

SEQ ID NO: 3162 - DNA, 313 bp, Homo sapiens
aaaagctttctgaaagcatgaaaaatcactttatatttgtttatatttttctatttagataaactcagcttttttgactggaacggttttctcataacttgccttgtgtttatagctcattcaaacaataaggtagtcaagccatatttatcaggtttcagatcagtcatgcacattaattccattatttgtgctgaacttttcaatttataaattgaatatgacttttttaaaattcttgaataatgtacccttttaacatcagccaacaacaacaaaaaggcttactgaacttgagagcttttggtttaaa

SEQ ID NO: 3163 - DNA, 313 bp, Homo sapiens; identical to SEQ ID NO: 3162

SEQ ID NO: 3164 - DNA, 170 bp, Homo sapiens
tacaaaaaattagccgggtgtggtggcgggcacctgtagtcccagctactcaggaggctgaggcaggagaatggcatgaacccgggagctggagcttgcagtgagctgagatcgtgccactgcattccaacctgggtgacagagcgagactccatctcaaaaaaaaaaaa

SEQ ID NO: 3165 - DNA, 347 bp, Homo sapiens
gggattaaaccctaattgtaagtagtttaagagagaattgaaattttatagaactggtctaacaatatttttattaggcctgttctaatatttttactaacttattagtaaatgagagagaatggaaggagagttggagaagggaactatacaactctttagaggaggtttgtttggagaggaacagaaaaatgaagtagtggctctagagttatatggacttcagaggatttataagattcataagagaaattatatctattttatatgcagatggaaacgatccactagatgaggaaaaataataacagagattattgtgtgctaggcaacgccaaggcactagg

SEQ ID NO: 3166 - DNA, 272 bp, Homo sapiens
gtggccaggagttcaagaccagcctagtcaacatgatgaaaccccctctctactaaaaatacaaaaactagctgggcttggtggcaggcgcctgtaatcacagttactcgggaggctgaggcaggagcatcgcttgaacctgggaggtggaggttgcggtaagccgagatggcgccactgcactccagcctgggtgacagagcgagactccacctcaacaacaaaaaaagaagtgagtagagatagagaagaatagaggtctaagaactacg

SEQ ID NO: 3167 - DNA, 443 bp, Homo sapiens
agaagagattccttcatgagtgtagaagttggactgatttctaaagtccctttctatttttagattctcttctgcacagttatgacctacacataatgcactgaatctgttcccttgatagtttctgcataggctttggttgtgccacaagtgtggcctgcagtgaatgacctggtctaactctgtcattggtcctaggactgaactgtccaggaatatgcctaatcctgagggaaagcatcaatatggctgttggttatagagagaaagatggcttagactcaagatctcaaatccttgtccagctgcatcttgctgccgtgggttttcaagatccacatacagaggggataacttgacaaattactctataactctaaggctttttttgcttctgaagtcccatgtggaagccttgtcacttgtaagctggactagactgg

SEQ ID NO: 3168 - DNA, 590 bp, Homo sapiens
gggtacatgtggacacaggattccaaagtgagaagggtggtgtattagtccattctcatgctgctacaaagaaatacccgagactgggtaatctataaagaaaaggggtttaaatgactcgcagttctgcatggctggggaggaggcctcaggaaactcacaagcatggctgaaggcgaaacagaagcaagcaccttcttcacaaggcagcaggagagagagtgccaacaggggaaatggcagatgcttataaaaccatcagatctcatgagaacttactatcatgagaacagcatgggggaaactgcccccatgattcaattacccccacctggttccttcctcaacacctggggattatggggattacaattcaagatgagatttgggcggggacagaaagcctaatcatatcagatgggaaggacatgagggttgacaaaatatgtattgggtacaatgttcactgtttgagtgatgggtccactagaagcccaaacttcaccattatgcaatgtaccatatatacgcaatgtaacaaacctgtacatgtaccccttcaatctgaaataaaagttgttttttttttt

SEQ ID NO: 3169 - DNA, 357 bp, Homo sapiens
gcttccccctgtgtaaccagggaagctaagcatgtttctttcacttcacccatcttcctacattttttccttcctagtgtgagaaacaactctccaagttccatttccaaggaaagtcttaaccatttgtcccttctggcgtaccctctttcattgaaatccatgcagaatataccaggtactctgtctttgtgtgtgtgtgaagccataaaatctaatgttacgtgtgcggtggtgctgtgaggtatgcttctcgtgcaagcggctccctcagccctgctgtggtaaagaccaagtataaattgtcgctaacagggttttctcattagagtcgtgtgcctgagtgtcccctgtgaa

SEQ ID NO: 3170 - DNA, 357 bp, Homo sapiens
gcttccctctgtgtaaccagggaagctaagcatgtttctttcacttcacccatcttcatacattttttccttcctagtttcagaaacaactctccaagttccatttccaaggaaagtcttaaccatttgtcccttctggcgtaccctctttcattgaaatccatgcagaatataccaggtactctgtctttgtgtgtgtgtgaagccataaaatctaatgttacgtgtgcggtggtgctgtgaggtatgcttctcgtgcaagcggctccctcagccctgctgtggtaaagaccaagtataaattgtcgctaacagggttttctcattagagtcgtgtgcctgagtgtcccctgtgaa

SEQ ID NO: 3171 - DNA, 32185 bp, Homo sapiens
cacgcctgtagtgccagctacttgggaggctgaggcaagaggattgcttgaacccgggaggcggaggctgcagtgagccgagaatgtgccactgcactccagcctggatgacagagcgagaccgtagctcaaaacataataataatttgagatgtgtcttttcaggttttttttaacgtatatatgatatatatgatgacattttgaagtgttctgtgttacactgtcaccagaggttttgtcatgcctgggagattatgaataatgcctcatttgcagatttgggtcagatgagggctgagtgagagtggttttagcctgatcggtgagttttcatagtccctggtggctgtgtgtcacccttcttcatctgaaggtcaccggtggtgccattgtctttccctgctccccgtccccagccagctccacttcctgaattttccccctgtttgatggtcctactgttgttatggtgacctgactttggttaataaacatgtaatcataagtatatgaggccctcctcttcctggctgcatgctaggcagtggggatacagaggaattaaacactgtcccttccttcaaggagggctgtggtctttgcccccaccttcttcagtcatttggtaggactagaaccagttctgcctcgatgacttcattccctcactctgttacacacctcacctcctcttccttgctctccctgctctccctgtctctgttgtaggcctttctcaccctgccccgggctgttccagcagcctctttcagccctcttgctctagcctccagtttgttcttcacatcacagtcagttccgtggcccccaggcacagctccagtcacacccagtccctccccatcacctaggccagtggttcgcagcatacactgcagaccatgggggtccccaaaactcctttaggaatctgcacagttaaaatgatttttgtaatcgtactaagatgctgtctgttgctggaaagcaacaatgagtaagactgttggtgccttggtcaaggtggtgatgctgaactgtgccagtagccactatattctccactgctatgtactcccaggtttttgtttttgtttttattttgagatagagtctcactttgtcacccaggctggactacaacagcatgacctcggctcactgcaacctccgcctcccgggttcaagtgattctcctgcttcagtctcctgagtaactgagattagagacacctgccaccacaaccagctaatttttgtatttttaatagagacagagttttgccatgttggccaggctgggctcgaactcctgaactcaggtggtctgcccacctcagcctcgcaaagtgctgggattacaggcatgagccatcacacccagcttttttttaatgccattttcacacaagaatgtctttgatgaagtagcaaaaattgtcagttttattgaattccaaccctgagtacggatctctttaatattctgtgtaacaaaatagaaatgctcataaagtacttctgcggcaaaccaaagtatagcacctgactcaaggaaaagcaaggaaaagcacatgtgggatcccttgaatggcaagtgaaactagccactagtttcatttttacatgaaacaatggctgtgttgggtgctgaggctggaaggtagacaggggcttggggttggagagcctcgtgggctgcgtttgtgcttgggggccttgagcgcagcccacctttgtcagctttctacacgctgctccccactcccatccagccctttcctcctgcttgctctttcttcagcacacacttcattctccccttccatgtccttcctcttgttccttccaccaggagatgcagtgacagctctgaaggctgcctgtgatcccagaatcagaacagaggtagaagatggactggagttgtgaccttttgtctctaggactctcaggcccccagtcctgtctgaggcctgtgggggatcctttgctggcaccctagcaggcctcacctgccagtttcattgcagcggagtgaaatgctgccacctgcatgctgcagcccagcctcccctcacaccagactcttggggaaagaataccttagccccttgcagtatcgctatggacagacggtcctttgattgagctgactttacaagtggctcctttcatccatcatgtgttaaatctgactagtgtctgtttgagtgtaccctttccttggtgccagcataatcatgatgcccacaaaccaaatcttcccacttatgggtcagacagaagaacgtagcctgtccctgacccaggaactgccatgaaataatgtaggtggactttggttggtagctcatctttcataagatgacaaaacacaaaattcaaggcaagctcagagcaaaaagaagaaacttctgataaatgaagtttttgattaataggacgatgataatgtggtaataatgccttcatatttccagaagctagggcagtgctgcccaaccttttcacatcatagcacacgctgaaaatgatactgttctgcacacctaagtaacagtgagtgactggaggcctgatgaggggatcaatacctcattcacagcacatcagcagggaagctctgtgctaaggtttataaacaaaagcattctcattggtgcctggctacttttactagctaccccttctgcctttcagcattaaggtttaaatacagtgtaatggttaaaagcttgaattctgagccagaccatctagatgtagatctcagctctgccacttacaagctatgcgaccttgagcaaatcatttaatctctttgtacttcagtttcttcatctgtaaaatctggatacttagctcataaagtagtgatgattaaataagttagtatatgtaaagtgtagcgttggtaaagtgcttagaatgctgcctggcctacagtaagcagcatgtgtgtgtgtgagtaatgtcactactaggagtagtcatgtggactctaatactgctccggctactacttcaaagatgtaaatgttctggggtcagtctccccaggtaccccctcattgcctcctctgtcacatttcttagtcttggccacttccttaagagtgcccatgacacttcctttcagtccctcagttcctgatcattttctccgttctccatttgttttggaatgctcagctagctgatgcccgagaaggcagctgggttggtaattacacttctctgcttgctctcaccactatttcttctcaagaaagctcttgtggctgagggaaatcgctcttaaaggttggggagaccttgaaaagaattctgaagtggttgggagaggagtgtgagctaagtttgcagagctgagctagccagcaaagtcgggttctcagtggggagaggatcatctctggtttcatgcacagatatgaaagctgatgagttctctgcaggctcttcaaaatttggagtacagatctggttcctttggggacaatgtggctcataagactatggagaagtaacacagttcttccagagggtgggcctcgaggtcactttctggagcagaatggtggatggatgcttgcatgtcaggaatctctgtgctgcagtagtccttctagggagcctccataacccttcctcatctgctctatgagttctctataaatctcccctgcaggaaccaggatgattcctggatctgtatccttcacacttactataccttcagtaccatcagtgctcgttcactcacaggttttacaaagagacgaaacatgcattcctattttaatggagaaaacaagataaacgtatgcctaggaatggagacatttattatcatcgatgacgatgagactgcttgtgagctaatgtcatccctcctcccatgtgctctgtgcccctgccagcctgagtgatcaccagtggcccccaccggccctgtgtccctcctccaggcctcagcctgtgcccttccttggtctgggacactctcttccaggcctcagccctgtcccactcatccctcaggtattgaggcttagctgtgtcttcctctagttacccaactgggttagcttcctctctcctgctccacagcacctggtacctccctgtcccagcacttgtcctactatgttgaaattgttttaagcgtcagcagcagatttaaacgccatcagggaagagactgtgtcttctcttatactctcactgtctagcaccagacgatcagtaggtgcccaataaatatagcattattgaagagtaagtcagtggtgctttcacttctagtctcttatttgatcctcacagcagccttgtggcatgggcagcccaggccttctgcttacctcatttcatatacaaggaaactgatcctcagagaagctaagcagcttgctgcagttcgtgcagtggaggagagccatagctctcaggctccaatgttcagcacattttttcatttgtttttataaaatatttacttttaagaagtagcttttttttttttttttttgagacggagtctcgctctgtcgcccaggctggagtgcagtggcgcgatctcggctcactgcaggctccgccccccggggtttacgccattctcctgcctcagcctcccgaatagctgggactacaggcgcccgccacctcgcccggctaattttttgtatttttagtagagatggggtttcaccgtgttagccaagatggtctcgatctcctgacctcgtgatccgcccgcctcggcctcccaaagtgctgggattacaggcgtgagccaccacgcccggccaagaagtagcattttttaaaaaataaaaataacattggttgttttgaatgattgcgaaattagtatcttcatggcaccaatattcctaaaatgtttctttcatcactgaatgttgaattttaatacagagaaatctagaaacatttttaaaaactaaaatcagataccaaattccaatgtgtattagagaaagattatggtgtactttatttaaaaataaaacgtgagttaaacaataatagcaggaaaaataaatttctttgtgtacgatttagagaatactgtaaatataaaaaagaaaataaaaatcaccccatcacatagagaaaactcttatggattagaaatggtctggacttgaaagagcagcattgagtttgaatcccagttaaaccactaactagatgtttggcattgggtaggttatttaatctactggctgcctgctctgagcttctttccttacctgaaatatggcaaaaatatttaccttttgagattatgataagaattagagataatatgtacagaatatccatgtagttggcactttttaaaattgtagcgtattagcagttttacgtatttctgtctagtctttctactctgttgggttcatatatgggcatacatacctgtgcatatgcatatgtttttggaaacatatttatgtgaagtatatcattgggtattttttgttttttttttgagacggagtttcactcttgttgcgcaggctggagtgcaatggtgcgatctcagttcaccgcaacctccgcctccggggttcaagcaattctcctgcctcagcctcccgagtagctgggattacaggcatgcaccaccatgcctggctaattttgtacttttagtagagacgaggtttctccatgttggtcaggctggtctcaaactcccaacctcaggtgatctgcctgcctcggcctcccaaagtgctgggattacaggtgtgagccaccacacctggccatcattgggtctttacaacaacctgtgaggtagacagggcgggtgtgtttttaaacctatttgatagatgaggaaactgagactctaagaggcacagtaacttggccttggttctgttataatatctgaaccagggcttctgccttgctcgcctgatgccaagcctgtgtgccttccctgtcagcaagcagcatgctgcttcttcagttccacttccacctccactaatagacacatgtggtggaccgccgagccgttcccaagaggaaggcaagggctggaggcagcggaagtgctgggagcctccagaccagctgggatctgcctgaaactgaaaagaagtgctcacttcttcctctgtaataacagacacattgcccaatcctatagcaagaaccaggcttctgtttagaaagtgaaggacctggctgggcgcagtggttcacgtctgtaatcccagcactttgggaggccaaggcaggcggatcacctgaggtcaggagtttgagaccagcctggccaacatggcgaaaccccgtctctactaaaaaaaacaaaaaattagccggacatggtggcatgtgcctgtagtcccagctactctggaggctgaggcaggagaatcgcttgaacccgggaggcagaggttgtactgagctgcactccactgcattccagcttgggtgacagagcaagactccatctcaaaaagaaaagaaaagataagaaagtgaagtacgttttgtgtcctagaccctttttcgaaagggagtttatccaggaattagtagaattcctgaactggattcataaaactaagtagccttactctgcattgtctacagggcaaagttgtacccatgtttctttcaggatgtgcactgggtacctaaaaggccagtgtgacataccccacacctaacagtatgcatgtcatttcatatcatttctatttcagtgcaatttctgatggctgctatgtgtctgacactgtgccatgatctgtaggagaaacaagtgaacaggggacaatctcagcctttaggaacacaggggagcactcaaggccaaataaaatcagtgccctcgtggagcttctcgcagggtgtttgggagcagaggatggagcaccaactactagttctgctcagtaacaccctccatttgcatagcacctaactgacttccagagtctctgtagaaaccttaactcatctggagttatcagggagctgcaaaagggttgggactatcgagccggcttttgatgaccaagaagaattcctaggccaagggaagcaggtgagccaaggtgcagctttactgcgggggtcccactccctgaggcagcatttatcccatgagtgtttgcatgatgaattaaggccccacagacctgctagtggactctgtgatgaaaatagtgtgtggccaggctccacatgggcaactagcgaccccttggtgagattatgacacctctcgcttccccctgtgtaaccagggaagctaagcatgtttctttcacttcacccatcttcctacattttttccttcctagtttcagaaacaactctccaagttccatttccaaggaaagtcttaaccatttgtcccttctggcgtaccctctttcattgaaatccatgcagaatataccaggtactctgtctttgtgtgtgtgtgaagccataaaatctaatgttacgtgtgcggtggtgctgtgaggtatgcttctcgtgcaagcggctccctcagccctgctgtggtaaagaccaagtataaattgtcgctaacagggttttctcattagagtcgtgtgcctgagtgtcccctgtgaattataatgcctccagccctcttgctgctcctctgctctgcctgtcttttggctgttttgcttgtcctggggccctccatcaaagtgtggacaggggaaggagaaagagctgaaacccaaatctgtttcctctgcactgggcctgcggtgccgatgagaaaatagatgcagacacgggttgccactggactgcattcaaggtcagcgcaagagagagagacaatggttcctccttctcagcctgctgccccgatggccagcaccccctccctgagctcctgaagatgagtgaccctgtgttttatttctgctgaatttctcaccatgttatacatttgggcagcttttttccttttaatttaccttggtgagggtgggtgttgaggtgctgatttttttttttttttttttttttttttgagacggaatcttgctctgtcacccaggctggagtgcaatggcgtgatctcggctcactgcaacctctgcctcccaggttcaagcgattctcctgcctcagcctcccgagtagctggcactacaggcacccgccaccacacccagctaatttttgtatttttagtagagacaggtttcaccatgttggccacgatggtctcgaacttctgacctcaagtgatctgcctacctcggcatcccaaagcgctgggattacaggcgtgagccatggtgcctagccagatgtttaattctttcaattcatagggtgttgcagtccccagatatatcttgtgtttgaagctcttggctagagttatattttgagatgctctgtggatttcttttatctgtgtgtttatctgttccccattctaaactataatttaaaatgtgctgtcatcagatccccaaaatggatggaagaatgcgcctaaattgagctgtcaggcacttggctgcgtaaccatgctttctggattgtggtgttgaaagtgccatcctgtgtgctctctccggatggctgtcacgtacttgcgtctgagaacagtgtatggacctgcatgagcactaatcagtcttcctagcagacttgctctttctctggtcgtatgccgccagatcctctgagaagagagtgggcctttcccctcaatgggcaaagaaccagcttccattttaaaagctctcagaaaaaaaagaaagaaaaaaaaaaaaaaacaccaacaaccaagagcctgtgtttattgaaggttggtctaaaagtctctcacatcgtatgccccatcagcactcgagtgcctctattttagaaggatgtaaaggtttaatcacgctggtggggatttagacccagagacttcggagaaatcttattatttctaactgcaggcaaagagtattaaagctccactctggatcaggggcatgacatgttctataagtaatttatctttaacagggaaaggcccatactagagtgtcttagaaacaggactgtgattgggcactggttcactgttcctccttttctctttcctatctcagtgtcctgcttattctttccatccggactttttctgcccaatctgtgcagtgtctgaatgcctgcctcacaaatcctccttttaagattgggagccaggtgcttgccaatgaaagataataaggttttttgcaataagtgacctcatccagcagcctggcacagacctgtcaactgccgacttctgaatgggcactacctgcagcccttccgatggaggagctatgggaggagaggatgccgtaggctccataggcactcaagtccgtgctcttggacatgaagtaatttggggctattttgaaccccagccctattgctaccttcacagaggctgtctccactccaggccatttgtgccctgtgtgcatccatagcgatgttgctgagcctatgactcatctgcatggtcccccactcccaacccccttcttgcctagctctctcggttttgcctttctgatgctgaggctggaggatgtcacaggtggggttctgcctatggagtcattgttctgtttggggaatatggtttgaccagtggcagatctaaatccacgcgctaatgagcttggttaaagcaggcttccgctggcctcttttaatctagcctgcctgtctgagctcctttccacagttaatgatctcccataatggctttgcctttagtttttcctcctaggtcaaaacaaatcaatagtcttcacagatatttaaaaaccatcagtgtaaacctcctgggtcctcccccactaccttttttttttccttctgggtaaatttacagcttgatcagtacagtgatgtttcccttacatctcctcttatctcctagagatgggcagtagcgaaccccttcccatcgcagatggtgacaggaggaggaagaagaagcggaggggccgggccactgactccttgccaggaaagtttgaaggttggtcacacaacttccctatatctgggcctgcagcttcccaagcatgggaggagcatcccgggagccacaggtccgatcacagaatgcgtcaagttagagccagatggtggttatctgtgtggtagggagataagatggggatgagggagtttacacagggcattacagaaagagagcagggatggaaaaagctctcagatgatgcactggcctcctgtgaatggctcaggtactgcttccttttcagggagcaggaagacccatctatcagtggcattgcctggggtcttccttttttcagatgtgattcttccctcagctattcctggaggggctgctgagagatagaactatataagaggaagagagaaacaccaaaggccatggccgcaaatgaaacttcagtctcctgtaagcagagaatttgtctctcagattgtagctacttatgctgtgtgtgtttgactacattttaaagaatacgtgttgtgttcagtagaaacgatgttgggtcatcagacattttttgacactctctgtgtgcgaggcactaggctcagtgtgggtcctgttatcactgggcatgtgatggggtgattggacacttgtgcaaagcaccaagaggatcagtagctactcctaggagtaacgtgccccacttcatctgttttgttttctttcgttgtgaggtctgaagtagcttcgcctcttggtccctccttccagccttccagacacactagtgaattggctgttctgtaaagtggttccaataacaagcactttatcggttgggaatatgggacctccagccacccacctatcctgatatgtgtaaagggctaatgccaatgtgtccattgtgagaagcatgtcatttaaaacacttacgaataacagtgtgccatctgctcttataaacaactgaaagaccaaaccgtgatggaaccaagaaggtactttcagcaggggttttttgtttgcctttaactcaaacagcaggggtgtgtgtctgtgtgtgtgtgtctgtgtgtgtcagggtatggggatgggggagagacaaagatcccaaggtattcaaatagtttcctaatcaacagctcttttgctctttcagttaacacaagagagtacttcctatttttaaggacagcttgtgcaatgacaggacttctcctgactgagagtgataaaatctaattcatggttgaaatgtcttctgctcaggctgtgggtttcaatgctaggtgcctcaagaggaaaaggctgaagaatggaggccgagtggggatgaggtcaggcagctagtgctgtgatggagatgtagcctcctttggaaggggctcaaagagctgtgctctttgtgagcttgggcaggtcatctagatgttcctttaacccaggtctattactctgttagaacaactatgactcagtaccctaaaaacctcaaggtgtcctttgcatcctacttctatttcctgtgggtgacttctggagacttctcagaagcctccaatgacttccatgtatggggtataaaatagaacagtgttttattctcctttgtatagccagtgcttacacagaacttggcacataataggtgctcagtaaatgagtaaatgaatattcattcaaatcataccacttctcctctgatgatcctccagattctctgaccaattttttttttttttttttttttttttttttgatatggggtctcactctgtcaccaggctggagtgcagtggcacgatcttggctcactacaacctccgcctctcgggttcaagcgattctcctgcctcagcccccgaaatagctgggactttaggcgcgtgccaccacacccagctaatttttgtatttttagtagagacggggtttcccacattggccaggatggtctcgatttcttcacctcttgatctgcccacctcggcctcccaaagtgccgggactacaggtgtgagccaccatgcccagcctttctgaacagatttaaccctttcttcccccaacttttttttttaactgtactttgtccctctgtgatagtatttaccaatgcctggtttattctggggtcacctgtgtatgtgtctgtcttccccactggactgcgacccttagaggagagggatcatgcgtatatatattttagagatggggtcttgctatgttggccagattggttctgaactcctggcctcaagcaatcctcctggcttggcctcccaaagtgctaggattacaggtgtaagcccctgcacctggcctttattttattccttactctgttatgctgtctggcacatagtagatattcaggaagtatgtgccgaattgagacccttttgctaacctcatcgctaaaatgaggaacaggatgccttgtatgtggtcttgttgttgagaaactgggtcctcaggtggctgggaaagctacttgtcttccttgtcactgagtgctagagtcattgggtgcctgtgtcgtctgatcagggaagctgagccacaaaagttcttcccatctgagcttgcagtagggtgactcatcttgttattcctctcatccatttcacctctagatatgtacaagctgacctctgaattgcttggagagggagcctatgccaaagttcaaggtgccgtgagcctacagaatggcaaagagtatgccgtcaaagtgagtgtctcagctgaatgccaggctttactttgcaaatagtcattcctagctcatcttgaaccaaataaatgttatattccataagaatggggactctgaagctgtattcactggattcaaatcttggtttctctacttactgtgtacctcgggcaagttacttaacttctctgtccttcagttttctcatctgtaaaatgggtataatactagaacctatgtagaattgttgtgaggattaaataagttaatataggtaaagtgcttagcacaatgcctggctcatagtaagtttctcattattctgacaaatgaagtcagcttcagggagtggacaaccagatttggaattagaaggcctacctgaatatctattttgacaaactataactgtttgactttgggcaagtcatcaaatgtccgtaagcctcagttcctacatctctaaatgatgatacctgcccttcagtctcctgaggcagttatgaagatgaaaattaaaatatcctgggagaggtggaaacactttacacgtcacaaaatgctatccaagtgttagatgttagcatgatagtgaggattaaaaactaaggtgactgatttggtaacatctgaatgatgtctcagaaaaaaaaattaaaagaagaaaacaaaactaaagcgactgagcactcagttttggggcaggagaagtggcttctggcctcattgctgcctttaattagctgtaaggccttggagtggctcatgtcacccctctgtgcctccacttgccctctccacatggaagaagagctggatcttgagcagtggttctcaaaatgtgtgccctggaccagcctgagcatcgcttgggaacttgttagaaatagaagctacctggccctacctgagaagtaccaactcagaaacaggggtgggcccagcaatacaaatgttaacaaactctcctggtgactctgacactcactaatccttgaggactactgttgtaggaagggcagttgtgaatgctactatgtgttagaagcccttagagctctaacaaagcacacacagatccaggtttccagatgtaggatagggtctggatctctgtggcttgaccagattccccacttgagtctcatagccaccaaagtttgaggactaactgacctagagaaagggtctttttaaatccaagctgatttcaaatcacccacctgagccaccaggtcaaatgccacctcacattggcaatcccagcccagtgggctcctgaaggaaatgttttctcttctttgaaccaactttccacagtcccagctgcgggttagaaggttgagcaagtctgctaagccacgttcctttcagctggagtattgcttcacatggtaacaagagcactgtcttaatttcttttgggaaacagctcagtataaattacaagtgatttttaaaacatacgcctaagtgtaaatagaaaaattaggccaggcatgtggctcacacctgtaatcccagcactttgggaggctgaggcgggctgatcacctgaggtcaggaattcaagaccagcctggccaacatggtgaaacccatctctactaaaaatacaaaaatattagccgggtgtggtgcattcctgtaatcccagctacctgggaggctgaggcaggagaatcccatgaacccgggaggtagaggttgcacagtgagccgagatcacaccactgcactccagcctgggcgacagagcaagactctgtcacaaaaagaaaaaaaaaatgttagcctggtgtggtggcatgtgcgtctaattccagctacctgggaggctgaagtgggaggatcacttgagcccaggaggcaaaggttgcaatgagccaggatggtgccactgcactccaccctggacaacagagggagactctgtctcaaaaaaaaaaaaaaaaaaattgatatatctgtctaaatgcggtaaaaaccacaaacataaactgattttcaaaggtttcaatacatttatggatgagaggtatatttcttcaaggttggataatgggaggaaaacctggcccttcctccacatcccccctggcatctttgaggcaaacactggactctggcttggcaattccttggtttcagcagttctgcccatgtttcttctctcccctactctttcaaagctccctagagatgggctacttctcccaacatggccccacaatacttagcttattacagcttttcctataggcacccagctgatcctagactctcaaggttgggatggaatttcaagataaccctgaatttcctctgactccccagatagttgtccatgttctgctcccccatctctagtagcaagagcccattacttcctcagagaagactgtgctgtggaaggcttgcctgctagaaagttcttcatgactttgatctgaaatgcttggggaatgaagttgaatcacttctgttccccagcactacacctctccattcagataatgggcccactgtggtttacaaacagacacacttatttagaaaattgcagttggtcacagatgtctgtgccacatcatatcggagaagtttgaagtctcaatgaaggaagaggatgtcattgtgctgcccactgtgcacgttggagctgtaaggcagagctaggctctgcagatttgctcacaggctcggtgtgcagtggtttgaggctccagatgggtccagagagctttgcagaggcagccagtccctttggaaaccaccctcccatctgttggcttatctgttccttcagtcagcatttgacaagcatctcaggtaaaagtgtggagggggagcagcccaccgtatcacaggagagacaaagcctccaggtcctcgaagaagttagagcatctaagcaggtatgggatagcaagggcttaggagtcagctctggactgcaggcaaatgtttcatacctccctatcttttgatgttgtcataaaggtcaactgagattatgtaaataaattattattgtttatttatttatttatttatttattttttgagatggagtctctctgttacttaggctggagtgcaatggcacaatctcggctcactgcaacctccgcctccccagttcaagtgactatcctgcctcagcctcctgagtagctgggattacaagcacccactaccacgcctggctaatttttttgtattttcagtagagacggggtttcaccgtgttggccaggctggtctagaactcctgacctcaggtgatccacccacctcagcctccagaagtgctgggattacaggtgtgagtcaccacacccggccgtaaataaatcatttaacacagtatctgccagagagtaagttctcagaagaggaagagcctacttctgccagggggatcgtggaggcagcctctgagctgggtgtcaaagctttagctcctcgccacggtgtcctgcatcagcctctccctccagcatgagaagatccttcagtagatgcagtaaatgcttacccttaaggcagaaagaggtgtccacaggaggtggagctgagtaaggtagctctttgtcttgccggctgcctcagtctcccctgggcagctgggggcagcagcctcattcacttccttggtgttgtgcttggccagagtggaatgggctcagctgagctggaaagccctgaggccagtctgctgctttgccaacagagccacagtgccggtgtcaccaaggcctaggccagacttctgctggacactggatttggactgagtgtggccttgcattctcccagaggactcctgccaaagggctgtttggaagtcaggtgggtgtacatgacagattttattcttcccacagatcatcgagaaacaagcagggcacagtcggagtagggtgtttcgagaggtggagacgctgtatcagtgtcagggaaacaagtgagtatcatgtgattctcgctgcttctctggggggacgcttggccacagaagaggaggctatttcttaccatctcctgactccagcatttagctctcactcctgtccccacaaggcaggtacctccttccgcccctttcagtgttagggagagaaaggaaaagcagcagtaacagcaaaggagctattatctcttctgaaatactgtaaatatcatcaattcaagcaagttagaagaatgaactatctgaatcagtggttgttggggggaaatggggttttatttctttcggtacctgtggaaactaggttgactgagtgttgcctggtagaaatctttaaggacttgccttaataccaagatgaggagaactgttaagaatatttgctgctgtttctgctcctagaatgtttacatatgtgcagataccactaagatcctggaaccttccagatagctgggtccggctcatctctagccccagttcattctgcccaccaccagctccaaatgagcagctctcccactgtggctttaaatcaggggcacctctaagactccacttccccctctctccctccacggtagggtcagcagggagccagtggcctggtattgatggctttgtcattaagcttggaggattggaggacgggggctgctgttgatttaactccaggcactgcctccacaatcttctttcaaattaggccattttgcccatcttatttggatgccttcacactagtaaaagcctcatatctcccaaagtagtcagcattttttttatgagggacagatttttattttcagccctgcagcttcttagttcagcattagagactctacttggtttattttattttgtaaaagaaaaaaagcccacaacacctccaatatccaggctggtggcttccctactgagttacaagacgaccttgttggcagagcactgaaatactcgggcagacagagagtgctcaccggggaaggccacaagtgctacagtggccaggaacgcggccgtttcattaagcagcgcttagcagttagggtctagcggtgcccatgttaggccccaagtccatttgacagatgtttccattttctccaggcaatgtaaatactgccccgtgatttatgggcaagagggagggcaagtaattatttgctgcttgcctccaggacacacacctagtattcagtgttattagccgcaattgcttccagtcggctgcagattttattcagtttaatgtgaccgggacttttttataactctacctagtgggttttagggctggggtttgacagcacagacttggtgaaaacaccagagactaaacattatggaaagataaggtgacctgaatcttgctaacaccattggctgcttccatacgcgggtctttaataagcattctgatttcaagttggtttctgccccactaccaggtgttgtatatttttttcattgtatatttgtaagtagactttaatatataataccatttccccccttttccctctcctcctattttccctatttaaggaacattttggagctgattgagttctttgaagatgacacaaggttttacttggtctttgagaaattgcaaggaggtacttaccgttgagtatgtgtgtggacttctgattaagacccagggtggtgatcatccatcatgaatcccagagacttccaaaacgagtcaagctaataaaaaggatgaaggacttaaaaactgcccttgatttgggagaagggaggccggagggaaggatgataattagcattttgcagagcttagaatgtcacctgtgtgggtattttataaatgccttttcattataataggagtcatatatagatacatttagtcatcgatttatcaatcccgttttgacatgttcactgtttaactacattaattatggggtggaagctctcaaatacattgcgaagtctagaaaggctaaaacagaggagaggagggtcctattgtttgggacacagacccaggataaaggggaagcctgagaatgtgccatccttcagatggaaagatgccatcacccacacacataatcactggggtgtatacttaagttgcttttctgacataatgaggtggggtagagaaaccctttcccttcccatcactcccccaatcttaggacacacttgcagggatgtctggaactgcatggagggccacacggaggggcttggtggttgagggagcgtgctttagaaaccaacacagctaaagcttatgttatgtctagctgcatcacttactagccatgtgatcttgggcaagtcacttaaccttttctaaacaatattcccttctataaaatagagatattgatagcacctacctcactgggttgctgtgaagattaaatgagataattcatgtgaaatgcttaggacagtgtctggtaggcactaagggcccaataaatgttggctgctaatattattaaaacaatttggtatgctgggggatgtcttagaagtatgtagagtagaccaggtacagtggctcacgcctataatcccagcactttgggatgccaaggtgggcagatcacttgaggtcaggagttcaagaccagcctggccaacatggtgaaacccggctctactaaaaatacaaaaattagctgggtgtgctggcacatgcctgtaatcccagctactcaggaggctgaggcagaagaatcgcttgaacctgggaggcagaggttgcagtgagccgagatcgcaccactacactccagcctgggcaacagagtgagactctgtctcaaaaaaaaaaaaaaaaaagtatgtaaagcattattctctgcttttccttttaacagatttggaaacgaggctcactacagcagagcaagctaggacctagtcatgagccggttttctgggaatgttccctagcacattgggatccgttgtttaatctggcaagcgaacaatctttggcagttcttccccttctctcatgccctccccatcccccctaaaaaacagtagacatgtgccatttttaggacagagagataataccttcagcccagaaatgctggcttctagtagtaaacataaaccacatgaagccaagccacatgttcctgcctgtgtctgcccctgcaccacccaataacacatgactgactgttaattacatgtttgaaatgctacatgcagatgggatcctctgtcgccatatcagtaaacttaatgtagcttattgaggccagacccagtgtggttggctcaagagagtccatccctgcagcagtcagaccacaagtcctgctgggggatgtctgcacagactcggaggcctgactgacgccctgggcctaagtcctggcctcaccccttactggtgcgtaatcttgggcaagttgctcaaccatttttctttttggcttcaggatctccctctgtaaaacgagaataagtgtactacccattttgtccaattgtggtgagaataagacagtttatttcaagagtattccatagcacatggcactagtaactactcagtaaatgttagccattgccaacaaaacaataatgaatgggaaagctcaggcggaaaacccatttttccccccttttcccaggcctttacatgtctggcaagggtgtggcatttccatttgaaagtttgtgctcttgtttggatcagagatcagatgcaggggagaaaacgttgctgcagaaaggccccctcagctccaagtgccttcagttttattccttttgattgcagaagccaaatcagcctcagcatcattagtgttttttggccctatttatagttgttctctctcgcttctgagctcctcatagacaggtacagaagagagtagtccagttttgtttaacagacatacaagctggtacctcctccgtaccaggccccacacttggagctggacaggtagtgatgagtcagcgatgaatccctatgtccccaccccaagttttccaaacttgggaaaacttggcctctaagaagttatacggccaggcgcagtggctcacgcctgtaatcccaacagtttgggaggctgaggcaggcggatcacttggtcgggagttcgagaccagcctgaccaacatggtgaaaccccatctctactaaaaaaaaaaagtacaaaaattagctggacatggtggtgcctgcctgtaatcccagctactcaggaggctgagacaggagaatcgcttgaacccggaggcggaggttgcagtgagccgagatcgtgccactactctccagcctgggtaacagagtgagacttcgtctaaaaaaaaaacttatacttactagagcccaaaaaggcattcttctatgtcccctctgctccccaggttccatcttagcccacatccagaagcaaaagcacttcaatgagcgagaagccagccgagtggtgcgggacgttgctgctgcccttgacttcctgcataccaaaggtgaacccagcctttgccttggtgggtgggttgggctggccagcctctgggtaccaagggaggtggtaggccaggcagagggctggtgcaggagatggtgtggctggaaggcagcttgaggtgtgaacatgctcacccatgggagttgagggagaaacagtccaggatggctcctaggcttatgctgcggatggtgggtgggtggtgaagctgttgagcagcacagggatacaggagaaagagcagggaggagaaagaataaatttcacattgaacagggtatgtgtgactgtgtgtggatgatgtttcttttcttagattcttatcgtgtgaggaatataaagctcatacacaatacaaccttcttagtgtgaatatcttgatgttattccttctagtcttaaaatatacatcacctctgtctcttttcaaaattggcatgataggatatatgtagtttaatatatcttgttcacagtaaatgaaaaatctatttttctttttccttttttttcctttttagacaaagtctctctctgtcacctaggctggagtgctatggcgccatcagggctcactgcagccccaacctccctgggctccagtgatcctcccacctcagcctcccaagtagctgggactacaggtgtgtgccaccacctggaaatttttgtatttttttgtagagatggggtctccctctgttgcccaggctggtctcaaactcctgggctcaagcgatcctcctgcctcaacctcccaaagtgctgggattacaggtgtgagtcactgtgcccagcttatacttttctattaacatgtacatttgaggtatctgttgaaaagcacattggtaactcacaggttactagtatttgatttacgcttcaggttacagcccctttcctatgactgattattcaggaacttttgtagtgaattaaatctttccacaaattgtttttacatttccataaatctgtttgactattacatacttttttttaaatttgcctaacagcagtaccctggaaaaaatgaattctggtttcacttttcttctagctatgtgttctctcagtaataatgcctaccctatggtgagaatttgagataataacatcatcgactgtagttaacactatatagcacttggtatgtgctaggcactattctaagctttttgtagatgaaaaatgtgtatcttgtgtttgtattgtatatgtgcagcatagatggagcatagttcctggtatgtcatagttcttcaataaataacgatttcctccatcctcacctcccaccaggaagaaagcatttttattcctaatattaattcccttaaagcattctgcctgttgggggtgggagtgaaatgaataacttgtgacttaggtctgccccctctgctgttgcggatgttggccagccatgttggttgtgggtgcccgggaccagtggtaggcatgccactcacacatcccacctggtgcccacaatccggtgcagaccagtgtggcgcatgtccaggaggttcaggttcattgaccccacctccctcctccagtggctgaaagaggtctgcatactgacagtgcccatgttggggccctgacttgcacctaggatgaaaactagaagggggtgtctgtaccttccgcagcatgatgaatagcatcagctctgtttctgaaagctgggatgcatagaggtaacacctgcctgacaaagatttacaactgctccccaagctgcctctgtagattgcaaaactgggtcacgctttttacaagatccacaccttggagggggtggtaaaggcaggttttattatttatttatttacaagaatgcactgaagggaacagaggccggtggtgtcttaggagttctgaggcgcttgttaacatgtagctggccagctgcccatgtgactagaagttggaggggatgaaaaacgatttccagctgaacttggctgtttgctaaataacttcacacggggaagatgaattgggcaagaatgggtcagccctgaaacaagttccatacttttaaatactggacacactgcagctcaacctctgggaaatgaaccggagcagctcgatggctgctgtgctcacacggcagccccattattacagcctggctctctgagttcttaggctaagggacgactgggccatgggcgcctatttggagagtaaggctccgtgtgtggctcgtgatccttctgtgggagcacttgctgtaatggaaaatatcttccacttttagtgcagcgagctgcagagcagtgctactcaatttgtgcagcctggactgagttgctctgggttctcgttcaattaggtgactgatgaagttactgagcttgctggagctcaggtttttcttctttagtgaagtgcctcccgtggcctgggccaggcttttgccttctagtcgggaatcggaggactgctgaaaaagttgatcaccgacggagttttagtgaagcagattttgcttttcccatcaccccgagaatccgctgccgctttccaatacttccaactgtagctctgactcttgctcagccttccagccctgtctctgtgctgcatgtgctgtggaaggaaagacaaaagggaggtttctgtgtcctccaccaaaacaccatgacccagagttagttctttgtccctttctttggttagaagagggctctccccgaggtgccttcttggccaggtcagcaggttaacccctcatgggctaagctgctatctccagtcgccttcaggaggcctggccaaagtgcggaggttttctcttaaaaacagcaaccctcagtgggcctagcgaggtggctcacacctgtaatccccatgcttagggaggccaagggaggaggattgcttaaggccaggatttcaagaacagcctggctatagcgagactccatctctattttaaaaaacaaaaataacagcatcctggtgccaaagcggtctttgctctgctgctggcagggctgccttagacatgcaaagcaggtgagaagggaataggtcactttgggagatttggtaactaacacttgctcctctgaacattcagacagtcgcactgaaggaatttttttttttaaatcggccacacaagaagaaatgaggtagagcagttaagccccctgagatgctcttaaacaaggcactaattatttctgcattgctgttccaagcattgccgtttgcagagctctctgctctgctctgcattaggccttcttcttggtggtcactgtggtactgaggggtaggctggctgggattcatttagcccttcttatccctgccagacttctaaagcctcctcttcaaaagaacccgcagaatcaactgtgcttttggtttgtgtcgctggttacttctgcctcctgcagctcgttgattttttaatgtaccataattgggaattaatctgcgaactacagcatttggaaaaaattaattgtgtgtggaatgtttgataattatctgcatatgttaaccatttttttgctctttgtcatgtcaggcattgctcatcgtgatctgaaaccagaaaatatattgtgtgaatctccagaaaaggtactttgggcctgatttggaatgttatagtttatacttaccgaggaagccacccttgctttcaggatggattgttagcagttccgttggcctcagacaccaacttgaactgatcgtcttggacatgtgagaatgttacacttactgtgtgatgtttctgcccatcctcgtcctttcttcgctcttgatcatcagtgtgattgatgtaagcctgagagtttggaaaatatatgagacctgcacaaaattaatattttctagtccaatgcatctatctttatatcagttgatggaagtcgtaaatactttttttttttttttgagacggggtctcactttgccacccaagctggaatgcagtggcatgatcacagctcactgcagcctcgacttcccaggctcaagtggttctcccacctcagccccccaagtagctgagacaacaggcatgtgccaccacacctggctaatttttgtatttttagtagagacaggggtttcaccatgttagccaggctggtctcgaactcctgagctcaagcagtccacctgccttggctttccaaagtactgggattgcaaacgtgagccaccatgcccagccaaacaacttaatcttatgtgaagcagatctctttaagtaaacggaagtgtatgaatttgacaaattctgtgtttattaggagagatttaggcactggtggtgttggggcccacgttcacagctctgcgtgtatatacatgtgtgtattcaagagcatatatattgtggtctggatgaagccgcggctcataaataaggggtggccttgaatgaatgagtcagtctgctactcacaactcttttatggggaataataatggattcgctcaaataagatcttgtgacttctgtcactgattctgtcgtagacctttataatttatcattattatgatgattactactaataattacagtgaacacttcttgagtgcttacattgtgccaggcacttatatttatttagtgtttatgaaatatcatgaggtagatactattattaccttcattttatggacgaggaaactgaaactcaagttaggaaacatgtatagccagtgagccatgattgcaccactgcactccagcctgggcagcagagattctgtctcataacaagaacgtgaggaaaggcaaggcgaaagagaggaataattgggaccaggcagtggctcacgcctataatcccaacacttcgggaggctgaggcaggaggatcccttgaggccaggagcttaagaacagcctgggcaacaaagcgagaccccatctccacaaaaaatttaaaaattagctggtcacagcggttgcatgcctgtagtcccagctactcaggaggctgaggtaggagaattgcttgagcctggagtttgaggccagcctgggtgatatagtgagacccctgtctcttaagaaaaagagaggttaagtttcaaaggacattatctatcaagaaagtgaaaagacaatctacagaatgtgagaaaatatttgcagatcatatatctggtcaaggtttaatatccaaaatatataaaggattcctaaaactctacaacaaaaagacaaaccaatttaaaaatggacacgggacttgaacagacatttctccaaataaggtacacaaatgtccaacaagtacatgaaaagatgctcaacatccttagtcattagggaaatgcaagtcaaaaccacaatgagataccaccacatactactaggtaggctgtaatttaaaaaatggaaaatagtaagtgttgttacggttatggagaaatcgtaaccctcatacattgctggtgagattatataatggtgcagcttctgtggaaaagtttggcggttcctcaaaggctaaacacagaattaccatatgacccagcaattccactcctaggtattacccaaaacaattgaaaacagatacttgtatagcagtattcattacagcattgttcacaacagccaaaaaggtagagacaactcaagtggtcatcagcagctgaacagataaacaaaatgtggtacatacattcaatggaatactagtcagccataaaatggaatgaggttttgatacatgctgcaacatgaatgaaccttgaaaacattatgctaagtgaaataagccaaacataacaggacaaatattgtgtaaatctacttatatgaaatatctggaatgggcaaattaataaagacagaaagtcttaattaataaagtcagattggaagttacccagggctaggggaagaaagaatgggagttattgcttaatgcgtatagagtttctgtttggagtgatggaaaagttttagaaacagatcgtggtgatggttgcacaaccctgtgaatgtacttaattaataccactaaactgtctacttaaaaatggctaaaatctcatattttatgctttatattttaccactaataagaggctaaaggaaaaagaaaagaagaaaaaatagagaaaaggggagggaggaaggaaggggagaaagaagtcgagggacttgcccaggcttcccggcaaggacatgggtctcagagaaccagcatttagttcactcgctgtgctgcttacatgccatgtaggccattctcatccattctcatgtgtgcacccaaactgccttcctggttggctccagagatgaggcacctgtctgtggtctcaggcacagcatccagttctggtggacttggttactgtgttgatgccacctacggtgaccaaccatcccagttttcccaggcttgaggggtttcctggaacgcaggagtttccgtgtttaaactgatcaagtcccaagcaagccacccaagacaagttggtcaccctaagccacctgaggcggtcagaggttttactgcaagctcctttacactccactgaatgggctgcaagaagtctgtctctcaggagtacacagtaacttccctagctgctgtgctgcaacctgtaccatcatttgccagcaagagttccatacttcctttagtctgagttcacaataatctgacaccaaatagtccacccatttttcccttagatgggaaataagagagctcagggaataagacacttgggaagaaatcctcaggggacttcttgttaacctccggagagcaaacatgacctgacaaaaccagctgcggtgtgacagccacggagccatgcacccgtacagccatgcctggctcctcttgccccgtagtttcttatatctgtgaccctgtcttctgttttccttttcaggtgtctccagtgaaaatctgtgactttgacttgggcagtgggatgaaactgaacaactcctgtacccccataaccacaccagagctgaccaccccagtacgtatgcttcctctgggctcctaagtatttggagtgtttccctgatccagagctgggaggtccagaacagagggttaaggatggaaaaccaagtggacctatcttcctgctgcctgagtgatcattttgcttgctgctctgtgttcgtggctctcaagcctcccctgaccccttagttgctaacgaaactgacacttggactgttagttgggttgggtcctctctgctgatgaagagacaaattatatctataagcacaggctggccgtttgcaatggctcatgcctgtaatcctagcactttaggaggttgaggcaggcagatcacctgaggtcaggagtttgagaccagcctgaccaacatggagaaaccccattgtactgaaaatacaaaattagccaggcatggtggcgcacacctgtaatcccagctacttgggaggctgaggcaggagaatcgcttgaacccgaggggtggaggttgcggtgagccgagatagcaccattgcactccagcctgggcaacaagagcaaaactccgtctcaaaaaaaaaaaaaaaaaaaaaaaaaaaaaaacaataaaaaaaacacaggctgagccctgactcctgacccaggtgaaaatggaccctactcccaggccagcccttttgcatatgagcatttgggtagttctgtaagtcctattcccactgctgaaggcacagcgcagcccccttgtaatgggggatggagagctgttctccctgactggacaggatagtctctctgtggtgggaactgtgaggtctcaggctatatgcacatgggatcgcttggccaagttagcctgtttgcttctctgatttcacatttcatgaccagatggtgctgcttggagctacttcttcctaaaacatctcttgtataactaatagagtataattatgattcttttgagatttgtatgcttcacaagtaaattttcctaataaccctttttttttttttttttttttttgagacagagtcttgctctgttgcccaggctggaatgcagtggcgtgatctcggctcactgcaagctctgcctcctgggttcatgccatcctcctgcctcagcctcccgagtagctgggactacaggcgcccgccaccacgcctggctaattttttgtatttttagtagagacggggtttcaccatgttagccaggatggtctcgatctcctgaccttgtgaaccacccgcctcggcctcccaaagtgctgggattacaggcgtgagccaccacgcctggcccctaataacccttttaagacatgccctttaagggcatatttaatatgcctgtgttgtatcttattctaaacaacattatcaggaatgtttctttcttagcttctaacacactggactaccttgttttcaaagtcattaattctaattgacaataacaaagaaaatatcctctcttgagaacacttaccatctttcagtcaaattagttttgcagggtgtgtggaggcgggaggtggttgtttcttggtgagcctgaaataatgaagagtggagcaaaaagaacgtgttttattcctatcagccgctttctacacaagggtgagagaaaggaatattggattctggtcctagggctgccattgatgtgctcaaacagatccctgtcccgttcttggccttgcccttgccatctataaatgggaggggtgggaaggttggatttgttctaagagctttgtagctttgacggtctcttaattgttacacttcctgctctgagctagcaggggagcacgacaggattcactttaagaaatcttgctgtgtggaactggatctccttccagagccacattcttggtgcatttaagtacctgtacatgaaatatctgtttataggaagctgaagcagggggagattcctggaacttcttggccaagggtctttgcctactggaggaggaactggaaggataaggtgacctgaactgctcctctggatgatggaaaatgatggagctcagtctgcagatgccttggtggcatcaggcggctcactggctggccttcctgatctgtatctcatccttccagcctcctgctccagtcccatcacagtctgctctctgccatcccctctgctgtaactaagcctctctgttctctgccatctccccctcccccaaccctggcccccacagtgtggctctgcagaatacatggcccctgaggtagtggaggtcttcacggaccaggccacattctacgacaagcgctgtgacctgtggagcctgggcgtggtcctctacatcatgctgagtggctacccacccttcgtgggtcactgcggggccgactgtggctgggaccggggcgaggtctgcagggtgtgccaggtgagtgcggccccagggagcactgcgtagaccctgctaggggtcagtgtggttgggggatgccaagcaggactgggctgggagagcgttcctgatcgggatgggggctcatagtgccctctcccgctcctgtcacggtggccacaaggtaaaatagagataatcagacactccgcccagctgggagttcagggcaggattgttagaagatcatgcctgaactgactcttttttttttttttttttttttttgagatggagtctctctctgtcgcccaggctggagtgcaatggcacgatctcgactcactgcaacctctgcctcctgggttcaagcgattctcctgccttaggcctcccaagtagctgggactacaggcgccggccaccacgtctggctaattttttatattttcagtagagacggggtttcatcgtgttagccaggatggtctcaatctcctgaccttgtgatcctcccgcctcggcctcccaaagtgctgggattacaggcgtgagccaccgcgcccagccctgaactgactcttaaagggtgcatcctgccctgcggaagagggacaagaatcacaagtagaaggaacagcacgggcatagatgtgggcacatgaaatagctggagtgtctaggaaggaagagtggagtagtaggtcggtggtagtgggagatgaggcctgagaggttcacagagagtcctctaggaagagccaaggaatttgggctttgttctatgggtgatctccactcatcacccatccagcccaccaagggcatagccatcctggcctgccaagggcattctatatagtttgatcatctaggggacagtgcggggtgagtctgggaagaggccccagtctgtggcatccccaagccatgagctgcagctacagctgagatcaattgaagccggttgatcaaaacaatgacaggcacatcctgcccatccctggcagtgtggcctcaggaggaatcttttgtacctagaacaagctgtttgaaagcatccaggaaggcaagtatgagtttcctgacaaggactgggcacacatctccagtgaagccaaagacctcatctccaagctcctggtgcgagatgcaaagcagagacttagcgccgcccaagttctgcagcacccatgggtgcagggggtgagtgactccagggaggggtgttttccaccacttcaggcctgtggcatggccacaaggaagctgtcatgccagcaagtgctgagcaccagccttgtggctggtgcagctgaagaggacagcgtctatccctgagtgtgtagagtgaatcgactcctcctgttaccccagactgagccccttataggccatagagttggctgtaaacttggccacagactaagccccaacagagtcctctggggatttggtacatgcacccagccccgcaagcatcctattgtcatttgaagtctgtagcatcctcctcttatatagaagcatcattagctgagga

SEQ ID NO: 3172 - DNA, 1545 bp, Homo sapiens
gcttccccctgtgtaaccagggaagctaagcatgtttctttcacttcacccatcttcctacattttttccttcctagtttcagaaacaactctccaagttccatttccaaggaaagtcttaaccatttgtcccttctggcgtaccctctttcattgaaatccatgcagaatataccaggtactctgtctttgtgtgtgtgtgaagccataaaatctaatgttacgtgtgcggtggtgctgtgaggtatgcttctcgtgcaagcggctccctcagccctgctgtggtaaagaccaagtataaattgtcgctaacagggttttctcattagagtcgtgtgcctgagtgtcccctgtgaattataatgcctccagccctcttgctgctcctctgctctgcctgtcttttggctgttttgcttgtcctggggccctccatcaaagtgtggacaggggaaggagaaagagctgaaacccaaatctgtttcctctgcactgggcctgcggtgccgatgagaaaatagatgcagacacgggttgccactggactgcattcaaggtcagcgcaagagagagagacaatggttcctccttctcagcctgctgccccgatggccagcaccccctccctgagctcctgaagatgagtgaccctgtgttttatttctgctgaatttctcaccatgttatacatttgggcagcttttttccttttaatttaccttggtgagggtgggtgttgaggtgctgattttttttttttttttttttttttttttttttttttttttttttttttttttttgagacggaatcttgctctgtcacccaggctggagtgcaatggcgtgatctcggctcactgcaacctctgcctcccaggttcaagcgattctcctgcctcagcctcccgagtagctggcactacaggcacccgccaccacacccagctaatttttgtatttttagtagagacaggtttcaccatgttggccacgatggtctcgaacttctgacctcaagtgatctgcctacctcggcatcccaaagcgctgggattacaggcgtgagccatggtgcctagccagatgtttaattctttcaattcatagggtgttgcagtccccagatatatcttgtgtttgaagctcttggctagagttatattttgagatgctctgtggatttcttttatctgtgtgtttatctgttccccattctaaactataatttaaaatgtgctgtcatcagatccccaaaatggatggaagaatgcgcctaaattgagctgtcaggcacttggctgcgtaaccatgctttctggattgtggtgttgaaagtgccatcctgtgtgctctctccggatggctgtcacgtacttgcgtctgagaacagtgtatggacctgcatgagcactaatcagtcttcctagcagacttgctctttctctggtcgtatgccgccagatcctctgagaagagagtgggcctttcccctcaatgggcaaagaaccagcttccattttaaaagctctcagaaaaaaaagaa

SEQ ID NO: 3173 - DNA, 1942 bp, Homo sapiens
agcggatctgccactgagcccaggtctggacttttttggccatcagatggacgatctgaacatagggtggctggcagaggggacccccaggagcctgaaggaatctgaaggcactggaatcactccacacacccaaagcctctggacttctggttctcaggagtctgcctacctgtcgccctgaccgcttgtggatggagaaggggagagcatctaggcaggcaaacagaagggaagtggagttaaacctctggcatgaagtctgggagtagggtaggctagggggtttcttctatgacacttgacccttccatgctggttcccaagcctattggaggaatgtgggtgtggccgaggtgatggcaagaaaggtgcaagaaagtgagcagtctgcctgtgagtgagcacagatgccggggtgtgtgtgtgtgtgtgtgattttcactgtggggtgtgtctgtgagagctagctgccttacccctccttggcacatagtaggccttccataaatgttggatggatggataaatagattgggaccatcagaccatgaccactgtaggagtgatgacagctcagcgtccccactcagtgtatctgaccatgtgtgtaagtgcacaaaaatgtggttgtagatgttgctctacattcaaaccttccaggctacactcttccatcagcatgagtcctggagagctgggggaaggtaggaagaggagccttgccttgagttcctaaaccgacccactgcagacacaggctctgattctcttacccagagatgcccatgagctgacattttactcatccctctgcctccaagaaggcctgtattatacgtgtcctcctgggggttggagatgatccctcaagtacacaaaggtcccctggcccttcatctgggaatcatatactccactctagctcccagaatctacagacctggctcctcggatctgaagcccagcacaaaataatctccccgtccaaggagcttgtggaacttgaattgggaactttggagtcttgtctcccatcccagcacattgaggatgtagttggtgaatggactcttccaggcatggagatcctccatcctaaaagtacctgcctccttcccagccatccctgacacattccagccagttggatctcacagcacagctatccacagggagactgggatgttcacgcagcactccattactcagtacctccatacccagccctatacgcagacccacaggtggggaaactgaggcaggaacagggttctgccctcccagagcctccactctgggatgccagaatggaaagccagagggaacctgagaatcatccagtcttactgtctcaatgtacatacggggaaactgaagccaggagaagaagagggagaaactgtccagggcctcacagggaggcattcatggagctggagaaaccagggatcctgaccgcagggcccatcaattgctacatagagatacacatggaaagagggtttaacagaccctctctaggacacaactgtttctgctttgagcaataatttctaacctgaggccaacatgtcccactgccccttgggttggctggggttgtttcctgagccaagcatccaatatcatgccccactcaatggcctagaagctgcctgtactttggggaaacagatggagctcttgggcccagccagctgggcctgggacttctgcctctgccgcctccagagtggcctggcagctttgccagaggctgtggagcgagggtagtaggagcttttcccagagtgctgtgacttgcatgatggattctaggctgtggcaagggctgatttctgggatagggggagggttggaaaatttatttttatgaaacagagggaagactttattgttgttatttttggtaaaataaaaggcaaactaaagcagccac

SEQ ID NO: 3174 - DNA, 767 bp, Homo sapiens
aggccaaggcaggcggatcacctgaggtcaggagtttgagaccagcctggccaacatggcgaaaccccgtctctactaaaaagtacaaaaaattagccggacatggtggcatgtgcctgtagtcccagctactctggaggctgaggcaggagaatcgcttgaacccgggaggcagaggttgtactgagctgcactccactgcattccagcttgggtgacagagcaagactccatctcaaaaagaaaagaaaagataagaaagtgaaggacgttttgtgtcctagaccctttttcgaaagggagtttatccaggaattagtagaattcctgaactggattcataaaactaagtagccttactctgcattgtctacagggcaaagttgtacccatgtttctttcaggatgtgcactgggtacctaaaaggccagtgtgacataccccacacctaacagtatgcatgtcatttcatatcatttctatttcagtgcaatttctgatggctgctatgtgtctgacactgtgccatgatctgtaggagaaacaagtgaacaggggacaatctcagcctttaggaacacaggggagcactcaaggccaaataaaatcagtgccctcgtggagcttctcgcagggtgtttgggagcagaggatggagcaccaactactagttctgctcagtaacaccctccatttgcatagcacctaactgacttccagagtctctgtagaaaccttaactcatctggagttatcagggagctgc

SEQ ID NO: 3175 - DNA, 812 bp, Homo sapiens
tgcctctattttagaaggatgtaaaggtttaatcacgctggtggggatttagacccagagacttcggagaaatcttattatttctaactgcaggcaaagagtattaaagctccactctggatcaggggcatgacatgttctataagtaatttatctttaacagggaaaggcccatactagagtgtcttagaaacaggactgtgattgggcactggttcactgttcctccttttctctttcctatctcagtgtcctgcttattctttccatccggactttttctgcccaatctgtgcagtgtctgaatgcctgcctcacaaatcctccttttaagattgggagccaggtgcttgccaatgaaagataataaggttttttgcaataagtgacctcatccagcagcctggcacagacctgtcaactgccgacttctgaatgggcactacctgcagcccttccgatggaggagctatgggaggagaggatgccgtaggctccataggcactcaagtccgtgctcttggacatgaagtaatttggggctattttgaaccccagccctattgctaccttcacagaggctgtctccactccaggccatttgtgccctgtgtgcatccatagcgatgttgctgagcctatgactcatctgcatggtcccccactcccaacccccttcttgcctagctctctcggttttgcctttctgatgctgaggctggaggatgtcacaggtggggttctgcctatggagtcattgttctgtttggggaatatggtttgaccagtggcagatctaaatccacgcgcta

SEQ ID NO: 3176 - DNA, 2394 bp, Homo sapiens
gggcacagtggctgacgcctgtaatcccagcactttgggaggccgaggcgggtggatcatgagttcaggagatgggagaccatcctggctaacacggtgaaaccctgtctctactaaaaatacgaaatattacccgggcgtggtggcgggcgcctgtggtcccagctactcgggaggctgaggcaggagaatggcgtgaacccgggaggcggagcatgcagtgagcggagatcgcgccactgcactccagcctgggcgacagagcgagactccatctcaaaaaaaaaaaaaatttgtcagtcataagaagaaatgtaacaaataggaatcagggtccctttcctcactgggttgtgtggttttagatggcatgggaagcacacattacaatatgtagttcatggacggcatttagtaactcagcttctcccagtatcataccggaggaagtcaaatatccccgatgtgccggagtccctgctctctctctctccaaccttggcttttgggtttggcttttcacacatatctgcagtttccttggaaggtccttcctctgccttccactcgccctctctttctatcaatactcacttttaatagtgtccaacagaacgttttgtgatgatgaagatgttttacgtccatgctgtccgatgtagtagtcactagccacatgtggctctcaagcatttgagatgtcagtagtaagtgcaaggaactcaatttttgatattgttaaattttaatcagtcaaatgcagcaggtaatctcttacacttctagagctttaaatccatggacccactagatatatacaggaaattcccaagcccttatctccagcttggaattattattagcatctgactcattatcaatttattggtcatccccacctgtttgttcacagaaactttaattcaccaggtccttaggtaaatgtatcaaatccctcttcaaaacctagtcttttcctgtattcccatccccttagcaagtcaaggcatgaatctgagtcatcctccctttttctcctccccacagtcaacattaccttttaattctgtcttcaatctgccagggtcttttgtttcttcaacaactgcccaaaccttccccccacctttttttttttgagatagggtctcaccatattgcccaagctggactcaatctcctggactcaagtgatccacctacctcactccatcttttctcactgcaagggtatatcttcttctttgactccattttccatgttgccacagaaattgtctcttttgaaatgccaccttgctgaaaatcttcctggggcttcccaccgcctacagataaggtccaagtgtttctgcttctcataccaggctcttcatgatctgaattctccttgcctctccaagacggatatctcatctctcactcctgttccattctttccattccttagctacctatgagctgctccgattggcctcttaaccgttgcctttgtacacaatctttcctatcttatccaccagagaatctggtggatctggctctcttgcccaggctggagtgcagtgctaccatcttggctcactgcaacctcctcctcctgggttcaagcgattctcctgcttcagcctcctaagtagctgggattacaggcacatgccaccgcacccagttaatttttttttttttttgtagagaaagagtttcactatgttgcccaggctggtctcaaactcctcagctcaagtgattgcctgcctcggcctcccaaagtgctaggattacatgtgtaagccaccgaccttggcctacatacctctttgactcaataagctcctctggaagccttctctggccaaccagtttgcccctcactcctttcacctctgcctacagtacctaaactctattaaaagcatggcttatactgttgcatgtgtttgattaacaaattttctttcctcccaaagactgctaactatctgagagtagcagtgtcttatttttttttgtacttctagcatctggcatagtgctcaatgaatgagtgagtctgtcaggggaacactttgccatctaattagggaagaactaaacggcattctaaattactgttctattaaaacatatacctcatcaggagatcgagaccatcctaggtaacacggtgaaaccctgtctctactaaaaatacaaaaaattagccgggcgtggtggcaggcgcctgtagtcccagctacttgggaggctgaggcaggagaatggcgggaacctgggaggtggagcttgcattgagccaagatcgcgccactgcactccagcctgggcgacagagcgagactctgtctcaaaaaaaaaaaaaaaaaaaaaaaaaaaacaaaaaaattttccccc

SEQ ID NO: 3177 - DNA, 2380 bp, Homo sapiens
gggcacagtggctgacgcctgtaatcccagcactttgggaggccgaggcgggcggatcatgagttcaggagatgggagaccatcctggctaacacggtgaaaccctgtctctactaaaaatacgaaatattacccgggcgtggtggcgggcgcctgtggtcccagctactcgggaggctgaggcaggagaatggcgtgaacccgggaggcggagcatgcagtgagcggagatcgcgccactgcactccagcctgggcgacagagcgagactccatctcaaaaaaaaaaaaaaatttgtcagtcataagaagaaatgtagcaaataggaatcagggtccctttcctcactgggttgtgtggttttagatggcatgggaagcacacattacaatatgtagttcatggacggcatttagtaactcagcttctcccagtatcataccggaggaagtcaaatatccccgatgtgccggagtccctgctctctctctctccaaccttggcttttgggtttggcttttcacacatatctgcagtttccttggaaggtccttcctctgccttccactcgccctttctatcaatactcacttttaatagtgtccaacagaacgttttgtgatgatgaagatgttttacgtccatgctgtccgatgtagtagtcactagccacatgtggctctcaagcatttgagatgtcagtagtaagtgcaaggaactcaatttttgatattgttaaattttaatcagtcaaatgcagcaggtaatctcttacacttctagagctttaaatccatggacccactagatatatacaggaaattcccaagcccttatctccagcttggaattattattagcatctgactcattatcaatttattggtcatccccacctgtttgttcacagaaactttaattcaccaggtccttaggtaaatgtatcaaatccctcttcaaaacctagtcttttcctgtattcccatccccttagcaagtcaaggcatgaatctgagtcatcctccctttttctcctccccacagtcaacattaccttttaattctgtcttcaatctgccagggtcttttgtttcttcaacaactgcccaaaccttccccccacctttttttttttgagatagggtctcaccatattgcccaagctggactcaatctcctggactcaagtgatccacctacctcactccatcttttctcactgcaaggatatatcttcttctttgactccattttccatgttgccacagaaattgtctcttttgaaatgccaccttgctgaaaatcttcctggggcttcccaccgcctacagataaggtccaagtgtttctgcttctcataccaggctcttcatgatctgaattctccttgcctctccaagacggatatctcatctctcactcctgttccattctttccattccttagctacctatgagctgctccgattggcctcttaaccgttgcctttgtacacaatctttcctatcttatccaccagagaatctggtggatctggctctcttgcccaggctggagtgcagtgctaccatcttggctcactgcaacctcctcctcctgggttcaagcgattctcctgcttcagcctcctaagtagctgggattacaggcacatgccaccgcacccagttaattttttttttttttttttttgtagagaaagagtttcactatgttgcccaggctggtctcaaactcctcagctcaagtgattgcctgcctcggcctcccaaagtgctaggattacatgtgtaagccaccgaccttggcctacatacctctttgactcaataagctcctctggaagccttctctggccaaccagtttgcccctcactcctttcacctctgcctacagtacctaaactctattaaaagcatggcttatactgttgcatgtgtttgattaacaaattttctttcctcccaaagactgctaactatctgagagtagcagtgtcttatttttttttgtacttctagcatctggcatagtgctcaatgaatgagtgagtctgtcaggggaacactttgccatctaattagggaagaactaaacggcattctaaattactgttctattaaaacatatacctcatcaggagatcgagaccatcctaggtaacacggtgaaaccctgtctctactaaaaatacaaaaaattagccgggcgtggtggcaggcgcctgtagtcccagctacttgggaggctgaggcaggagaatggcgggaacctgggaggtggagcttgcattgagccaagatcgcgccactgcactccagcctgggcgacagagcgagactctgtctcaaaaaaaaaaaaaaaaaaaaaaagaaaac

SEQ ID NO: 3178 - DNA, 295 bp, Homo sapiens
tcaggaacttttttgggttacctgggatttttgtttgtttgttatcctaaattttaaatgaattattgatgaatatcttggttgacaatagggttgcaatataagcataaggtaaccacagcttaaatacaggtggagatcaccttattccttttatctcaaaaagtagtatttaagtatttttcattagtacaacaattagtaatctattatatcaagataaatatttaagaattcattttagcataaattttctttttcctgcacaacttcaataaactaagctggtgtgtta

SEQ ID NO: 3179 - DNA, 399 bp, Homo sapiens
aaacgtgaaaaaaatgtggttattgctgtgataaggcactgtgtttagaagacaccatgaacactttgtgtcccgagaaactagaagtcagtattggacataccatctttagaaaatcctaaagaaaagctgttaactgtttagtaatgtgtattgagtacctactatgtgtcaagctgttctaggcactagatatatagacgtaacaccaggaacctgcctacatggaacttgcactttaatggggatggaggatgggtaaatgttaaattaaccaaatgcacacaaatatatgattatgaattgtgtcaaatgtcatgaagttataataggtttttgtttttatttttgttttgagacgagctctcgctctgtcacccaggctgaagtacagtgagt

SEQ ID NO: 3180 - DNA, 2674 bp, Homo sapiens
aggcagatgcagagatggagacatgagactcagtgcagtgggcagggaagacataacagatggaagcaaaggaatcctgcctgccttcagcagagaattcaccgaatcctagaactgtggctccctccaggcagagcctaagatgctggtgaagaatagctgtgtgattgaataggctcaaaggagagttcagaattcccatttacatattactagtttggtttgtaagttttagttccttgtattattgagattcagagcttcattttatgttggtcattaggtgaatattactcattttccctcaagagaagctcataagtgtgtgtgggtgtgagagcacgatggtgcctgtgttctgtgaatgtgtccatatgtgtctgtaagagagacagagaccaagaacttgcccaattttagaaatacactaatgtgcagttgttgccttttgtctgtattgaaggcccattgaatgactaatccaggctggaagcattcccatgtgggtgtctgagtccatgagccaagcctgaggggacagtgagtctccaggtctgccacactggtgcaccttgctggcacggtgcctcaggaaggtggcgactcaggtgggccttgagttatattttaactcagctgctcagttcccagggcacatttctggatcagaacccatgggaaacaggaggtactaagtgcaatgtcttagcattctgcaaaatggagatctgttgtccagcggcttatctcctttttagtaacccttctttctgaacccagggcccttttcagccttccctcatattttcttgagatcaaactttacttctttcttatttactaagaatttgcctgtttgaataagaacaaaacgctaaggtgggtagcctaagctgattttctgctggttacacgtgtctctcacaccacatttcctcaaagctaatctgaattctgtaggctaaaaatattcatgtagcaaatctgagaattgaaaactgcagataaccggccgggtatggtgactcatgcctgtaatcctagcactttgggaggccgaggtgggtggaccacctgaggttaggacttcaagaccagcctggccaacatggtgaaaccccatctgtactaaaaatacaaaaatttgcctggtgtggtggtgcatgcctctagtcctagctactcgggaggctgaggcacgagaatcacttgaacctgggaggcggaggttgcagtgagtcgagataacactactgcattccagcctgggtgacagagtgagactccccctcaaaaaaaaaaaaaaaaaaaaaaaaaacagaaagaaagaaaaagaaaactgcagataaccctatacattaatactggtatctcgaggtgactcttctgaccaagggtggttaagtgacacatagaacttttctaagagaagacagacaagttgacaggcatgccttgtactcagctgtgttcatgtggtggtctgtggaaagaaaagaagactcatttggaaatgaagctgtccctttccaagcagtctctggtgcttttcttctctcaaaatggatccgataaatatttgaatagagcagattgtagaatgtcgtgctgtcaccagaaagctgctgttttgggttctgcattgagccaaatatgtagaggacctaccaagcccactgagggactaggttttcatgtctctagtcatacctagaatgttctgagccgtctgagggccttcatgccggcagcagctagcaaagccagaaagcaagtctaacaggatctaagatgaccatcaggagaaggagtttgagactgtgtatgcaacccccaatagacccccttttactctgatctggagaatgtatctggcttcatattttcaagtcacatgtctctcagacccctggattcagaacccaaggccacaaatcataggcatgaagcactttcttaagactgacctaacgctggattatttcccgtccaatgcctgcatgctgcttgaattgctccacccacacctccatgaccaagggcgccagagtgctgcaactggggcgtgggccgctctctgcttttcctgtctgactctgacaagtcctccctcactgaatgtagaatcgttgccaagtttctgagaagtgtcgattccctgttaacatggatatcagttctgcctcacatttcccacttgaggttgaggcgtactggagacaacacctcagaccatctgaaccccatcagtggacgaaaatggggctgttaatatactctaaaagccatactaaaaatgctctgagggaactggctaagaatagtgggcctggtgattgtctatcacgcaaggctttgttttgtactgttcagaaatctgtcacctttctgcctgcccttgtttcctgaatgaaatgcttctggggttatttatgaaaggagtgatcctggggcaggcaggaggcagtgggcttcatggctccttgaagttattactgatcttgaccttctctttggctacctttagacaaagaatacgccaatcaatacttggggctctaagttttacaattgatatttatttgtatcatctctttgtctaggaatgtaaaagtgattctaaactaagatgtgtaataaaaatcaatcagatttattgtacctacaaaaaggt

SEQ ID NO: 3181 - DNA, 340 bp, Homo sapiens
gtgacccccattacacactctctcagtattacccctctttcagctctgtagctgttgcagtcgcatgattagtcagtgttggtctcctcatggagaatataacttgaacactagctgggaccatgtttatcttatttcccactggagtccctggccttcacctagagggtgggatgtggtcagtgtgcaatgagcaagctgcttgggtgcacctaaaaacagaggctttggccatggggcagcatagccagatgtgtgttctagagagaatgttttggcggctctgtggaggatggatgacagaacctctgcctgtggagggaggctggttaggcatttt

SEQ ID NO: 3182 - DNA, 255 bp, Homo sapiens
gacttttagactccattgccactgtgttataggaaactgaggctcagagaagtgaggtaacatgtccaagtcacaccgtaatttgctgagctaggcgtcatacagatttgatggattctggaaccatggtccaatcgccccatacctgctgcccagcaatcacattccggaaaacaagggtacaaggaagcacacatttgctgccccaacccgctctgcctcatgtgatactcagctaggtgctcttgctcttct

SEQ ID NO: 3183 - DNA, 241 bp, Homo sapiens
gacttttagactccattgccactgtgttataggaaactgaggctcagagaagtgaggtaacatgtccaagtcacaccgtaatttgctgagctaggcgtcatacagatttgatggattctggaaccatggtccaatcgccccatacctgctgcccagcaatcacattccggaaaacaagggtacaaggaagcacacatttgctgccccaacccgctctgcctcatgtgatactcagctgggg

SEQ ID NO: 3184 - DNA, 254 bp, Homo sapiens
acttttagactccattgccactgtgttataggaaactgaggctcagagaagtgaggtaacatgtccaagtcacactgtaatttgctgagctaggcgtcatacagatttgatggattctggaaccatggtccaatcgccccatacctgctgcccagcaatcacattccggaaaacaagggtacaaggaagcacacatttgctgccccaacccactctgcctcatgtgatactcagctaggtgctcttgctcttct

SEQ ID NO: 3185 - DNA, 223 bp, Homo sapiens
aaccaagtttataatattttaatcatctttgtatccacataactcttagctcagttgggtgcttagtagctcagttgggtgcttggtagctcagttaggtgcttggtagctcagttgggtgcttggtagctcaggtgtttggtagctcagttaggtgcttggtagctcagttgggtgcttggtagctcagttgggtgcttggtagctcagttgggtgcttgat

SEQ ID NO: 3186 - DNA, 223 bp, Homo sapiens
aaccaagtttataatattttaatcatctttgtatccacataactcttagctcagttgggtgcttagtagctcagttgggtgcttggtagctcagttaggtgcttggtagctcagttgggtgcttggtagctcaggtgtttggtagctcagttaggtgtttggtagctcagttgggtgcttggtagctcagttgggtgcttggtagctcagttgggtgcttgat

SEQ ID NO: 3187 - DNA, 773 bp, Homo sapiens
  SITE (77): n equals a,t,g, or c
  SITE (166): n equals a,t,g, or c
ggcggcgttgccgaatcttatcgccctgacgtctgaagccgcgggtccacgttttcgtgggacggcagtgagcctgntgtattgcggtgttcccattggcgcggcgctggcggcgacactgggtttcgcgggggcaaacttagcatggcaaacggtgttttgggtnggtggtgtggtgccgttgattctggtgccgctattaatgcgctggctgccggagtcggcggttttcgctggcgaaaaacagtctgcgccaccactgcgtgccttatttgcgccagaaacggcaaccgcgacgctgctgctgtggttgtgttatttcttcactctgctggtggtctacatgttgatcaactggctaccgctacttttggtggagcaaggattccagccatcgcaggcggcaggggtgatgtttgccctgcaaatgggggcggcaagcggaacgttaatgttgggcgcattgatggataagctgcgtccagtaaccatgtcgctactgatttatagcggcatgttagcttcgctgctggcgcttggaacggtgtcgtcatttaacggtatgttgctggcgggatttgtcgcggggttgtttgccacaggtgggcaaagcgttttgtatgccctggcaccgttgttttacagttcgcagatccgcgcaacaggtgtgggaacaaccgtgacggtagggcgtctgggggctatgagcggtccgttactggccgggaaaatgctggcattaggcactggcacggtcggcgtaatggccgctt

SEQ ID NO: 3188 - DNA, 652 bp, Homo sapiens
tcggtttgctacccggcgcgttggttggcggaatcctggcggccgtttatggtcgcaagcgcattttgattggctcagttgcgctgtttggtttgttctcactggcaccggcgattgcctgggatttcccctcactggtctttgcgcggctgatgaccggtgtcggcctgggggcggcgttgccgaatcttatcgccctgacgtctgaagccgcgggtccacgttttcgtgggacggcagtgagcctgatgtattgcggtgttcccattggcgcggcgctggcggcgacactgggtttcgcgggggcaaacttagcatggcaaacggtgttttgggtaggtggtgtggtgccgttgattctggtgccgctattaatgcgctggctgccggagtcggcggttttcgctggcgaaaaacagtctgcgccaccactgcgtgccttatttgcgccagaaacggcaaccgcgacgctgctgctgtggttgtgttatttcttcactctgctggtggtctacatgttgatcaactggctaccgctacttttggtggagcaaggattccagccatcgcatgcggcaggggtgatgtttgccctgcaaatgggggcggcaagcgggacgttaatgttgggcgcattgatggataagctgcg

SEQ ID NO: 3189 - DNA, 7739 bp, Homo sapiens
acacttccgagagccgggcctcagcatcctgctggagagttactacgagcatgaggtgcgcctgtctccgcacgtgttgggccacagcaaggcgcacgtgagccggatcgtgggcgagctggtgcgggctggccgcgcccgggggtcccccggtctcattcctgggggagcgctggccttggccttccgcggagacttcatccaggtgggcagcgcctacgagcaacataaaatccgccggcccgacagcttcgacgtgctggtgccactgcgcctcccgccgcttgtggcgctggagccacggagcctgggcgaggagccagcgctggccccggccttccgcggctgcttcttgtgcgccctcaaggcaccaccctcaccatcgggggcctcggggggccactggcttcgggactgcaaaccctttgctgatgccttctgcgtggatgtgcgcgggcggcgtcacctctctgctactctggtgctgcgctggttccagtcgcatctgcagcgctccttggccactgtgcgttacagcctggaggggcgctgtcgggtcaccttgaccccaggtggcctggaacagccccccaccttacacatcttgccctgccgcactgactacggctgctgccgcctttctatggctgtgcgtctcatccccgctgtccatctgggagatggggtcttccttgtggcgccaccaccgccacccttgcccagcgcgcccctgttggagctccctgagggcctgcgtgcggaggcactgtggggtgtgaacacagcacgccaggagcagaagctgctgagttggctgcaggaacgggcagctccaggtgcctgctacctcaagtgcctgcagttgcttaaggctctgcgcgatctgggggcccgtgggctggactcagcggccgccacccagtggggacgcatcctatcctcatatgtgctcaagacagtgctgctggcagtgctgctgcgcaagggggcccctgggcaaggctgggacgaggagcacctgggaaggtgtttggaggagttggtgcagttccttagggactgcctgctgcgacgccatacgctcttccactgcgtcctgggccctggtggggcggctgccgaggtgggtcccctgcccaaggcactgagggaagccgccccagttgacctcctggccgctttcgacgggcacgcccgggaacttgcagcagcgcggttgctgtccacgtggcaaaggctgccccagcttctccgggcctacgggggtccccgctaccttgccaggtgccccccaccccggagtcagcgcacccagggcttccttgaaggtgaaccgtaaaccctgacagcacccccacctgaccaaatgctcctaaagcctttcccactgggtgggggtgggaatggcggtgaagccagttaaatgcaagattgcagaaggcattggaaaatttggtggctgccacaagctttagtggcttaaatatcaccttctcgcttcacagtccagtataatatgacatcttcacacccactagagtgtcctgggcaaaccatgggaagacatccaacaggagacccaagaattggttcaaatattgttctgtgtagacggattctgtagaaggatgtggcttttagagaagtccagtagaagaagcaagaactagctgcagggaaagttccttctgtcggtttttagacacagatctctctgcccaaattaaaaaaaaacaaaacaaaacactaaagtttttgacacaattacttgctaggtactgggttcctgattgtctttaaaaagaaaaatctgaatctttatttgcaactggaattgaagttctattttaggggctaatgtttagaggaacataatttccactgttcaaattaatattaatgtatttttaaaatggtgcaatcacaggtgtttgacaagattgtcaacaagttaagtcacatagatggaaaggcaatcgagagttggttagagaagcttccagagaaaatagcactttatattgatcaattcactcattttgtggtaattgctagcaccaagcattgcatctgaaagggaagccagttatatttattattaaatgtacaaccttgaaaagcagccagcatgcttgcctaactaacatcgccgcaggccacaagctgggatatgtacctgtccgtcaacatccattcattaaactacctactaccagccagagatgtctggaaccaaagtagcaaccaaatacatattcaagacaacactggtgaaggcataaaacatgttggctttggagaaagatgtgttttaggctttgcctgtaaaggtgtttctccaaggctggctgctggctggagacagaaaacttttttgttttaaggtttttagcaaactccttcacaaagagatttctttctgagcttaatgagctaatgaagaggaaatgcctgctgcttagcatgtggtttgtgctgggtctctaaccattgatggttcttccttgtccaggcagtcttacgtggtccaagagacctgttgattcagcacaggtcttgcaaaacatttcacttatagttcagtatcttgggctctgtgcttgaagatcagttactccctggtcgtgggcagaggagacaaattaggaaaagagcaagggagacagcccttgacggcagtctgtctcttttctctttaggtgtcagtatcaccaggttgggtgtattttgcagctgggaggagccggtcctggaattcttccttgttctcccaaatttataacagtcctcaattgcagtttaagttcagcatggcccctcatctgcttgcctgattggaaatgcagccagtccaagtgttacaaattgggatttttttgttttctaaataaaaacatgtacttcctcagactcttaaagctaaaatttggaagacagaaatgcctatgtgaatagaatcattgttgaagttctgagctcttttgagggaactctataagccttctttctttaggggatccacttgcctgctgtgggaaatcatagtgagtgatttacaggaatccttctcctccaagctgcattggcttcttatatcctttgcgaccttgggctgaaagagaaacagctgcaaatgttgtgctgtctctttgaggttgtcttggggacagttccccgcaaaggtcattcctagcttttgaggtcaatgttgggtcataaggtactgcattgtgcaaagaagtcagtctgctaactttatgcaaagatagaaactgcacggtattttttaaaattagtttttaaaataaatgccaagagtagatcttatatatatatatatgtatacatattttatatatatatatatttccatactcaaccacaacttcctctgtactcattgtttactacagtgggggacatcaagggttggaaggattataaagctttaaggctgggcgtggtggctcacgcctgtaatcccagcactttgggaggcgaggtgggcggatcacctgaggtcaggagttcaagaccagcctagccaacatagtgaaactctgtctctactaaaaaatacaaaaattagctgggcgtggtggcgggcgcctgtaatcccagatactcgggaggctaaggcaggagaatcacttgaacccgggaggtgaaggttgcagagagccaagatcacaccactgcactccagcctgggtgaccgagcgagactccgtctcaaaaaaaaaaaaaaaaaagctttaaaaagctgaattttagaaatatttctagcagtgtcagtgagttcctcttttaatagtgttttaaagtataaatctggtaacatactgttcttgtagttttttgttagttttgtttttcaggttaattacccaaagcctcatccatcctcaaggtttttaaattttatttttttaaaataaattgtgcattgtatttgtgaatttttaaaatattactgttttatttaaatgccatgctgagcaattgttctctgtacatggtaaccaaaacttagagatttcgatcaattttgatcaatgtttagtaaaccaaaacatgtactgtgtacaacggaaataatatggcatattagccaggcatgatggttgcccaagacagttaaattaagctcaattctgtattttattagggctctgttatgtccttcatctgaaatgtacacatttttggtgtatgcttggtactggagattcatatatgcaaatattctcatgcaagaagttccacagtaacaacagcaaaaagaaaaaattagttgtccagccagtgctggaggaaaatgtttctggggaagatgactcagtcattttgtggcgagacaccctttggtaactcccactgaccagtcttgggagccttcctggaatgatcgtgggctgagcggagatgttttttgcaaaatgaaactgaagctgaaagaaaggagaattcgagtgaaccaagagaaatccaaagacctggggaaggaggacttaagatgaaagtgaagcaagagagggaaggggaaatgaagtgaaaatggcgtgagggtgtgagagaggtttgggttaggaaacatgtttttagtgctatttccaaccaggggtcgcaaactcagcagcctgtagaaacaggggtgggaggtgggggggaagctgtgcccacctttaaagagggggccattgctcagccatgcagaaaaaaatggggcaacaagctggaaatcaggttttttttttttaaagtgaaacttgatgatttttaaacaagtaattaaaaaaatgtccaaaacaccatgtgggccaaacatttgtttgagcctgggggccaccagtttgcgaccactgccttacgtagttaacaccctgagtatgtatacagtcatattttttgttttggatatggtagtgttatatatacttgggggcgtgatatttgaagtcatctttatctctcagagttaagctttattgtagaagaaaaaaaaaaaagttaacacagccatagataacacttaactcacagttcccaggaggacacttgatctcgaagctgctctttttgagtcagatcctacatcaaaccacttagggccagtttttggcatttccttcctggtgatttggggtaaacttctttgctctgtcggagtttgcagatgagtaatcagaaggattgcagaataacttgtttctttgtattttattcttacatttaaattaattttggggggttagtggtatcctagctcgtgcctttacagggatgattggtggctagatttggggtgcaagcttcttaggctcataccatttcaactaccaagaacacaggtttttgtttttgttttttgagacagggtctcagtctgttgcccaggctggagtgcagtggcaagattgcagctcattgcagccttgacctcctgggctcaagcgatcctcctgcctcggcctcccaactagctgggaccacaggtatgtgccactacacccagcgaatttttaaattatttgtagagtcagggtctccctatgttgcccaggctggtcttgaactactggactcaagccatcctcccacctcggcctcccaaagtgttgggattataggcgcgagccaccacacctggcctaaaagcgtcgttctgatcagacttcacccctgaatgtttctatcattttcttttctttttttttttttttcgagacagagttttgctcttgttttacaggctggggtgcggtgggatgatcttggctcactgcaatctcctcctcccaggttcaagtgattcttgggccttagcctcccgagtagctgggattacaggcacctgccaccacgcctggctaatatatatatatatatatatatattttttttttttttttttagtagagatggggtttcatcatgttggccaggctggtctcgaactcctgacctcaggtgatctacctgcctcggcctcccaaagtgcagggattacaggtgtgagtgagccaccgcggccggcctctatcattttctgactcagcagctccaccaaaattgacatcctagcaaacactgtgaaggaattaacctaagtgcttccagagcatctcatgtaacctctatggagtaagtcactttttctgtaacatgtggcttttgaccttgatgaagactttgacttctcatccctgtctacatggaggaagatgattcagtggtggggaaaatgaacctcggtaacatttccaatgtccttcaagagggaaacaagttcagtgttatcatcgtggcattcgttagtttttttttttttaaatcacttgtttagatacaactttatttttttatacctacatagcacatgactggggggataaagcatgtataagttgggagagggtaaagaatgtgtgactatgtatacagaaaatagactaaaatgtgcagcaaaatgatatatactgtaatctggtttttgaagtatctactattctggaatattgttaaacaactttttgcttttgaaaaaaaaaggtgccttgattcagttgcgtgacttagaacattcatcctattttattgtgatttttaatgtcttctgaccccaaactgtgtttttggttgcagtctggcggctgcaggcatagcgtcggttttgttccaataacagagaccaaagagttaatcagatatggttcagctgctacaattgtatgattcaaaggcaatttaatcaccccaaatttccatggcccccacagtcaagacctgccattcgttttctcttgcaggttggagtaaatttgcactttgaatcatgtgggtcatttggggaccttgttcttttctattttgctttattaataaaggaacttgtagaaacctctggactgaatgtcagatctggggagggctttcgtcttcccggagggcagcctgtgcctgtgctggcttgtagttccttgcacaagcctcaactgctttgagcatctgggtgtatgggaaacttttcccatgcattaaggctggggatcattcttgtgtagaattagctctgtatacaggtgggaaaaaaatgctagttcacaatgctacaggtgtgctccctggaatcctgaatcttcaagtcttcctggcctagaaccttctgcccccacctctcctctctgcctgactctcccacccctgctcccccacacatacccaaacacaatttacgtcttggcctgtggctcaagaattttgtccagaaatctcttaggccctcaggcccttgcgaaatggtaaacatttgctaatacgaaaaaccaccaggcttagcaggagatagaatcttggagactaagggttgttcagagccccagagccaggtagaagcccagggaaacctgcagccatgatgaaacagtagttgtggtcaggcacggtggctcacacctgtaatcccagcactttgggaggctgaggcgggcagatcacgaggtcaagagatcgagaccatcctgaccaacatggtgaaacccccgtctctactaaaaatacaaaaattagctgaacgtggtggcatgtgcctgtagtcccagctacttgggaggctgaggcagaagaatcacttgaacccgggaggcagaggttgcagtgagccgagattgcaccactgcactccagcctggcgacagagtgagactccatctcaaaaaaaaaaaaaaaaaaaaagaaaa

SEQ ID NO: 3190 - DNA, 88 bp, Homo sapiens
ttttttttttttttgagacggagtctcactctgtcacccaggctggagtacagtggcgcgatctcggctcacggcagcctccgcctcc

SEQ ID NO: 3191 - DNA, 635 bp, Homo sapiens
tgggattactggtgcacaccaccataccctgctaattgtatttatttttagtagagatgggattttgccatgttgcccagactggtcttgagctgctgggctcaagcgatcttcccatcacagcttcccaatgtgctgggattacaggtgtgagccactgtacctggccagctttacttcttttaccagcactcctgattttataaatagtgaggcttatcaaccccatttctacccaaatcttctggtagacttgagtatagtagggcttcataggtagcagccctgtccctgtcctattatgatggtagctgttgtgatgtggcgatctctgatctagaaacccctgaggggccattgtggcctgcccagtctcccggccacggttgaaaccagacgtgcagtggggctgacccctgtgccccaccccagagtcatgccagcgtgggtggtggggcattctctgggatgaatgatctggatcccatagccatctgtgtcctgtttgaggaatgggaccctcaaacagagaacagccaagatgctcaagcaggtgtgtgcttgggccagactctgcagcctttggtttgggacttgactgccattcactgaaggggcccaggaaatgggcagct

SEQ ID NO: 3192 - DNA, 274 bp, Homo sapiens
tttaaatcacatactaaatgtgtcatttagaacatatgcttcaagaggtcagggtttatgcttcctttactgctatactgctgacctggaacaacatccagcacacagtagtaatcaatgtgtttttgaatgaatgagtggacaccttacccaggataataattcatgcttattgataaaggcagacaaaccagggttataagttagaacccagaggaagcctaggggtgggaggattcagggtatcacaactgtatctgagaatgaggaggtt

SEQ ID NO: 3193 - DNA, 344 bp, Homo sapiens
gcccacccctggctgcactggggtggtgagagcagccaggacctgctaccctataggaaaaagtcaatttccccagggaatcgaggcaaagggaaaggatgccgagagcccaccagtggcgagaggatgccggtggcttgccaggcccccgtctgctccctgccccccggggagcaccagcaccccagtttgctatccatcggcccagacacaccctgccccatgtccgttagcacctggaatgcgctgtgtgctaggggtgcccctgtggtcagcttgcctgtcctgaagaaagccttccttgggcagcctgtggcttctttgtaggcctgtcccaggtgtta

SEQ ID NO: 3194 - DNA, 28313 bp, Homo sapiens
cctgaccttgtgatcagcccgccttggcctcccaaagtgctgggattacaggcatgagccaccatgcccggccttttttttttttttaaatgagacagaatctcactctgtcccccaggctgtagtgtagtggtgccatcttggctccctactacaacctgtatctcccgggtaaaagcaattatcctgtttcagcctcccaagtagctgggactacaggtgttcgccaacatgcctggctaatttctgtgtttttagtgaagacaggttttcaccatgttggccaggctggtcttaacctcttaaccgcttgacttcctgacaccttggcctcccaaagtgctggaattacatgcgtgagccaccgtgcccagctgtaacttaggtttttatttatttatttatttattcgagacagagtttcactcttgtcatccaggctggagtgcaatggcatgatcttggctcgctgcaacctttgcctcccgggttcaagtgattctcctgcctcagcctcctgagtagctgggattacaggcgcccgccaccacacctggctaatttttgtatttttattagagatggggtttcaccatgttggccaggctggtctggaactcctaaccttgggtgatcagctctcctcggcctcccgaagtgctgggattacagaagtgagccaccgtgcccagccataacttagggttttgttttttgttttgttttgttttgttttgtttttgtttttttttgagatggagtctcgctctgttgcccaggctggaatgcagtggcgcaatctcagctcactgcaacctctgcctcccgggttaagcgattctcctgcctcagcctccagagtagctgggactataggcacatgctaccacgcctggctaattttttgtatttttagtagagacagcatttcaccctgttagcctggatggtctcgatctcctgacctcatgatccacccgcctcggcctcccaaagtgctgggattacaggcatgagccaccgtgcctggccataacttaggttttttgttttttgtttttgtttttgtttttgttttttttttttgagacagagtctcgctctgtcgcccaggctggagtgctgtggcatgatctcggctcactgcaagctctgcctcctgggttcatgccattctcctgcctcagcctcccgagtagctgagactacaggtgcctgccaccatgccccgctaattttttgtatttttagtagagacagggtttcaccgtattagccaggttagtctcgatctcctgacctggtgatctgcccacctcggcctcccaaagtgctgggattacaggcgtgagccactgctcccggccaatttaggtttttaaaatgtggatttggggcaatgaatttggatagacatttttccaatgaagatatacagatggccagtaactacctgaaaacatcatcagtcattagggaaatgcaagtcaaaaccacaaggaggagctgggtgagtggcgctcacctgtgctcccagctactcagaaggctgagaagggcaacagaaggccggaaggccagcctgggcaacatagagtgagacagtctctaaaaaaaccacaattcacattgtgggtgtgaatataaaacagtgcagccagtgtggaaaaacaccttgaaaaacatttcctccaaatgttaggccgggcatggtggctcacgcctgttatcccagcactttggaaggccatggagggcgaatcacctgaggtcaagagtttgagaccagcctggccaacatgatgaaatcctgtctactaaaaatacaaaaattagctaggcatggtggcaggcacctgtaatcccagctcttgggagactgaggcaggagaatcgcttgaacccaggaggtggaggttgcagtgagctgagatcatgccactggactccagcctaggtgacagagtgagactccatgatcaaaaaaaaaaaaaaaaaaaaagttagacatagactcactgtatgagccagcaattcaactcataggtgtatatccacggaattgaaaacaggtattcaaacaaatactagtacccgaatgtcccagcaacactattcacagcaaccccaagtatccactaagtgatggatggatatttaaaatgtgacgtagccacacaatggaatatgtttcagctataaaaaggaatgactgccgggcatggtggctcatgcctgtaatcccagcactttgggaggctgagggggacagattgcctgagctcaggagtttgaaaccagccagtgccacacggcgaaaccccgtctctactaaaaatacaaaaagaattagccaggcttggtggcaggcacctgtaatcccagctacttgggaggctgacccaggagaatcacttgaactggggaaacgggaggttgcagtgagtctagatcgtgccactgaactccagcctgggtaacaaagcgagactctgtctcaaaaaaaaaaaaaaaaaaaaaaagtctgggcgcagtggctcaagtgtgtaatcccagcactttgggaggctgaggcgggcggatcatctgaggtccggagtttgagaccagccttaccaacatggagaaactctgtctctactaaaaatacaaaattagctggacgtggtggcacatacctgtaatcccagctcctcggaaggctgaggcaggagaatcccttgaacctggggagcggaggttgcagtgagccgagatcacgccattgcactccagcctgggcaacaagagcagaactccgtctcaaaaaaaaaaaaaaaaaaaaaaaaggaatgacctacccattcatgtggcaacatgaatgaaccttgaaaacatgatactgagtgaaagaagccagacacagaaggccacgtattgtaggattctatttatgtgaaatattatggggcgggcgtggtggctcacccctgtaatcccagtgctttgggaggccgaggcacgtggatcaccagaggtcaggagttcgagaccagcctgggcaacatggtgaaaccccacctctactaaaaatacaaaaattagctgagcgtgttggtgggtgcctgtaatcccagctgcttgcggggaggctgaggtagaagaattgcttgaacctgtgaggcagaggttgcagtgagctgagattgagctactgcactccagcctgggcaagagtgagacctcgtcttagaaaaaaaaaaaaaaaagtttctgaacaagaggcaaatccttagagctaggcagcccctggttccccgggctgtggggaggggctgtgggaatgactgcttaatgggaatggggcttctttttggggtgatggaagtgtctttaaattcgattgtggtgatggctgtaaaaccctgtaaatatactaacatttatttaattatacacttaaaataggtgaatattaggatatatgaattctatctcagtaaaacttttaagaaatgtttactcaaacatttaaaaatttaggacaaactattgatacatttatttaacaattaggacacactgttgatacatttatttaacactatgggcgaatatcagaatagttttgctggatgaaagaagccaggcaaaacagagtatagactatactttcttttatgtaacattctagaaaatactatccaatctgtactgatggaaagtagatgggtggttgcctagggccccaggggcagggagggacgggagggacagctgggagagataacaaaggagaacctttgagggtggcaggcgtgtttatttcttgattgtggtgatctgggtttcccatgtgtgtcttttactttttttaaatatttctttctttctttattttgagacggagtctcgctctgtcgtcaggctggagtgcagtggtgtgatctcggctcactgcaacctccgccttttggattcaagtgattcttctgcctcagcctcccgagtagctgggactacaggtgctcatcaccacgtccggctatttttctatttttagtatagacagggtttcaccatgttgaccaggctggtcttgaactcctgacctcaggtgatctgcttgccttggccactgaaagtgctgggattacaggcgtgagccaccacgcccagcctcccacgtatgtctttatgttcaaatttattgaattgtacccttttaatatgtgcagtttattgcatgttgattattatattatttatacctctgtaaagctgtttaaaaagagtgggtctggatgctgggtggaaatggcttggaggggtgagaactggaagttgaagagtcagtggaggtggttgcagccgctcagtgggagacgactcagtttgactagggtgaggtctgtggagagaggtgggtggatgacgtgtgctttggcgggacccataagacctggggatggatctgatattgggggtggaataaaggtaggaaaaataggtgatttttaggtgttttgcttgagcagagctctgtctttatcatctctgtttatctaaaatagactaggaactgagggaagactcggggagagacacgctttaggagtaggggatcacgtttcccacgttggaaatcctgtgtgaggtgtgtgaggcgtccaggtgggtggaaacttggtgctgggagaggttgggacgcatcagcatgcacatggtgtttaaagcaggagtgcaggctgagagcccccgagggcctagacccaacctggagcggtcaggagaggagtagacggggagtctgggctgggtggctggcgaggatcaggaggccaggagcgcaggctaggacccaggataggggagcccaggagagctggcgtggccagctgggctgagtacctgtgggtgaggatggtgagatgggcattggacagagggacactagggtctttggtgacaaggagcaatttctgtggagtgaaggggcaggcccagtctagagtggattgaagcaggagcaggaggcgagggagtggggtcggtaggtggaggcagcttgtcggggacattctgcttcgaagggagcagctggaatgtgggggtcaaggctgtgtgtgtatatatctaaggcgggaggtgccagcacacgtttgaatgaggagtcatggaggaggatagcaagcgggcattcgggaggtgccagcacgtgtttgaatgaggagtcatggagaaggatagcaagcgggcattcgggaggtgccagcatgcgtttgaatgaggttcatggaggaggatagcaagtgggcatttgggaggttccagcacacgtttgaataaggattgtggagaaggatagcaagcgggtattgcagggcatagtgtctgtgaagggcagagggggaggatccagggcacaggtggagcccaggagaagggagtggtgtggcttcctcctgtgcagcaggaagggaggaagaagtgagcccggcggcaggtgagtctccagatccatgatgaggtgggcttggagtctcacccacaagaaggttgaggaaatggggcgggtgtgtcctggctgtgcccagagcaccagagagggcattgaagagagctgccaggcagctgcaggccctggcttggtgtcaggaattgaaggtgaaacaagtccaactgatgatgtgaattttcttctccggcaacatttagttgcttgggtgcaggtgggagcagtgggatagctgggctccttcagggcctggccagacaggcctgggtggaggatgagaagcacaagcagaggatggcagcgaaggctgggccccagctggatgaaggcaggccgctaagctgggacaaggagggtgtctccacgaggctgaagagttgagtacagaatgagataatgcatttgctgaagcgtcgtgggtggtggccagggaggcaaagcctgagacgaggttttggggggaagtgattccaagctccgggggtgacactaggagaggtattggaggttgggtgtttggaggtggagaggaagttgtttggaggtggggagggttaggaactgagcgacaaggtgttggatctgtacctatgcacacacatatatgtggacatgtgtgtgtcaagtcactgaggatggtgatagagcaggaatggagaggatggcgagccagcgagtgaggtgcataagggacagtaactggcaatggtaggtgacagtgagtaggaagggctctaggggtgtgctgtcgagtgtgggcattggcatcagggatctggaaggagcagtggagaaggcagacgctgccctcacctgccatctctgaagtctgtgggggatgaggaagaggcagctgtcactcagaggcgagttggggaggtgctcccttcgtgtgaggccagttttggttggggcaggagtgaggatgctggggagaggctgagtctttaggagaggggattgcgtggttggtggaggtagtgccaagtatcaggtaatgagagggcacaccctgtgcccagggacccgggagtctcacctctgcctgttgagggacgcgtttgccagagagaaagcgtcagcaaagtgccatcttccagaggctcagcaagacgtgcaggaggcacaggctccagtagcgaacgccagcctcatgagggtgtttgggaccaggtggctccattagtgagggctggggccctgtgggcatgagggcgcaggcacctgggaggccatttgggtcagctctcccgcggagctacgaccttggggatgtggcgctcctcacgcggagccaagccaagccaaggccaagcctgtgtttcagggactcgatcactgcagggcttagcctggcatggagtaggctccttctctgtgttctccaggccaggggacttgcatgccagaatccttcttcctcatagatttcttgacttaccactctgcattgcaggaggccctccagtcagatgtccagcccagagctggctgcctgtggctgggtagggtcatgtggctgcccagggccatgggataggccgacacctctggtgtggatatagtacaggggagtgggtctcccacagcaggggaagggttcagactcagagggtccagccctgtgaaggcagggcaggtggtgaaggcctcggggtggtgaagtcatggggctgcaggctcaacctcctttctcttgttgacagcactgacgtcttcatctgcacaagccccatcaagatgttcaagtactgtccctatgagaaggtaaggcgtgcgtctgctcagctgagcccttaccccatgcatcacaggtgaggggtacggggctcagcctgcctgtggaaaggggatggaccctcacagcactcccccacctctgtgacagcggctttctgctccccaaggacctctccagcctgaggctctagatggggcctcttatgatgcaggttctccaggaagggtgcctgtcactgtgtcaggttagcctggcccagagtaggcctttgaagggtgagaaccatgcctggggagggcctgaaggcacgtggatgcattaacatgaaaagtcttaaaaaggtgaggtgggtaaagttcattttgctgtatactcactttattatctttattgaaaagaattagagttgcatgaaattgagacctttctggaaattgggaacttgcagttgccaaacccagaggaaaggtctgtggccctggaggagagcactcatgccggaggggtcagggccggccctccctggggacgttggagcagctcttcccgagctgaggaaggcaagatcttcagtccagagcccctcctgctctgggggcgtcaaaccttcaggcatgagttctttcatgttcttcacatgacctttccgctctggattcccattttttttgagacagagttttgctcttgttgttgcacaggctggagtgcaatggcacgatcctggctcactgccaagatcactgggttcaagcaattctcctgtctcagcctcctgagtagctgggattacaagtgcctaccaccacatccaggtaattttttttgtatttttagtagagacggggttttgccatgttggccaggctggtctcgaactcctgagctcaggtgatgtgcctgcctcggcctcccaacgtgctgggattataggcgtgagccaccgtgcctggcctggattccatatttaaatgaaattcatggtcaggcgcggtggctcacgcctgtaatcccagaactctgggaggccgatgcaggtgggtcacctgaggctgggagttcaagaccagcctggccatcatggtgaaaccccatctctattaaaaatacgaaaatcagctgggtgtagtggttcatgcctgtagtcccagctacttgggaggctgaggcatgagaattgcttgaacctgggaggtggaggttgcagtgagccaagatcgtgccactgcactccagcctgggtgacagagcgagactgtccccccacaaaaaaacttaatttaaaaaaaaaaaaagaaattcacacattcagccaacatagcgtgccctctgtgtgctcagtgggaatcacacttgctgaacagttgctctggcattatgtgggtgcttggtgcccactgtttcatcatgtcctcatgacaccttgttccctagttaccctgacatccctcatgattttagagagtgggtcttgttctgtcacccaggctggagtgcagtggccactcacaggtgccatcccagctcactgcagcctcgaactcctgggctcaagtgatcctcccacctcagcctcttgagtagctgggaacacagctgcgcaccacgcaccaccatggccggccttcgctgacccccttttaacacgctaggagcacgagttcacttatacttaggagagaggagtatcttacctgcagccagtaaatgtggattcagagtgtgggccaggcccactgtttcaggtcgagcagtgatcccaaagtgagtcctgagaccagagtcagcatcccttggagactccttaggagtggacatttttcagccccaccctacaccttctgaatcagacactctgggagtagcaatgtgggtctgacgagcccgccaggtgattctcatacaccctcaagtttaaggattgcgggactggagtcactatttcagctggagtttcactgggtggccatggtggttgaccagcagttgtgggagtgagatgaacgacatggcctcattcatccgttcctggggatttagatactgtctttgtgccagctgtcccacctgcgttgcctcggcccgggactgccctctgagctccagacactcagacccgatgtatctgtccctggggtgctggtttccttgtgcatggcagtgctgtctggtggcctcaggtcggaaatcaggggccgtgctgatgtcttcctctaagccctcacttccagcctgttggtgagtcccatgtcccatgggaccgatttcgaaaacgtgcctggcacctgtctgcttctgtctcttctcattgccagcatcttggcatttactgccagtacagctgacagggcctcctaaactgcctgctcctttcagttccatgcaggctgacaaggccctcacagagcagatcatggcagctcctgacttgaaacctctgaatagtttccctttaaaaaccacatacaccctcctgagcatgacctgcagggcctgcctgcctctccacccactgtgcccccctctctgtgtgcttctccagcagcttttggcttggaatgttctcctcccacccctaggtctggtgccttcttgtccacgaggcctcggcccagaagtctccccacatttcgtgaccatcatattgaagtgtattctttctccatcttgttttttggatgacacttcccaccacttgaaatgggtttgtgttttcgtctgtggcttgttcttggtccatctcctgactgggctgggacctgtgcaggctgggctctcaccctcctgcccactgtcaagcccagcacccagcgcagggtggcacactgggaggactcagcgtttgttgttaaatgagtagattcatttgtccaacagagagttattaaacaccggcgagtacagtgcttgccattcatttgacacctttgatacgccaggcaatgtccctttattctcacttttgaggtttacaacagctgcctgtgaaacaagaaaactcttctgatttgacagatgaagaaactgaggctcagagggatgaggcagctcatttaccaggtctgacgcttggccagccagtgaggcctgctccgggtctgcctgtcaagagcctgtgcccaccgccagtgtgttcccctggaggtagcctgcattcactggagaggatttggaaaccgcgcatatttaagaggaaagggatgtcaggaccccagtcacagtaacatcaacaggctctggctcacttgaacaaaggcaggactgattagaaggatattgccttgctcagggaatcaaagggaagcccgaggaagcaggcctgaggccgtaggggcagagcccgcagaccgtctctccagcaaacagcccaagacgctgaagcgccctttctccatccttgggtttcattgcccaagattcctagtccccaggagagggaggcccatcagctgagcttgggtcccacacccagccctgggtgccctgatggactgtcctaaaaggctgcagttggtggcagaggcgtggcttcccagaggagttgagatgctgttgccagaagaagggtcacactcatagtggatgtcctgatcaaactaaacgaaagagcaaaggcaacaagaatccacatctacaatcccaccacctggagagagatgctgttagcactttgatctggttctttctagtttttttgtgggggagtaggggagacagggtctcactatgtcacccaggctggagtgcagtggtgcgatctcggcttactgcaacatccgcctcccaagttcaagtgattctcctgcctcagcctccttagtagttgggattacaggtgtgcgccaccacacccggctaatttttttttgtatttttagtagaaacagggtttcatcatgttggccaggctggtctctagctcctgacctcgtgatccacccatcttgtcctcccagagtgctaggattacaggtgagccaccacacccagccctcgtttttctttgatgcgtattaaatataatacatgtattttaacaaagctttcatccaacatagttatccttttctgcttattaatatatttttagccttttttctgtcatcaaacacttcagaaacatgatttttttttttttttgtgagacagggtccagctctgtggcccagactgaagtgcagtgacacgatcttggctcactgcaacctctgcctcctgagtttaagtgattctcatgcctcagcctcccaagcagctgggacaagtgtgtgtcaccatgcctggctaattttttatatttttgttctgttttgtttgagacagagtcctgctctgtcacccaagctggagtgcagtggtgcaatctcagctcacttcaacctccacctcctgggttcaagtgattatcctgccccagcctcctaagtagctgggattacaggtgcgtgccaccatgaccagctaatttttgtatttttagtagagacggggtttcgctatgttggtcaggctggtctcaaactcctgaccttgtgatccacctgcctcggtctcccaaatgctgggattacaggcgtgagccaccacgcccggccaatttttttgtatttttaatagagatggggtttcaccatgttggccaggctggtctcaaactcctagcctcaaagtagtctgcccatctcggtctcccgaagtgctgggattacaggtgtgagccaccatgcccagccagaaacatgattgttaatagctgaagacgtctagtgagtaagcctttgtatggtcatgttcttagggtgaattccaagaaatacaattcctgggtcacgcgaggaaaggtagggttcgggtatatatcacacagaaatttgtattcatttccactgtaccagccgtgggcagggtactttcctcctgccaggggctaggctggaccacatagggtcagtcaatagaggaagcaggccattgaacaaacacatgaagacaggaaagtgcacagcagatttgaggaattcagggtgaattttgttggccagtggctacaggggctgattgggagcggggttgggccaggtgaaatggattagtttatccaaatctcccagctgtcctcatggtttagccacaccaccacctttaaccctagaactaagacaaggggagaagtgcgggtgagaagtgagtaaggcgaaggttgcttccaagcaccccctcacccaccgtttgtgcccctcccaaccctatggactggtacttcttccctggctgagggcgggctggtattaatggttcctgtgttccatgcctgggggaggcaaggaagggctggagatgggtctcggggcacatctgcacaggacagaggtctcccacggtagccccggtctaggcttaagccccagagcactcacagttccttccccagctcctgtccactgagtaggttcagcctttgttgctagaagtggaaacttttctccttggttgattttctttcaagacccagtcagaggatgggaacctgactgctgtgaggtctctcactttatcaccacatggagggagtggaattgggttacattcaggttgccagaaccttctttctggctggaaagaaggtttcccaacattctaaacccagattgctcggtaatagttaacaatagccaagctggtagtatacgtctccaagggctttccctgtagtgatccatttagccttcatagtagccctacaaaataggtatttctattttttatttttattttttagacggagtctcgctctgtctcccaggctggagtgcagtggcgtgatcttggctcactgcaagctccccatcccgggttcatgccattctcctgcctcagcctcccgagtagctgggactacaggtgcctgctaccacgccgagctaatttttttgtatttttagtagagacggggtttcactgtgttagccaggatggtctcgatctcctgacctcgtgatctgcccgcctcggcctcccaaggtgctgggattacaggcgtgagccgcagcgcctggccttaaaataggtatctttattatccctgttctacagatgggcagactgaggcacagacagttgaagctgagggttagcggccagaaagtggggagtcagacttcagagcccatgctctgctcctcggcctcactgcctcttctcggactccttgacttgaaacttaagcagcatgacctgtaccttttcaccccctagagagatttgaaaatccgtgtcaggttcttcatgcacaggcatggcattttactctgagattttccagttcaacaaggggagtaatcacaagccaaattaagggaggggcttgggtgcgaaggggaatgtgctcttctgatttgaagtctggtttccagatgacatgtctgcctgattcgacgttgatttttagaataaatgtcaaaaattcccacttcaggccgggtacagtggctcatgcttgtaatcccaccactttgggaggctgaggcaggaggatcacttgaacccaggagtttgagacctgcctgggcaacatgatgagaccccatctgtactaaaaaaaaattagccaggcgtgctgatgtgtgcctgtagttgcagcatcttgggaagctgaggtgggaggattgcttgagcctgggaggtcaaggctgcagtgagctatgatcatgccactgcattacagccttagtgacagagtaattccctgtctcaaaaaaacaaaaacaaacaaaacaaaacaaaacaaaaacctactcctggctgggcgtggtggctcacgcctgtaatcccagcactttgggaggccgaggtgggcagatcatgaggtcaggagattgagaccatcttggctaacacggtgaaaccccgtctctactaaaaatacaaaaaattagccgagcgttgtggcgggcgcctgtagtcccagctacttgggaggctgaggcaggagaatggcgtgaacccgtgagacagaggttgcagtgagccgagatggtgccactgcactccagcctgagtgacagtcagactccgtctcaaaaaaaaaaaaacaaaaaaaaaacccactccttaattgagcctcttcctctaacctgaaataaaaacgtaaaaacgtagactttttttttttttttgacagagttttgctgttgttgcccaggctggaatgcaatggcgtgatctcagctcactgcaacgtctgcctcctgggtttaagtgattcccctgcctcaacctcctgactagctgggattacaggcatctgccaccatgcccggctaatttttgtattttttgtagagacaaggtttcaccacattggccaggctggtctcgaactcctgacctcaggtgatccatctgcctcagccccgcaaagtgctgggattacaggtgtgagccaccgcgcctggccaacatagaccattttttttttaacttaagataatgaattacatttctttgctttctttctttctttcttttttttttttttttttgagacggagtctcactttgtcacccaggctggaatgcagtggtgtgatctcagctcactgaaagctcagcctcccgggttcacgccattctcctgcctcagcctcccgagtagctgggactacaggcacatgctaccacacctgtctaattttttgtattttagtagagatggggtttcatcgtgttgcccaggctagtcttgaactcctgagctcaggcaatcgcctgcctcagcctcccaaagtgctaggattacaggcgtgagccactggacccggccttctttgcatattttacattaaatttccagttgctccagtacgttttccagttactccctgtaggacttaggctaaaagacttggcactttctcttggcatgtaaagaaaccctaggttcttttggggatggcacggccacactgccagcattcaggagcttcccctggagctcctgaaccccagtgtcacccctgccatctcagtggggctcatggtgtctttcttggcgtgtttctggcccataccgtgtttattttaaaaattgttcatgctaattggcatggggtttcttttaggggtgatggaaacattctggaatttagatagtggtagtggttgcataacattgttgatacactaaagaccattgaattgtacactttaaattggtaaattttatgatatgtgaattacatttccaaaaaataaaataaaattggctgttcagatggctaataattccaaagctaactcactccttctagttagatctggccatttcatcattgtaatagggattgtagacaaaagtgcatgatccctttatttatttatgtaattttttttttaaagacagagtctcgttctgttgcccaggtggattctagtggaacgatcatagctcactgcagcctctaactcccagaccatcgtgcctggtcataatacctttaaagtgtcctagatcaagccattcattttgaaaacctccagttttatggtattctttttctttttcttttctttttttttttgagatggagtctcgctgtgtcacctaagctggagtgcagttgcgcgatctctgctcactgcaagctccgcctcctgggttcacaccattctcctgccttggcctcccaagtagctgggactacaggcgcccaccaccatgcctggctaattttttgtatttttagtagaggcagggtttcagtgtgttggccaggatggtcttgatttcccgacctcatgatccacccgcctcggcctcccaaagtgctaggattacaggtgtgagccaccgcatccggcctatggtattatttttctagcagtgtcattcacccaactccacacctgcataccccaccctccttgatttaagacctgtcttgggatctgctcatctgagtggagcaggactctgtcccttccaacattttgcctgctagggactgtgtctagctcatagatctcttatttctgatgtgtccatttggtcatgggcctgtgagccacgcggagcaggaagggcagggaggtggggtcgagagctgccagccatctgcccctctgatcttttccagcactgtcctctgccagcatccccctttacttctgtgtcttcttggtaatcactgaactctttgctctcgaggtggttcatggacttcctgcctgcactcctaggtcttggagagagcgcctcccctgggagtcctgccagcaattctttagctacatgtagttttaggttccatggcaggcatttttcctgattctggtttagaacgacagcaccgctttatgcttggatacctttacattcatctgggctgaactattttctccccagagctttcaggaaccaaaatggtaatcaggtgatgagcagcccttctccttccaaacagctgctgataaacctaacagacccttgtcaggcaaatctgagctaaaggcacaatgcccccaccagtgtgcacattattatagctgttgaacctacgtcagtgcaccatggtcactcagagcccatagtttacatcagggttcactcccggtatcctgcgttctgtggtattggtaatcggggaggctgtgcgttgtgtgggagtggagggtatatgggaactctgtacctctgctcaattttgctgtaaacctaaacctgctctaaaaaataaagtctcttaaaaaaaatccacagtgaatgagagtccctcttgctccctatccttgtcagcatttggtattgtcagggctctggattttggctgttctcataggcagggagtggtgtctcattgttgttttgatttgcatttccttgattaatgacattggacatgtttttaagcaagtaaccctttgtatattttctgtaacgaaatgttcaagtcttttgcctcgtttctcattgagttgtttgtgagttgtgagagttctttagatatgctagaaacaagttctttatcagataatgtgttttacaaatattttatcccagtctgtgatttgtattttaattttctttttcttttttttcttttttgagagacagagttttgctgtcactccagctgaagtacagtggcatgatcccgcctcactgcagctgtgaccccctgggctgaagtgatcctcccaccttagcctcctgagtagttgggactataggtgtgtgccgccatgccaagctaatttttaaaacactttttttttgtagagatggggtcttgctatgttgcccaagctggtcttgaacccctggactcaagcaatcctcctgccttggcctcccaaagtgctgaggttacaggtgagttttctcaacagagtctttagaagagcagaagttttatacttttagattttttatttaggttatgatccatttgtttttttgagacggagttttgctttgtctccctggctgtagtacaacagcgtgatctcggctcactgcaacctccgcctcccaggttcaagcgattctacctgcctcatcctccctagtagctgggattacaggcacctaccaccatgcccagctaatgtttttgtatttttttttttttttttgagatggagtctcactctgtcacccagtctggagtgcagtggcacaatctcggctcattgcaaactccacctcccgggttcatgccattctcctgcctcagcctcccgagtagctgggactacaggcacccaccaccacacctggctaattttttgtatttttagtagagacggggtttcatcgtgttagccaggatggtctcaatctcctgacctcatgatccgcccgcctcggcctcccaaagtgctgggattacaggtgtgagacaccgtgcctggtatgtttttgtattttagtagagatggggtttcaccatgttggccaggctggtgtcaaactcctgacgtcaagtgatccacctgtcttggcctcccaaagtattgggattacaagcgtgagccaccatgcctggctcgttttgagttaattatcatatattgtaggaggtaaaaatggagaggttttttttttttttgcatgtggatccagttgtgcctctgttggaaaggccaccctttctcactgaagtgtcatggtagcctggggtccatttctggaatgtatcctgcttctctgatctaagtgtcccacctaatgtaaataccacactgtctcagttactgtagtttttttttttttttttttgagatggagtcttgctctgtcgccaggctggagtgcagtggtgtgatctcggctcactgcaacctcctactgggttcaagtgattctcgtgcctcagcctcccgagtagctgggattacaggcacgcgccaccacacccagctaatttttgtatttttagttgagacggggtttcaccatgttggccaggatggtcttgatctcctgaccttgtgatccgcccactttggcctcccaaagtgctgggattacaggcgtgagccactgtgcctggccactgtagttttatagtaacttttgaaagcagtgtgagttttccaaaattattcttcattttaaaaattgttttggctattctgggtcctttatatttctatagaatgtttagaacaagctggtcagtttctacaaagaacctggtgagaatttgattgcaagtgcattgtagctataaagcttaacaatattgggtcttctgatccacaagcacatacacatcctcatttatgtaggccacctctaccttctctcagcaatgttttgtagctttcagtgtaccactcttgcacatattgtgttaaatttgtctctatttcatgtttttttttttggcatagagactatctttataaatatatttttaaatattttataatggtaaatacacatgataaaatttatcaagtgtacagttcagcttatttcgtttttaatgctattataaactttgtttaattgaaatttccaaatatatagaatacaagtgatttttttttttgagatggagtcttgctctgttgcccaggctggaatgcagtggtatgatctcggctcactgcaagctccgcctcctgggttcatgccattctcctgcctccacctcccaagtagctgggactataggcgcccgccaccatgcccagctaatttttggaatacaagtggttttttaattttaatttttaatttttgtgggtacatagtaggtgtgtatttatgaggtacattagatgttttgatacaggcatgcaatgtgtaacaaacacatcagggcagatggggtatccattatcaccttaaacattcaatcctttgtgttatagacaatccaattatattcttagttgttttaaaatgaacaatttttttttttgagatggagtcttgctctgtcactcaggctggagtgcagtggcgcgatctctgctcactacaacctctgcctcctgggttcaagcagttctcttgcctcagcctcccaagtagctggaactacaggcacgtgccaccatgtccggctaatttttgtatttttagtagagacggggttttgccatgttggccagctggtctctaactcctgacctcaagtaatccacctgccttggcctcccaaggtgctgggattacaggcatgagccaccacgcctggccatgaacaattaaattatttttgattatagtcaccctgttgtgctagcaaatactaggtcttattcattcttttttttttttttttttttgagatggagtctcgctctgtcacccaggctggagtgcagtggcgcgatcttagctcactgcaaactctgcctcctgggttcacaccattctcctgcctcagcctcctgagtggctgggactgcaggtgcccgccaccacgcccagctaattttttgtatttttagtagagacagggtttcaccgtgttagccaggatggtcttgatctcctgacctcgtgatccgcctgccttggcctcccaaagtgctgggattacaggcatgagccaccgcgcccagcctattcattctatttttttgtgcccattaactctcttcactttccttctagatactcctccactcccccttcccagcctctactaaccatcctcctactatctccatgagttcaattgttttaatttttagctcccataggtaagtgagaacatgtatagccctttctgtgcctggcttatatcacttaacataatgacctccagtgccatccatgttgttgacaatgacaggctctcattcttttttcttttcttttttttttttttttgacggagtcttactctgtcacccaggcttgagtgcagtggcgtgatctctactcactgcaacctccgcctcccgggttcaagtgattctcctgcctcagccacctgagtagctgggactacaggcatgcaccaccacacctggctaatttttgtatttttagtagaggtggggtttcatcatgttggtaaggctggttttgaactcctgacctcttgatccaccctcctcggccttccaaagtgctgggttgctctcattcttttttatggctgaatagtacttgattgtgtatatttaccacattttttaaatccagtcatcagttgatgtacactgaggttgcttccaaattttggctattgtgaatagtgctgcaataaacatgggagtgcgagtatcttttccatatactgatttccttttttttaggggtatatacctaggagtgggactgctggattttcagaggaactgccattatattcctaccaatagtgtacaagggttttattttcttcttgtcctctccagcatttgttattgcctgacttttggataaaagccattttgactggggtgagatgatatttccttgtagtttgatttgtatttctctgatgatcagcgatattgagcacctttttatatacctgtttgtcatttgtatgtcttttgttttgtgttgttgagacaggatctcgctctgtagctcaggctggagtgcagtggtgtgaaaatagctcactgtagcctcaacctcctggactgaagctatctttccacctcagcctcctgagtagctgggactatgggtgtgtgccaccaagcctaattttttttttttttctttagactgggttttgccctgtttctcagactggtgtacaagtggtttaatcatggctcactgcagccttgacttcccaggctcaatcaatcctcccaccttagcctcccaagtagctgagactacaagcgtgtgccaccatgcctggctaatttttgtatttcttgtagagacggggtcttactatgtagcccaggctggtcttgaactcctgcccacctcagcctcccaaagtgctgggattataggtgtgagccatcacacgcagccaccatatgtcttcttttgagaaatgtctatttagatcttttgcccattttaaaatcagattattagatttttttctatagagttgtttgactccttatgtattctggttattaatcccttgtcagatggatagtttgcaaatactttcttccattctgtggattgtctcttcactttgttgactgtatcctttgctgtgcagaagctttttaactggatgtgatcccatttgtccgtgtttgctttggttgcctgtgcttttggggtactattcaagaaatctttgtccagaccaatgtcctggagagtttccccaatgttttcttttagtagttcttgtatatggcaagagataggggtctagtttcattcttttgcatatggatatccagttttccagtgccatttattgaagagactgtcgtttccccaatatatgttcttggcacctttgtcaaaaatgagttcaaggtagatatatggatttatctgtgggttctgtgatctttttttttttttttgagacggagtcttactctgtcgcccaggcgggagtacaatggcaccatctcggctcactgcaatgtccgtctcccgggttcaagtgattctcctgcctcagcctctggagtagctgggactacaggcatgtgccaccatgcccagctaatttttgtatttttagtagagatggggtttcaccacgttagccaggctggtcttgaactcctgacctcacgctatccgcccgcctcggcctcccaaagtgctgggatttcaggcatgagccactgcgcctggcctggttctgtattcttatccactgatctgtgtgtctgtttttatgccagtaacatgccatttggactactgtagctttgtagtatcatttaaagtcagataatgtgatttttccagttttgttccttttgcttaggatagctctggctattctggaatttttgtggttctatgtaaatgttaagggttttttttttttttttttttttgtatttctgtgaagaatgtcattggtattttttttttttttttttgagatggagtcttactctgtcacccaagctggagtgcagtggcgcgatctcggctcactgcaagctccacctcccaggttcacaccgttctcctgcctcagcctcccaagtagctgggactacaggcgcccgccaccacgcccagctaattttttgtattttttagtagagacggggtttcactgtgttagccaggatggtctcgatttcctgacctcgtgatctgcctgcctcggcctcccgaagtgctaggattacaggcgtgagccaccgcacctggcctgtcattggtattttaatagggattgcattaaatctgtaaattgctttgggtagtatgaacattttaactatatttattcttctaatccatggacatggaatgagtatctttccactttttgtgtcttcaatttattctatcagtgttttatagtttacagtgtagagctctttcacttgggttaattcttaggtattttattttatttgtagctattttaaatgggattcctttcttaattttttttcagattgttcctgtttttttcaggattgttcctgtttttttcagattttgtatcctgcaactttgctgactttatcagttctagtagttttttggtggaatctttaggtttttccaaatataagatcatgtcatctgcaaacaaggataatttgacttctaatcctttctaatttggatgctctttctttctttctcttgtctgattgctctagcgaggacttccagtactatgttgaatcacagtggtgaaagtaggcattcttgtcatgttcccggtcttagaggaaaggctttcagtttttccccattcagtatgatactagccatatataggtctgtcatatatggcttttattatgttgaggtatgttccttccatacccagttttttgagggtttttatcatgaaaggatattgaattttatcaaataccttttcagcaccaattgaaataatcatatgttttttgtccttcattctgttgatatgatatatcacattaattgatttgcatttgctgaactatcctggaatccctgggataagtcccacttggtcatgctggatgatctttttaatgtgttgttgaattcaatttgctaatcttttgttgaggattttaggaatcaatatttatcaatgatattggcctatagttttcttttctttttttcaatgtgtttttgtctggttttggtatcacggtgatactggcttcatagaatgagtttggaagtattccttccttctgtatatttctgaatagtttaagtaggattggtattagttatttaagtgtttggtagaattcagcagtgaagctattgggtcccggccttttctttgctgggagactttttattatggcttcagttgttgttacttgttattggtctgtttgttttgaatttcttcatggttcaatcttggtagattgcatgtatctaggaatttgtccatttcctctagattttctaatgtattggcatgtagttgcccatagtagccaccgatgattgtttaaatttctgtaatatcagttgtagtgtttcctttgtcatctctgattttatttatttgggtcttctctctttttttcttagtctggctaaaggtttgtcattttgtttacctttccaaaaaaccaactttttgtttcttttcacaaaaccaatcttttgtattttttttatttcatattcatttatttctgctctgatttttgttatttcttttctttcctttcttttcttttttttttaattttgagatggagccttgctctgtcgcccaggctggagtgcagtggcacaatctcggctcactgcaacctctgcctcctgggttcaagcgattctcctgccttagcctctcgagtagctgggactacaggtaggtgccaccatgcccagcttatttttgtttttttagtagagatggggtttcaccatgttggccaggctggtcttgatctcctgaccttgtgatctgcccgccttggcctctcaaagtgctgggattacagtgtgagccaccgcgcccggcctgctcttgtttttctgtttctttaggatgcatcattaagttgtttacttgaagtttttcttcttctttttttattttttttaaattcaggcccccacagaagcattttcttcttttttgatgtggcacttatagctataaacttccctcttagtactgcttttgctgcatcccataggttttggtatgttgtacttccattatcatgtgtttcaataaatttttcaatttccttcatttcttcattgacccacttcattcaggagcatgttgtttaatgtctctgtgtttgtatagtttccagaattcctcattattgatttctagttttattccaaaaatacatgtgatttttttatattgaccttgtatcctgttagtttgccaaattaacagttctagttgctttatgtagatgatttggggctatgaaagtctagttataataattacatttatttagtacgtctgtatcaggcattactcaggtgtcctcacagttttttatttgatcataccagcaacactgtgaggaaactgacctcacagtggaagtcactggcttgcccaaggtccccagctcgtatgtatcagaaccagacttagggcctaattttgagggtaagacaaaaaggtagaatcctttttctgaagactttctgtgtgccaggtgcagtactgagactctgatgcataattttccactaaatccccgaaggcactcacgaggtagatgctgtccttatccctgtgtcaccacacagggaccagacaacctgctgagggatagagatactcacgtgagaagctggtggtatctatgcgcagtggccacataagtgctcatggctgggctccaggaggctcagggggaaccccatgccctcttctatttttacctcttaccatatataaaatttaaccctggctgggtgcagtgggtcatgcctgtaatcccagcactttgggaggccacggtgggcggatcacaaggtcaggagtttgagaccagcctggccaacgtggtgaaaccccgtttctactaaaaatacaaagaacttagccaggcatggtggcaggcgcctgtgatcccagctacttgggaagctggggcaggagaatcacttgaacctgggaggtggaggttgcagtgagccgagatcgtgccattgcactccagcctgggcgacagcaagactctgtctcaaaaaaaagaaaaaaaaaaattaaccccaaatgggttaaatacatataaatacatatatacatataaaagctaaaagtataaaacttctgctcttcaaaaggcactgttcagaaaatgaaaagacaaatcacagatcatgaaaaaatatttgcaaaatgcattgtctgataaaggactggtttctagaatacattaactactctcacaactcaatacaaacagcccactttgttttgccgtttatgtgacccctgataagtcacagaccctctctgagcctccatttcttcatctgtacgggatctcgtcaccactatcgtggcacatcattttcccacgcaaaccctttctgcagagcagctccgtattttgtctgcagagtggcgccggtccgagatgaaacacggaaactgggtgtgtgtgattggaaatgttcatggcagtttgtctgatgcagtgttcaggcacatgatttgatttcatatcttacaaaagcattggtcacaatgcagtggaaattaaaaaaacaaaacctgacccttctcttcccacactcccagatgttccatgttccagccacactccagggttttccccattcctcaaacacctgagcaccggcctgccttggaacatcagtgtttgtttttccctctgcctggaatgttcttgccgacctgtggagagccagccgccttgtcagtcgggtccagagaagatgccgcctttgcagtgaggcctctgtgtgaggttggagctctgtgctgactgcagagcccttgccccctggctatcgttgtctgtggcctgtgtgcctcctcctgctatgtgcactccatgggtctcctgttgaccatcgtctctctggttcctggaactgtacctcatgcaatattggctaaattactacacaagtcaggaaagtttggctacttggaatgttgccgtgaggcttagatacgatgacggacactgcatgcctgtggagtgggtctgctgaaaacattagccccaggctcttgccccccatccagcctgcaccagcgatttacagtcctgtggggaagatgcgaagtaagttatagagatgtgtagctccgactgtgacattgctagggaggacaattagactgggagagttcagggaaggcttaggaggtggcagctttagaaggataggtgctcactgggctaggagaagggccctgtgcatatgtgtgtgtgtgtgcatgtgtgtgtgcacacacgtgtccatgaaggaatgttccagtcagaggaaatggcacatgtgaggctctgagcaggaaaaagcataatacagtcaagcagtgagaggaggttgtcgtgggtgggcgtggcaagcgaggtggccacagggaaaggtggcgctgggacagcggtagggctggtctgctctgcagatccggcccttttcccacgtcccgtgtgctggccggttgcagagggtcatgtggtgtctgcctttgtgaagtgggactcctgaagcgacctccaactggaagaaagccaccctaaggcacccatgtcccatttccttgtcatacacagggaaaaacggagtccctgggagggcaaggacctgcccggctctgccccagggtggcagagccctgagctccctgtgcagcctgggccactcagtgtttctgtttgtttatgcaggaaccagaggagcttagggaaaaagtgcatccagtcctgcccctcctctgcttaaaatctgctgctggttaacctctgtagctgtaacagggtctgtgacttaagggttggttgccagtgtcagaaatcaacaagggtgttggaatctggatggctgtagagacagcctggagctgggcagggctcagttagggtgcctggggcccatgggccagagcaggtgccgtgcttaggctgcgcccacccctggctgcactggggtggtgagagcagccaggacctgctaccctataggaaaaagtcaatttccccagggaatcgaggcaaagggaaaggatgccgagagcccaccagtggcgagaggatgccggtggcttgccaggccccggtctgctccctgccccccggggagcaccagcaccccagtttgctatccatcggcccagacacaccctgccccatgtccgttagcacctggaatgcgctgtgtgctaggggtgcccctgtggtcagcttgcctgtcctgaagaaagccttccttgggcagcctgtggcttctttgtaggcctgtcccaggtgtta

SEQ ID NO: 3195 - DNA, 344 bp, Homo sapiens
gcccacccctggctgcactggggtggtgagagcagccaggacctgctaccctataggaaaaagtcaatttccccagggaatcgaggcaaagggaaaggatgccgagagcccaccagtggcgagaggatgccggtggcttgccaggccccggtctgctccctgccccccggggagcaccagcaccccagtttgctatccatcggcccagacacaccctgccccatgtccgttagcacctggaatgcgctgtgtgctaggggtgcccctgtggtcagcttgcctgtcctgaagaaagccttccttgggcagcctgtggcttctttgtaggcctgtcccaggtgtta

SEQ ID NO: 3196 - DNA, 2872 bp, Homo sapiens
agtatgcctgggtggagaagtactttggccctgactttctggagcagattgtgctgaccagagacaagaccgtggtctctgctgaccttctcatagacgaccggccggacatcacaggcaagtggcctgcgacaggtgaggagcacgtggggagggccccagccttggcccccttctcctgggcagtgagcactcagttgcttcctgccccacttagtcaccagctgtttgccaggcactgagcccctccccttcgggaagacaaggccccctctgtatgggctgtggcctggtgctcctgggagctgggaggagtgggtgccagctctagggttagcttgaggggtggccttggggaagtcccttcagcttcaaagccttgtcttcctcatgtaacatggggactcaactctggtttccaaatgtttgtttttagcaacaaaacccattttttcccccaaaagcaatgtggactgatgcaatgaatgacaggagggcagagcagagctcctgcagggaaggtgggttgggacagaagacccccctccccaaaaccaaacaagccagtcaaccttgaactgccgtagaaaggagagggagatgggcgtggtgactcacgcctgtaatttgggaggctgatgtgggtggatggcttgagcccaggagtgtgaaaccagcctggccaacatagcgagactctctctacaaaaaatacaaaaattatctgggcatggtggtgcatgcctgtagtcccagctacttcaggggctgaagtggaaggattgtttgagcctaggagttggagaccagcctgggcaacatggtgagactccctgtctctacaaaaaaaaaaaaaaaaacacaaaaaaattagctgatcatcatggcgcatgcctgtggtccctgctactctggaggctgaggtgggaaaatcacctgagctggggaggtggaggctgcagcgagctgtgattgcaccactgcattccagtctgggtgacagagtaagaccctgtctccagaaaacaaaacaaaatacaacacagcacaggagaggggaagttttttggtttacctaactggaaaggggtgaggagggctttggccggccaaatctaggcgttgaaactgcccgtgagtgttgtttctttgcctcttggctctgccctggcctggtttttgacatcctcctcctggtagccgtcagtagtttcaggtcgagtcttttggacaccccagtgggaatatacattctatttttttccctgattgttttagaactggcttgggaaacatgcccacctccatcactgcgtccagagggtggactccacgagtgtacccaccccaccccaccctccccagcctcgtgggttcccgccagagtcagggcagacagtggtctgtggggtcccgtgaccttgagggcccaaaggctggcttggcctccatctccagccacaggttgttgggggcgggtgtataacccaaaggggtggcgtcaccagcagcaccagtgtggacacgagggaatgaggcctggagaggctgcaggggcctgtgatcagcggctggtgagctgcagagctggtgccacctggccttcccacaccaggccatcaggatggtggggcacagagagggaagttgggggaacaccgtgtggtgtaagccatcaggatggcagggcacggagagggaagtcgggggaacaccatgtggtgtaagccatcaggaggcggggcacatgtcccttgccagtgctggtggtgacagtgacctgcagtcagtccctgttgactgagcactggctgcgcgtgctgacggcctccttgccgcatctcgtgccatcctcacacccgctgcgaaggcgggtgtgcgtgcagtcacccctttacagaggaaacaagttttggcaaggccagatgcctgcctggatacccaggtttccaccctaggcggctgcgctccaggtctccactgctgagctgaatgccgctttcccacccacaggggccgagccaacccccagctgggagcatgtcctcttcaccgcctgccacaaccagcacctgcagctgcagcccccccgccgcaggctgcactcgtgggcggacgactggaaggccattctggacagcaagcggccctgctgagctggactgtgcttcgggctcctctgtggggctctgacctcagggctcccagctcggggcctgtggggccagtatgctggtctgggagtccctcctagactcctgggccccatgacctcctgctgcatgtcccttcccttccccagccctgccaggccttaacctgatcacggggcagggctgggccctctgggcgcttggacatagacacgtggtcccaggccgttcagcctgacctcaggcagcaggcaccaagctgccagaagcccaggggctcaggacagggaggagttgaggccactgttcagggggctggtggccgtctccactccctaggcaagttctctgaggcagaagggggttccctgttcccagagtctgcagccatcagcaaggaggaccaggaacccggcgactgaggtgcttccaggtggggacaagcccctcttggtctcagccacagcaccccttattccagctgccctgcccaacctgctcaccccacatgaccttctgtgtattcagcaaacactcactaggtgacagcggccaccaggctctgtgctgggggacgatactggccctggcctcgaccagcttagaggtttctcacacctctgttcccagggccccgctcagggcccagcagagagtccgtaggcttgaacatgtgttgagtgcatgaaaaataaatgctgttcatgtgtgtagctcaa

SEQ ID NO: 3197 - DNA, 1878 bp, Homo sapiens
tttttttttttttgagatggagtcttactctgtcacccaagctggagtgcagtggcgcgatctcggctcactgcaagctccacctcccaggttcacaccgttctcctgcctcagcctcccaagtagctgggactacaggcgcccgccaccacgcccagctaattttttgtattttttagtagagacggggtttcactgtgttagccaggatggtctcgatttcctgacctcgtgatctgcctgcctcggcctcccgaagtgctaggattacaggcgtgagccaccgcacctggcctgtcattggtattttaatagggattgcattaaatctgtaaattgctttgggtagtatgaacattttaactatatttattcttctaatccatggacatggaatgagtatctttccactttttgtgtcttcaatttattctatcagtgttttatagtttacagtgtagagctctttcacttgggttaattcttaggtattttattttatttgtagctattttaaatgggattcctttcttaattttttttcagattgttcctgtttttttcaggattgttcctgtttttttcagattttgtatcctgcaactttgctgactttatcagttctagtagttttttggtggaatctttaggtttttccaaatataagatcatgtcatctgcaaacaaggataatttgacttctaatcctttctaatttggatgctctttctttctttctcttgtctgattgctctagcgaggacttccagtactatgttgaatcacagtggtgaaagtaggcattcttgtcatgttcccggtcttagaggaaaggctttcagtttttccccattcagtatgatactagccatatataggtctgtcatatatggcttttattatgttgaggtatgttccttccatacccagttttttgagggtttttatcatgaaaggatattgaattttatcaaataccttttcagcaccaattgaaataatcatatgttttttgtccttcattctgttgatatgatatatcacattaattgatttgcatttgctgaactatcctggaatccctgggataagtcccacttggtcatgctggatgatctttttaatgtgttgttgaattcaatttgctaatcttttgttgaggattttaggaatcaatatttatcaatgatattggcctatagttttcttttctttttttcaatgtgtttttgtctggttttggtatcacggtgatactggcttcatagaatgagtttggaagtattccttccttctgtatatttctgaatagtttaagtaggattggtattagttatttaagtgtttggtagaattcagcagtgaagctattgggtcccggccttttctttgctgggagactttttattatggcttcagttgttgttacttgttattggtctgtttgttttgaatttcttcatggttcaatcttggtagattgcatgtatctaggaatttgtccatttcctctagattttctaatgtattggcatgtagttgcccatagtagccaccgatgattgtttaaatttctgtaatatcagttgtagtgtttcctttgtcatctctgattttatttatttgggtcttctctctttttttcttagtctggctaaaggtttgtcattttgtttacctttccaaaaaaccaactttttgtttcttttcacaaaaccaatcttttgtattttttttatttcatattcatttatttctgctctgatttttgttatttcttttctttcctttcttttcttttttttttaattttgagatggagccttgctctgtcgcccaggctggagtgcagtggcacaatctcggctcactgcaacc

SEQ ID NO: 3198 - DNA, 29228 bp, Homo sapiens
gtgccactgaactccagcctgggtaacaaagcgagactctgtctcaaaaaaaaaaaaaaaaaaaaaaagtctgggcgcagtggctcaagtgtgtaatcccagcactttgggaggctgaggcgggcggatcatctgaggtccggagtttgagaccagccttaccaacatggagaaactctgtctctactaaaaatacaaaattagctggacgtggtggcacatacctgtaatcccagctcctcggaaggctgaggcaggagaatcccttgaacctggggagcggaggttgcagtgagccgagatcacgccattgcactccagcctgggcaacaagagcagaactccgtctcaaaaaaaaaaaaaaaaaaaaaaaaggaatgacctacccattcatgtggcaacatgaatgaaccttgaaaacatgatactgagtgaaagaagccagacacagaaggccacgtattgtaggattctatttatgtgaaatattatggggcgggcgtggtggctcacccctgtaatcccagtgctttgggaggccgaggcacgtggatcaccagaggtcaggagttcgagaccagcctgggcaacatggtgaaaccccacctctactaaaaatacaaaaattagctgagcgtgttggtgggtgcctgtaatcccagctgcttgcggggaggctgaggtagaagaattgcttgaacctgtgaggcagaggttgcagtgagctgagattgagctactgcactccagcctgggcaagagtgagacctcgtcttagaaaaaaaaaaaaaaaagtttctgaacaagaggcaaatccttagagctaggcagcccctggttccccgggctgtggggaggggctgtgggaatgactgcttaatgggaatggggcttctttttggggtgatggaagtgtctttaaattcgattgtggtgatggctgtaaaaccctgtaaatatactaacatttatttaattatacacttaaaataggtgaatattaggatatatgaattctatctcagtaaaacttttaagaaatgtttactcaaacatttaaaaatttaggacaaactattgatacatttatttaacaattaggacacactgttgatacatttatttaacactatgggcgaatatcagaatagttttgctggatgaaagaagccaggcaaaacagagtatagactatactttcttttatgtaacattctagaaaatactatccaatctgtactgatggaaagtagatgggtggttgcctagggccccaggggcagggagggacgggagggacagctgggagagataacaaaggagaacctttgagggtggcaggcgtgtttatttcttgattgtggtgatctgggtttcccatgtgtgtcttttactttttttaaatatttctttctttctttattttgagacggagtctcgctctgtcgtcaggctggagtgcagtggtgtgatctcggctcactgcaacctccgccttttggattcaagtgattcttctgcctcagcctcccgagtagctgggactacaggtgctcatcaccacgtccggctatttttctatttttagtatagacagggtttcaccatgttgaccaggctggtcttgaactcctgacctcaggtgatctgcttgccttggccactgaaagtgctgggattacaggcgtgagccaccacgcccagcctcccacgtatgtctttatgttcaaatttattgaattgtacccttttaatatgtgcagtttattgcatgttgattattatattatttatacctctgtaaagctgtttaaaaagagtgggtctggatgctgggtggaaatggcttggaggggtgagaactggaagttgaagagtcagtggaggtggttgcagccgctcagtgggagacgactcagtttgactagggtgaggtctgtggagagaggtgggtggatgacgtgtgctttggcgggacccataagacctggggatggatctgatattgggggtggaataaaggtaggaaaaataggtgatttttaggtgttttgcttgagcagagctctgtctttatcatctctgtttatctaaaatagactaggaactgagggaagactcggggagagacacgctttaggagtaggggatcacgtttcccacgttggaaatcctgtgtgaggtgtgtgaggcgtccaggtgggtggaaacttggtgctgggagaggttgggacgcatcagcatgcacatggtgtttaaagcaggagtgcaggctgagagcccccgagggcctagacccaacctggagcggtcaggagaggagtagacggggagtctgggctgggtggctggcgaggatcaggaggccaggagcgcaggctaggacccaggataggggagcccaggagagctggcgtggccagctgggctgagtacctgtgggtgaggatggtgagatgggcattggacagagggacactagggtctttggtgacaaggagcaatttctgtggagtgaaggggcaggcccagtctagagtggattgaagcaggagcaggaggcgagggagtggggtcggtaggtggaggcagcttgtcggggacattctgcttcgaagggagcagctggaatgtgggggtcaaggctgtgtgtgtatatatctaaggcgggaggtgccagcacacgtttgaatgaggagtcatggaggaggatagcaagcgggcattcgggaggtgccagcacgtgtttgaatgaggagtcatggagaaggatagcaagcgggcattcgggaggtgccagcatgcgtttgaatgaggttcatggaggaggatagcaagtgggcatttgggaggttccagcacacgtttgaataaggattgtggagaaggatagcaagcgggtattgcagggcatagtgtctgtgaagggcagagggggaggatccagggcacaggtggagcccaggagaagggagtggtgtggcttcctcctgtgcagcaggaagggaggaagaagtgagcccggcggcaggtgagtctccagatccatgatgaggtgggcttggagtctcacccacaagaaggttgaggaaatggggcgggtgtgtcctggctgtgcccagagcaccagagagggcattgaagagagctgccaggcagctgcaggccctggcttggtgtcaggaattgaaggtgaaacaagtccaactgatgatgtgaattttcttctccggcaacatttagttgcttgggtgcaggtgggagcagtgggatagctgggctccttcagggcctggccagacaggcctgggtggaggatgagaagcacaagcagaggatggcagcgaaggctgggccccagctggatgaaggcaggccgctaagctgggacaaggagggtgtctccacgaggctgaagagttgagtacagaatgagataatgcatttgctgaagcgtcgtgggtggtggccagggaggcaaagcctgagacgaggttttggggggaagtgattccaagctccgggggtgacactaggagaggtattggaggttgggtgtttggaggtggagaggaagttgtttggaggtggggagggttaggaactgagcgacaaggtgttggatctgtacctatgcacacacatatatgtggacatgtgtgtgtcaagtcactgaggatggtgatagagcaggaatggagaggatggcgagccagcgagtgaggtgcataagggacagtaactggcaatggtaggtgacagtgagtaggaagggctctaggggtgtgctgtcgagtgtgggcattggcatcagggatctggaaggagcagtggagaaggcagacgctgccctcacctgccatctctgaagtctgtgggggatgaggaagaggcagctgtcactcagaggcgagttggggaggtgctcccttcgtgtgaggccagttttggttggggcaggagtgaggatgctggggagaggctgagtctttaggagaggggattgcgtggttggtggaggtagtgccaagtatcaggtaatgagagggcacaccctgtgcccagggacccgggagtctcacctctgcctgttgagggacgcgtttgccagagagaaagcgtcagcaaagtgccatcttccagaggctcagcaagacgtgcaggaggcacaggctccagtagcgaacgccagcctcatgagggtgtttgggaccaggtggctccattagtgagggctggggccctgtgggcatgagggcgcaggcacctgggaggccatttgggtcagctctcccgcggagctacgaccttggggatgtggcgctcctcacgcggagccaagccaagccaaggccaagcctgtgtttcagggactcgatcactgcagggcttagcctggcatggagtaggctccttctctgtgttctccaggccaggggacttgcatgccagaatccttcttcctcatagatttcttgacttaccactctgcattgcaggaggccctccagtcagatgtccagcccagagctggctgcctgtggctgggtagggtcatgtggctgcccagggccatgggataggccgacacctctggtgtggatatagtacaggggagtgggtctcccacagcaggggaagggttcagactcagagggtccagccctgtgaaggcagggcaggtggtgaaggcctcggggtggtgaagtcatggggctgcaggctcaacctcctttctcttgttgacagcactgacgtcttcatctgcacaagccccatcaagatgttcaagtactgtccctatgagaaggtaaggcgtgcgtctgctcagctgagcccttaccccatgcatcacaggtgaggggtacggggctcagcctgcctgtggaaaggggatggaccctcacagcactcccccacctctgtgacagcggctttctgctccccaaggacctctccagcctgaggctctagatggggcctcttatgatgcaggttctccaggaagggtgcctgtcactgtgtcaggttagcctggcccagagtaggcctttgaagggtgagaaccatgcctggggagggcctgaaggcacgtggatgcattaacatgaaaagtcttaaaaaggtgaggtgggtaaagttcattttgctgtatactcactttattatctttattgaaaagaattagagttgcatgaaattgagacctttctggaaattgggaacttgcagttgccaaacccagaggaaaggtctgtggccctggaggagagcactcatgccggaggggtcagggccggccctccctggggacgttggagcagctcttcccgagctgaggaaggcaagatcttcagtccagagcccctcctgctctgggggcgtcaaaccttcaggcatgagttctttcatgttcttcacatgacctttccgctctggattcccattttttttgagacagagttttgctcttgttgttgcacaggctggagtgcaatggcacgatcctggctcactgccaagatcactgggttcaagcaattctcctgtctcagcctcctgagtagctgggattacaagtgcctaccaccacatccaggtaattttttttgtatttttagtagagacggggttttgccatgttggccaggctggtctcgaactcctgagctcaggtgatgtgcctgcctcggcctcccaacgtgctgggattataggcgtgagccaccgtgcctggcctggattccatatttaaatgaaattcatggtcaggcgcggtggctcacgcctgtaatcccagaactctgggaggccgatgcaggtgggtcacctgaggctgggagttcaagaccagcctggccatcatggtgaaaccccatctctattaaaaatacgaaaatcagctgggtgtagtggttcatgcctgtagtcccagctacttgggaggctgaggcatgagaattgcttgaacctgggaggtggaggttgcagtgagccaagatcgtgccactgcactccagcctgggtgacagagcgagactgtccccccacaaaaaaacttaatttaaaaaaaaaaaaagaaattcacacattcagccaacatagcgtgccctctgtgtgctcagtgggaatcacacttgctgaacagttgctctggcattatgtgggtgcttggtgcccactgtttcatcatgtcctcatgacaccttgttccctagttaccctgacatccctcatgattttagagagtgggtcttgttctgtcacccaggctggagtgcagtggccactcacaggtgccatcccagctcactgcagcctcgaactcctgggctcaagtgatcctcccacctcagcctcttgagtagctgggaacacagctgcgcaccacgcaccaccatggccggccttcgctgacccccttttaacacgctaggagcacgagttcacttatacttaggagagaggagtatcttacctgcagccagtaaatgtggattcagagtgtgggccaggcccactgtttcaggtcgagcagtgatcccaaagtgagtcctgagaccagagtcagcatcccttggagactccttaggagtggacatttttcagccccaccctacaccttctgaatcagacactctgggagtagcaatgtgggtctgacgagcccgccaggtgattctcatacaccctcaagtttaaggattgcgggactggagtcactatttcagctggagtttcactgggtggccatggtggttgaccagcagttgtgggagtgagatgaacgacatggcctcattcatccgttcctggggatttagatactgtctttgtgccagctgtcccacctgcgttgcctcggcccgggactgccctctgagctccagacactcagacccgatgtatctgtccctggggtgctggtttccttgtgcatggcagtgctgtctggtggcctcaggtcggaaatcaggggccgtgctgatgtcttcctctaagccctcacttccagcctgttggtgagtcccatgtcccatgggaccgatttcgaaaacgtgcctggcacctgtctgcttctgtctcttctcattgccagcatcttggcatttactgccagtacagctgacagggcctcctaaactgcctgctcctttcagttccatgcaggctgacaaggccctcacagagcagatcatggcagctcctgacttgaaacctctgaatagtttccctttaaaaaccacatacaccctcctgagcatgacctgcagggcctgcctgcctctccacccactgtgcccccctctctgtgtgcttctccagcagcttttggcttggaatgttctcctcccacccctaggtctggtgccttcttgtccacgaggcctcggcccagaagtctccccacatttcgtgaccatcatattgaagtgtattctttctccatcttgttttttggatgacacttcccaccacttgaaatgggtttgtgttttcgtctgtggcttgttcttggtccatctcctgactgggctgggacctgtgcaggctgggctctcaccctcctgcccactgtcaagcccagcacccagcgcagggtggcacactgggaggactcagcgtttgttgttaaatgagtagattcatttgtccaacagagagttattaaacaccggcgagtacagtgcttgccattcatttgacacctttgatacgccaggcaatgtccctttattctcacttttgaggtttacaacagctgcctgtgaaacaagaaaactcttctgatttgacagatgaagaaactgaggctcagagggatgaggcagctcatttaccaggtctgacgcttggccagccagtgaggcctgctccgggtctgcctgtcaagagcctgtgcccaccgccagtgtgttcccctggaggtagcctgcattcactggagaggatttggaaaccgcgcatatttaagaggaaagggatgtcaggaccccagtcacagtaacatcaacaggctctggctcacttgaacaaaggcaggactgattagaaggatattgccttgctcagggaatcaaagggaagcccgaggaagcaggcctgaggccgtaggggcagagcccgcagaccgtctctccagcaaacagcccaagacgctgaagcgccctttctccatccttgggtttcattgcccaagattcctagtccccaggagagggaggcccatcagctgagcttgggtcccacacccagccctgggtgccctgatggactgtcctaaaaggctgcagttggtggcagaggcgtggcttcccagaggagttgagatgctgttgccagaagaagggtcacactcatagtggatgtcctgatcaaactaaacgaaagagcaaaggcaacaagaatccacatctacaatcccaccacctggagagagatgctgttagcactttgatctggttctttctagtttttttgtgggggagtaggggagacagggtctcactatgtcacccaggctggagtgcagtggtgcgatctcggcttactgcaacatccgcctcccaagttcaagtgattctcctgcctcagcctccttagtagttgggattacaggtgtgcgccaccacacccggctaatttttttttgtatttttagtagaaacagggtttcatcatgttggccaggctggtctctagctcctgacctcgtgatccacccatcttgtcctcccagagtgctaggattacaggtgagccaccacacccagccctcgtttttctttgatgcgtattaaatataatacatgtattttaacaaagctttcatccaacatagttatccttttctgcttattaatatatttttagccttttttctgtcatcaaacacttcagaaacatgatttttttttttttttgtgagacagggtccagctctgtggcccagactgaagtgcagtgacacgatcttggctcactgcaacctctgcctcctgagtttaagtgattctcatgcctcagcctcccaagcagctgggacaagtgtgtgtcaccatgcctggctaattttttatatttttgttctgttttgtttgagacagagtcctgctctgtcacccaagctggagtgcagtggtgcaatctcagctcacttcaacctccacctcctgggttcaagtgattatcctgccccagcctcctaagtagctgggattacaggtgcgtgccaccatgaccagctaatttttgtatttttagtagagacggggtttcgctatgttggtcaggctggtctcaaactcctgaccttgtgatccacctgcctcggtctcccaaatgctgggattacaggcgtgagccaccacgcccggccaatttttttgtatttttaatagagatggggtttcaccatgttggccaggctggtctcaaactcctagcctcaaagtagtctgcccatctcggtctcccgaagtgctgggattacaggtgtgagccaccatgcccagccagaaacatgattgttaatagctgaagacgtctagtgagtaagcctttgtatggtcatgttcttagggtgaattccaagaaatacaattcctgggtcacgcgaggaaaggtagggttcgggtatatatcacacagaaatttgtattcatttccactgtaccagccgtgggcagggtactttcctcctgccaggggctaggctggaccacatagggtcagtcaatagaggaagcaggccattgaacaaacacatgaagacaggaaagtgcacagcagatttgaggaattcagggtgaattttgttggccagtggctacaggggctgattgggagcggggttgggccaggtgaaatggattagtttatccaaatctcccagctgtcctcatggtttagccacaccaccacctttaaccctagaactaagacaaggggagaagtgcgggtgagaagtgagtaaggcgaaggttgcttccaagcaccccctcacccaccgtttgtgcccctcccaaccctatggactggtacttcttccctggctgagggcgggctggtattaatggttcctgtgttccatgcctgggggaggcaaggaagggctggagatgggtctcggggcacatctgcacaggacagaggtctcccacggtagccccggtctaggcttaagccccagagcactcacagttccttccccagctcctgtccactgagtaggttcagcctttgttgctagaagtggaaacttttctccttggttgattttctttcaagacccagtcagaggatgggaacctgactgctgtgaggtctctcactttatcaccacatggagggagtggaattgggttacattcaggttgccagaaccttctttctggctggaaagaaggtttcccaacattctaaacccagattgctcggtaatagttaacaatagccaagctggtagtatacgtctccaagggctttccctgtagtgatccatttagccttcatagtagccctacaaaataggtatttctattttttatttttattttttagacggagtctcgctctgtctcccaggctggagtgcagtggcgtgatcttggctcactgcaagctccccatcccgggttcatgccattctcctgcctcagcctcccgagtagctgggactacaggtgcctgctaccacgccgagctaatttttttgtatttttagtagagacggggtttcactgtgttagccaggatggtctcgatctcctgacctcgtgatctgcccgcctcggcctcccaaggtgctgggattacaggcgtgagccgcagcgcctggccttaaaataggtatctttattatccctgttctacagatgggcagactgaggcacagacagttgaagctgagggttagcggccagaaagtggggagtcagacttcagagcccatgctctgctcctcggcctcactgcctcttctcggactccttgacttgaaacttaagcagcatgacctgtaccttttcaccccctagagagatttgaaaatccgtgtcaggttcttcatgcacaggcatggcattttactctgagattttccagttcaacaaggggagtaatcacaagccaaattaagggaggggcttgggtgcgaaggggaatgtgctcttctgatttgaagtctggtttccagatgacatgtctgcctgattcgacgttgatttttagaataaatgtcaaaaattcccacttcaggccgggtacagtggctcatgcttgtaatcccaccactttgggaggctgaggcaggaggatcacttgaacccaggagtttgagacctgcctgggcaacatgatgagaccccatctgtactaaaaaaaaattagccaggcgtgctgatgtgtgcctgtagttgcagcatcttgggaagctgaggtgggaggattgcttgagcctgggaggtcaaggctgcagtgagctatgatcatgccactgcattacagccttagtgacagagtaattccctgtctcaaaaaaacaaaaacaaacaaaacaaaacaaaacaaaaacctactcctggctgggcgtggtggctcacgcctgtaatcccagcactttgggaggccgaggtgggcagatcatgaggtcaggagattgagaccatcttggctaacacggtgaaaccccgtctctactaaaaatacaaaaaattagccgagcgttgtggcgggcgcctgtagtcccagctacttgggaggctgaggcaggagaatggcgtgaacccgtgagacagaggttgcagtgagccgagatggtgccactgcactccagcctgagtgacagtcagactccgtctcaaaaaaaaaaaaacaaaaaaaaaacccactccttaattgagcctcttcctctaacctgaaataaaaacgtaaaaacgtagactttttttttttttttgacagagttttgctgttgttgcccaggctggaatgcaatggcgtgatctcagctcactgcaacgtctgcctcctgggtttaagtgattcccctgcctcaacctcctgactagctgggattacaggcatctgccaccatgcccggctaatttttgtattttttgtagagacaaggtttcaccacattggccaggctggtctcgaactcctgacctcaggtgatccatctgcctcagccccgcaaagtgctgggattacaggtgtgagccaccgcgcctggccaacatagaccattttttttttaacttaagataatgaattacatttctttgctttctttctttctttcttttttttttttttttttgagacggagtctcactttgtcacccaggctggaatgcagtggtgtgatctcagctcactgaaagctcagcctcccgggttcacgccattctcctgcctcagcctcccgagtagctgggactacaggcacatgctaccacacctgtctaattttttgtattttagtagagatggggtttcatcgtgttgcccaggctagtcttgaactcctgagctcaggcaatcgcctgcctcagcctcccaaagtgctaggattacaggcgtgagccactggacccggccttctttgcatattttacattaaatttccagttgctccagtacgttttccagttactccctgtaggacttaggctaaaagacttggcactttctcttggcatgtaaagaaaccctaggttcttttggggatggcacggccacactgccagcattcaggagcttcccctggagctcctgaaccccagtgtcacccctgccatctcagtggggctcatggtgtctttcttggcgtgtttctggcccataccgtgtttattttaaaaattgttcatgctaattggcatggggtttcttttaggggtgatggaaacattctggaatttagatagtggtagtggttgcataacattgttgatacactaaagaccattgaattgtacactttaaattggtaaattttatgatatgtgaattacatttccaaaaaataaaataaaattggctgttcagatggctaataattccaaagctaactcactccttctagttagatctggccatttcatcattgtaatagggattgtagacaaaagtgcatgatccctttatttatttatgtaattttttttttaaagacagagtctcgttctgttgcccaggtggattctagtggaacgatcatagctcactgcagcctctaactcccagaccatcgtgcctggtcataatacctttaaagtgtcctagatcaagccattcattttgaaaacctccagttttatggtattctttttctttttcttttctttttttttttgagatggagtctcgctgtgtcacctaagctggagtgcagttgcgcgatctctgctcactgcaagctccgcctcctgggttcacaccattctcctgccttggcctcccaagtagctgggactacaggcgcccaccaccatgcctggctaattttttgtatttttagtagaggcagggtttcagtgtgttggccaggatggtcttgatttcccgacctcatgatccacccgcctcggcctcccaaagtgctaggattacaggtgtgagccaccgcatccggcctatggtattatttttctagcagtgtcattcacccaactccacacctgcataccccaccctccttgatttaagacctgtcttgggatctgctcatctgagtggagcaggactctgtcccttccaacattttgcctgctagggactgtgtctagctcatagatctcttatttctgatgtgtccatttggtcatgggcctgtgagccacgcggagcaggaagggcagggaggtggggtcgagagctgccagccatctgcccctctgatcttttccagcactgtcctctgccagcatccccctttacttctgtgtcttcttggtaatcactgaactctttgctctcgaggtggttcatggacttcctgcctgcactcctaggtcttggagagagcgcctcccctgggagtcctgccagcaattctttagctacatgtagttttaggttccatggcaggcatttttcctgattctggtttagaacgacagcaccgctttatgcttggatacctttacattcatctgggctgaactattttctccccagagctttcaggaaccaaaatggtaatcaggtgatgagcagcccttctccttccaaacagctgctgataaacctaacagacccttgtcaggcaaatctgagctaaaggcacaatgcccccaccagtgtgcacattattatagctgttgaacctacgtcagtgcaccatggtcactcagagcccatagtttacatcagggttcactcccggtatcctgcgttctgtggtattggtaatcggggaggctgtgcgttgtgtgggagtggagggtatatgggaactctgtacctctgctcaattttgctgtaaacctaaacctgctctaaaaaataaagtctcttaaaaaaaatccacagtgaatgagagtccctcttgctccctatccttgtcagcatttggtattgtcagggctctggattttggctgttctcataggcagggagtggtgtctcattgttgttttgatttgcatttccttgattaatgacattggacatgtttttaagcaagtaaccctttgtatattttctgtaacgaaatgttcaagtcttttgcctcgtttctcattgagttgtttgtgagttgtgagagttctttagatatgctagaaacaagttctttatcagataatgtgttttacaaatattttatcccagtctgtgatttgtattttaattttctttttcttttttttcttttttgagagacagagttttgctgtcactccagctgaagtacagtggcatgatcccgcctcactgcagctgtgaccccctgggctgaagtgatcctcccaccttagcctcctgagtagttgggactataggtgtgtgccgccatgccaagctaatttttaaaacactttttttttgtagagatggggtcttgctatgttgcccaagctggtcttgaacccctggactcaagcaatcctcctgccttggcctcccaaagtgctgaggttacaggtgagttttctcaacagagtctttagaagagcagaagttttatacttttagattttttatttaggttatgatccatttgtttttttgagacggagttttgctttgtctccctggctgtagtacaacagcgtgatctcggctcactgcaacctccgcctcccaggttcaagcgattctacctgcctcatcctccctagtagctgggattacaggcacctaccaccatgcccagctaatgtttttgtatttttttttttttttttgagatggagtctcactctgtcacccagtctggagtgcagtggcacaatctcggctcattgcaaactccacctcccgggttcatgccattctcctgcctcagcctcccgagtagctgggactacaggcacccaccaccacacctggctaattttttgtatttttagtagagacggggtttcatcgtgttagccaggatggtctcaatctcctgacctcatgatccgcccgcctcggcctcccaaagtgctgggattacaggtgtgagacaccgtgcctggtatgtttttgtattttagtagagatggggtttcaccatgttggccaggctggtgtcaaactcctgacgtcaagtgatccacctgtcttggcctcccaaagtattgggattacaagcgtgagccaccatgcctggctcgttttgagttaattatcatatattgtaggaggtaaaaatggagaggttttttttttttttgcatgtggatccagttgtgcctctgttggaaaggccaccctttctcactgaagtgtcatggtagcctggggtccatttctggaatgtatcctgcttctctgatctaagtgtcccacctaatgtaaataccacactgtctcagttactgtagtttttttttttttttttttgagatggagtcttgctctgtcgccaggctggagtgcagtggtgtgatctcggctcactgcaacctcctactgggttcaagtgattctcgtgcctcagcctcccgagtagctgggattacaggcacgcgccaccacacccagctaatttttgtatttttagttgagacggggtttcaccatgttggccaggatggtcttgatctcctgaccttgtgatccgcccactttggcctcccaaagtgctgggattacaggcgtgagccactgtgcctggccactgtagttttatagtaacttttgaaagcagtgtgagttttccaaaattattcttcattttaaaaattgttttggctattctgggtcctttatatttctatagaatgtttagaacaagctggtcagtttctacaaagaacctggtgagaatttgattgcaagtgcattgtagctataaagcttaacaatattgggtcttctgatccacaagcacatacacatcctcatttatgtaggccacctctaccttctctcagcaatgttttgtagctttcagtgtaccactcttgcacatattgtgttaaatttgtctctatttcatgtttttttttttggcatagagactatctttataaatatatttttaaatattttataatggtaaatacacatgataaaatttatcaagtgtacagttcagcttatttcgtttttaatgctattataaactttgtttaattgaaatttccaaatatatagaatacaagtgatttttttttttgagatggagtcttgctctgttgcccaggctggaatgcagtggtatgatctcggctcactgcaagctccgcctcctgggttcatgccattctcctgcctccacctcccaagtagctgggactataggcgcccgccaccatgcccagctaatttttggaatacaagtggttttttaattttaatttttaatttttgtgggtacatagtaggtgtgtatttatgaggtacattagatgttttgatacaggcatgcaatgtgtaacaaacacatcagggcagatggggtatccattatcaccttaaacattcaatcctttgtgttatagacaatccaattatattcttagttgttttaaaatgaacaatttttttttttgagatggagtcttgctctgtcactcaggctggagtgcagtggcgcgatctctgctcactacaacctctgcctcctgggttcaagcagttctcttgcctcagcctcccaagtagctggaactacaggcacgtgccaccatgtccggctaatttttgtatttttagtagagacggggttttgccatgttggccagctggtctctaactcctgacctcaagtaatccacctgccttggcctcccaaggtgctgggattacaggcatgagccaccacgcctggccatgaacaattaaattatttttgattatagtcaccctgttgtgctagcaaatactaggtcttattcattcttttttttttttttttttttgagatggagtctcgctctgtcacccaggctggagtgcagtggcgcgatcttagctcactgcaaactctgcctcctgggttcacaccattctcctgcctcagcctcctgagtggctgggactgcaggtgcccgccaccacgcccagctaattttttgtatttttagtagagacagggtttcaccgtgttagccaggatggtcttgatctcctgacctcgtgatccgcctgccttggcctcccaaagtgctgggattacaggcatgagccaccgcgcccagcctattcattctatttttttgtgcccattaactctcttcactttccttctagatactcctccactcccccttcccagcctctactaaccatcctcctactatctccatgagttcaattgttttaatttttagctcccataggtaagtgagaacatgtatagccctttctgtgcctggcttatatcacttaacataatgacctccagtgccatccatgttgttgacaatgacaggctctcattcttttttcttttcttttttttttttttttgacggagtcttactctgtcacccaggcttgagtgcagtggcgtgatctctactcactgcaacctccgcctcccgggttcaagtgattctcctgcctcagccacctgagtagctgggactacaggcatgcaccaccacacctggctaatttttgtatttttagtagaggtggggtttcatcatgttggtaaggctggttttgaactcctgacctcttgatccaccctcctcggccttccaaagtgctgggttgctctcattcttttttatggctgaatagtacttgattgtgtatatttaccacattttttaaatccagtcatcagttgatgtacactgaggttgcttccaaattttggctattgtgaatagtgctgcaataaacatgggagtgcgagtatcttttccatatactgatttccttttttttaggggtatatacctaggagtgggactgctggattttcagaggaactgccattatattcctaccaatagtgtacaagggttttattttcttcttgtcctctccagcatttgttattgcctgacttttggataaaagccattttgactggggtgagatgatatttccttgtagtttgatttgtatttctctgatgatcagcgatattgagcacctttttatatacctgtttgtcatttgtatgtcttttgttttgtgttgttgagacaggatctcgctctgtagctcaggctggagtgcagtggtgtgaaaatagctcactgtagcctcaacctcctggactgaagctatctttccacctcagcctcctgagtagctgggactatgggtgtgtgccaccaagcctaattttttttttttttctttagactgggttttgccctgtttctcagactggtgtacaagtggtttaatcatggctcactgcagccttgacttcccaggctcaatcaatcctcccaccttagcctcccaagtagctgagactacaagcgtgtgccaccatgcctggctaatttttgtatttcttgtagagacggggtcttactatgtagcccaggctggtcttgaactcctgcccacctcagcctcccaaagtgctgggattataggtgtgagccatcacacgcagccaccatatgtcttcttttgagaaatgtctatttagatcttttgcccattttaaaatcagattattagatttttttctatagagttgtttgactccttatgtattctggttattaatcccttgtcagatggatagtttgcaaatactttcttccattctgtggattgtctcttcactttgttgactgtatcctttgctgtgcagaagctttttaactggatgtgatcccatttgtccgtgtttgctttggttgcctgtgcttttggggtactattcaagaaatctttgtccagaccaatgtcctggagagtttccccaatgttttcttttagtagttcttgtatatggcaagagataggggtctagtttcattcttttgcatatggatatccagttttccagtgccatttattgaagagactgtcgtttccccaatatatgttcttggcacctttgtcaaaaatgagttcaaggtagatatatggatttatctgtgggttctgtgatctttttttttttttttgagacggagtcttactctgtcgcccaggcgggagtacaatggcaccatctcggctcactgcaatgtccgtctcccgggttcaagtgattctcctgcctcagcctctggagtagctgggactacaggcatgtgccaccatgcccagctaatttttgtatttttagtagagatggggtttcaccacgttagccaggctggtcttgaactcctgacctcacgctatccgcccgcctcggcctcccaaagtgctgggatttcaggcatgagccactgcgcctggcctggttctgtattcttatccactgatctgtgtgtctgtttttatgccagtaacatgccatttggactactgtagctttgtagtatcatttaaagtcagataatgtgatttttccagttttgttccttttgcttaggatagctctggctattctggaatttttgtggttctatgtaaatgttaagggttttttttttttttttttttttgtatttctgtgaagaatgtcattggtattttttttttttttttttgagatggagtcttactctgtcacccaagctggagtgcagtggcgcgatctcggctcactgcaagctccacctcccaggttcacaccgttctcctgcctcagcctcccaagtagctgggactacaggcgcccgccaccacgcccagctaattttttgtattttttagtagagacggggtttcactgtgttagccaggatggtctcgatttcctgacctcgtgatctgcctgcctcggcctcccgaagtgctaggattacaggcgtgagccaccgcacctggcctgtcattggtattttaatagggattgcattaaatctgtaaattgctttgggtagtatgaacattttaactatatttattcttctaatccatggacatggaatgagtatctttccactttttgtgtcttcaatttattctatcagtgttttatagtttacagtgtagagctctttcacttgggttaattcttaggtattttattttatttgtagctattttaaatgggattcctttcttaattttttttcagattgttcctgtttttttcaggattgttcctgtttttttcagattttgtatcctgcaactttgctgactttatcagttctagtagttttttggtggaatctttaggtttttccaaatataagatcatgtcatctgcaaacaaggataatttgacttctaatcctttctaatttggatgctctttctttctttctcttgtctgattgctctagcgaggacttccagtactatgttgaatcacagtggtgaaagtaggcattcttgtcatgttcccggtcttagaggaaaggctttcagtttttccccattcagtatgatactagccatatataggtctgtcatatatggcttttattatgttgaggtatgttccttccatacccagttttttgagggtttttatcatgaaaggatattgaattttatcaaataccttttcagcaccaattgaaataatcatatgttttttgtccttcattctgttgatatgatatatcacattaattgatttgcatttgctgaactatcctggaatccctgggataagtcccacttggtcatgctggatgatctttttaatgtgttgttgaattcaatttgctaatcttttgttgaggattttaggaatcaatatttatcaatgatattggcctatagttttcttttctttttttcaatgtgtttttgtctggttttggtatcacggtgatactggcttcatagaatgagtttggaagtattccttccttctgtatatttctgaatagtttaagtaggattggtattagttatttaagtgtttggtagaattcagcagtgaagctattgggtcccggccttttctttgctgggagactttttattatggcttcagttgttgttacttgttattggtctgtttgttttgaatttcttcatggttcaatcttggtagattgcatgtatctaggaatttgtccatttcctctagattttctaatgtattggcatgtagttgcccatagtagccaccgatgattgtttaaatttctgtaatatcagttgtagtgtttcctttgtcatctctgattttatttatttgggtcttctctctttttttcttagtctggctaaaggtttgtcattttgtttacctttccaaaaaaccaactttttgtttcttttcacaaaaccaatcttttgtattttttttatttcatattcatttatttctgctctgatttttgttatttcttttctttcctttcttttcttttttttttaattttgagatggagccttgctctgtcgcccaggctggagtgcagtggcacaatctcggctcactgcaacctctgcctcctgggttcaagcgattctcctgccttagcctctcgagtagctgggactacaggtaggtgccaccatgcccagcttatttttgtttttttagtagagatggggtttcaccatgttggccaggctggtcttgatctcctgaccttgtgatctgcccgccttggcctctcaaagtgctgggattacagtgtgagccaccgcgcccggcctgctcttgtttttctgtttctttaggatgcatcattaagttgtttacttgaagtttttcttcttctttttttattttttttaaattcaggcccccacagaagcattttcttcttttttgatgtggcacttatagctataaacttccctcttagtactgcttttgctgcatcccataggttttggtatgttgtacttccattatcatgtgtttcaataaatttttcaatttccttcatttcttcattgacccacttcattcaggagcatgttgtttaatgtctctgtgtttgtatagtttccagaattcctcattattgatttctagttttattccaaaaatacatgtgatttttttatattgaccttgtatcctgttagtttgccaaattaacagttctagttgctttatgtagatgatttggggctatgaaagtctagttataataattacatttatttagtacgtctgtatcaggcattactcaggtgtcctcacagttttttatttgatcataccagcaacactgtgaggaaactgacctcacagtggaagtcactggcttgcccaaggtccccagctcgtatgtatcagaaccagacttagggcctaattttgagggtaagacaaaaaggtagaatcctttttctgaagactttctgtgtgccaggtgcagtactgagactctgatgcataattttccactaaatccccgaaggcactcacgaggtagatgctgtccttatccctgtgtcaccacacagggaccagacaacctgctgagggatagagatactcacgtgagaagctggtggtatctatgcgcagtggccacataagtgctcatggctgggctccaggaggctcagggggaaccccatgccctcttctatttttacctcttaccatatataaaatttaaccctggctgggtgcagtgggtcatgcctgtaatcccagcactttgggaggccacggtgggcggatcacaaggtcaggagtttgagaccagcctggccaacgtggtgaaaccccgtttctactaaaaatacaaagaacttagccaggcatggtggcaggcgcctgtgatcccagctacttgggaagctggggcaggagaatcacttgaacctgggaggtggaggttgcagtgagccgagatcgtgccattgcactccagcctgggcgacagcaagactctgtctcaaaaaaaagaaaaaaaaaaattaaccccaaatgggttaaatacatataaatacatatatacatataaaagctaaaagtataaaacttctgctcttcaaaaggcactgttcagaaaatgaaaagacaaatcacagatcatgaaaaaatatttgcaaaatgcattgtctgataaaggactggtttctagaatacattaactactctcacaactcaatacaaacagcccactttgttttgccgtttatgtgacccctgataagtcacagaccctctctgagcctccatttcttcatctgtacgggatctcgtcaccactatcgtggcacatcattttcccacgcaaaccctttctgcagagcagctccgtattttgtctgcagagtggcgccggtccgagatgaaacacggaaactgggtgtgtgtgattggaaatgttcatggcagtttgtctgatgcagtgttcaggcacatgatttgatttcatatcttacaaaagcattggtcacaatgcagtggaaattaaaaaaacaaaacctgacccttctcttcccacactcccagatgttccatgttccagccacactccagggttttccccattcctcaaacacctgagcaccggcctgccttggaacatcagtgtttgtttttccctctgcctggaatgttcttgccgacctgtggagagccagccgccttgtcagtcgggtccagagaagatgccgcctttgcagtgaggcctctgtgtgaggttggagctctgtgctgactgcagagcccttgccccctggctatcgttgtctgtggcctgtgtgcctcctcctgctatgtgcactccatgggtctcctgttgaccatcgtctctctggttcctggaactgtacctcatgcaatattggctaaattactacacaagtcaggaaagtttggctacttggaatgttgccgtgaggcttagatacgatgacggacactgcatgcctgtggagtgggtctgctgaaaacattagccccaggctcttgccccccatccagcctgcaccagcgatttacagtcctgtggggaagatgcgaagtaagttatagagatgtgtagctccgactgtgacattgctagggaggacaattagactgggagagttcagggaaggcttaggaggtggcagctttagaaggataggtgctcactgggctaggagaagggccctgtgcatatgtgtgtgtgtgtgcatgtgtgtgtgcacacacgtgtccatgaaggaatgttccagtcagaggaaatggcacatgtgaggctctgagcaggaaaaagcataatacagtcaagcagtgagaggaggttgtcgtgggtgggcgtggcaagcgaggtggccacagggaaaggtggcgctgggacagcggtagggctggtctgctctgcagatccggcccttttcccacgtcccgtgtgctggccggttgcagagggtcatgtggtgtctgcctttgtgaagtgggactcctgaagcgacctccaactggaagaaagccaccctaaggcacccatgtcccatttccttgtcatacacagggaaaaacggagtccctgggagggcaaggacctgcccggctctgccccagggtggcagagccctgagctccctgtgcagcctgggccactcagtgtttctgtttgtttatgcaggaaccagaggagcttagggaaaaagtgcatccagtcctgcccctcctctgcttaaaatctgctgctggttaacctctgtagctgtaacagggtctgtgacttaagggttggttgccagtgtcagaaatcaacaagggtgttggaatctggatggctgtagagacagcctggagctgggcagggctcagttagggtgcctggggcccatgggccagagcaggtgccgtgcttaggctgcgcccacccctggctgcactggggtggtgagagcagccaggacctgctaccctataggaaaaagtcaatttccccagggaatcgaggcaaagggaaaggatgccgagagcccaccagtggcgagaggatgccggtggcttgccaggccccggtctgctccctgccccccggggagcaccagcaccccagtttgctatccatcggcccagacacaccctgccccatgtccgttagcacctggaatgcgctgtgtgctaggggtgcccctgtggtcagcttgcctgtcctgaagaaagccttccttgggcagcctgtggcttctttgtaggcctgtcccaggtgttatgtaaccattgtttaagagggccttgaccgctgtctcctcagctgtaagctccctgagggtaggaactgctttttgtcttggttttctttcttcagtgcctaacagtacgcactgcccacatgcatgtggggcaggaggtggcagtggcccagcaggtggcaggggtggcacacatggccgccctctgctccctgtgtttgggttatgctgtgcagtgttcgctgggtgtgaagaggggacagggctgggtttgtcgtgactctgctgctttctagctactggagtgtggaccagccatgtgcgctccctgagtgctggcgtcctgggctggactccctcccagcactgactgcctggcgctgggccttggtgtcaggcctccatccctccctgcctgttagctgaggtctaggctgacccctgccctcggctcttggttggctcccaggtctgatgtcactttcttctcaccacctgcccttgcctgtttgcgtccagtatgcctgggtggagaagtactttggccctgactttctggagcagattgtgctgaccagagacaagaccgtggtctctgctgaccttctcatagacgaccggccggacatcacaggcaagtggcctgcgacaggtgaggagcacgtggggagggccccagccttggcccccttctcctgggcagtgagcactcagttgcttcctgccccacttagtcaccagctgtttgccaggcactgagcccctccccttcgggaagacaaggccccctctgtatgggctgtggcctggtgctcctgggagctgggaggagtgggtgccagctctagggttagcttgaggggtggccttggggaagtcccttcagcttcaaagccttgtcttcctcatgtaacatggggactcaactctggtttccaaatgtttgtttttagcaacaaaacccattttttcccccaaaagcaatgtggactgatgcaatgaatgacaggagggcagagcagagctcctgcagggaaggtgggttgggacagaagacccccctccccaaaaccaaacaagccagtcaaccttgaactgccgtagaaaggagagggagatgggcgtggtgactcacgcctgtaatttgggaggctgatgtgggtggatggcttgagcccaggagtgtgaaaccagcctggccaacatagcgagactctctctacaaaaaatacaaaaattatctgggcatggtggtgcatgcctgtagtcccagctacttcaggggctgaagtggaaggattgtttgagcctaggagttggagaccagcctgggcaacatggtgagactccctgtctctacaaaaaaaaaaaaaaaaacacaaaaaaattagctgatcatcatggcgcatgcctgtggtccctgctactctggaggctgaggtgggaaaatcacctgagctggggaggtggaggctgcagcgagctgtgattgcaccactgcattccagtctgggtgacagagtaagaccctgtctccagaaaacaaaacaaaatacaacacagcacaggagaggggaagttttttggtttacctaactggaaaggggtgaggagggctttggccggccaaatctaggcgttgaaactgcccgtgagtgttgtttctttgcctcttggctctgccctggcctggtttttgacatcctcctcctggtagccgtcagtagtttcaggtcgagtcttttggacaccccagtgggaatatacattctatttttttccctgattgttttagaactggcttgggaaacatgcccacctccatcactgcgtccagagggtggactccacgagtgtacccaccccaccccaccctccccagcctcgtgggttcccgccagagtcagggcagacagtggtctgtggggtcccgtgaccttgagggcccaaaggctggcttggcctccatctccagccacaggttgttgggggcgggtgtataacccaaaggggtggcatcaccagcagcaccagtgtggacacgagggaatgaggcctggagaggctgcaggggcctgtgatcagcggctggtgagctgcagagctggtgccacctggccttcccacaccaggccatcaggatggtggggcacagagagggaagttgggggaacaccgtgtggtgtaagccatcaggatggcagggcacggagagggaagtcgggggaacaccatgtggtgtaagccatcaggaggcggggcacatgtcccttgccagtgctggtggtgacagtgacccgcagtcagtccctgttgactgagcactggctgcgcgtgctgacggcctccttgccgcatctcgtgccatcctcacacccgctgcgaaggcgggtgtgcgtgcagtcacccctttacagaggaaacaagttttggcaaggccagatgcctgcctggatacccaggtttccaccctaggcggctgcgctccaggtctccactgctgagctgaatgccgctttcccacccacaggggccgagccaacccccagctgggagcatgtcctcttcaccgcctgccacaaccagcacctgcagctgcagcccccccgccgcaggctgcactcgtgggcggacgactggaaggccattctggacagcaagcggccctgctgagctggactgtgcttcgggctcctctgtggggctctgacctcagggctcccagctcggggcctgtggggccagtatgctggtctgggagtccctcctagactcctgggccccatgacctcctgctgcatgtcccttcccttccccagccctgccaggccttaacctgatcacggggcagggctgggccctctgggcgcttggacatagacacgtggtcccaggccgttcagcctgacctcaggcagcaggcaccaagctgccagaagcccaggggctcaggacagggaggagttgaggccactgttcagggggctggtggccgtctccactccctaggcaagttctctgaggcagaagggggttccctgttcccagagtctgcagccatcagcaaggaggaccaggaacccggcgactgaggtgcttccaggtggggacaagcccctcttggtctcagccacagcaccccttattccagctgccctgcccaacctgctcaccccacatgaccttctgtgtattcagcaaacactcactaggtgacagcggccaccaggctctgtgctgggggacgatactggccctggcctcgaccagcttagaggtttctcacacctctgttcccagggccccgctcagggcccagcagagagtccgtaggcttgaacatgtgttgagtgcatgaaaaataaatgctgttcatgtgtgtagctcaa

SEQ ID NO: 3199 - DNA, 2853 bp, Homo sapiens
  SITE (872): n equals a,t,g, or c
  SITE (1994): n equals a,t,g, or c
  SITE (2067): n equals a,t,g, or c
  SITE (2080): n equals a,t,g, or c
  SITE (2207): n equals a,t,g, or c
  SITE (2358): n equals a,t,g, or c
  SITE (2783): n equals a,t,g, or c
ggccctgactttctggagcagattgtgctgaccagagacaagaccgtggtctctgctgaccttctcatagacgaccggccggacatcacaggcaagtggcctgcgacaggtgaggagcacgtggggagggccccagccttggcccccttctcctgggcagtgagcactcagttgcttcctgccccacttagtcaccagctgtttgccaggcactgagcccctccccttcgggaagacaaggccccctctgtatgggctgtggcctggtgctcctgggagctgggaggagtgggtgccagctctagggttagcttgaggggtggccttggggaagtcccttcagcttcaaagccttgtcttcctcatgtaacatggggactcaactctggtttccaaatgtttgtttttagcaacaaaacccattttttcccccaaaagcaatgtggactgatgcaatgaatgacaggagggcagagcagagctcctgcagggaaggtgggttgggacagaagacccccctccccaaaaccaaacaagccagtcaaccttgaactgccgtagaaaggagagggagatgggcgtggtgactcacgcctgtaatttgggaggctgatgtgggtggatggcttgagcccaggagtgtgaaaccagcctggccaacatagcgagactctctctacaaaaaatacaaaaattatctgggcatggtggtgcatgcctgtagtcccagctacttcaggggctgaagtggaaggattgtttgagcctaggagttggagaccagcctgggcaacatggtgagactccctgtctctacaaaaaaaaaaaaaaaaacacaaaaaaattagctgatcatcatggcgcatgcctgntggtccctgctactctggaggctgaggtgggaaaatcacctgagctggggaggtggaggctgcagcgagctgtgattgcaccactgcattccagtctgggtgacagagtaagaccctgtctccagaaaacaaaacaaaatacaacacagcacaggagaggggaagttttttggtttacctaactggaaaggggtgaggagggctttggccggccaaatctaggcgttgaaactgcccgtgagtgttgtttctttgcctcttggctctgccctggcctggtttttgacatcctcctcctggtagccgtcagtagtttcaggtcgagtcttttggacaccccagtgggaatatacattctatttttttccctgattgttttagaactggcttgggaaacatgcccacctccatcactgcgtccagagggtggactccacgagtgtacccaccccaccccaccctccccagcctcgtgggttcccgccagagtcagggcagacagtggtctgtggggtcccgtgaccttgagggcccaaaggctggcttggcctccatctccagccacaggttgttgggggcgggtgtataacccaaaggggtggcatcaccagcagcaccagtgtggacacgagggaatgaggcctggagaggctgcaggggcctgtgatcagcggctggtgagctgcagagctggtgccacctggccttcccacaccaggccatcaggatggtggggcacagagagggaagttgggggaacaccgtgtggtgtaagccatcaggatggcagggcacggagagggaagtcgggggaacaccatgtggtgtaagccatcaggaggcggggcacatgtcccttgccagtgctggtggtgacagtgacccgcagtcagtccctgttgactgagcactggctgcgcgtgctgacggcctccttgccgcatctcgtgccatcctcacacccgctgcgaaggcgggtgtgcgtgcagtcacccctttacagaggaaacaagttttggcaaggccagatgcctgcctggatacccaggtttccaccctaggcggctgcgctccaggtctccactgctgagctgaatgccgctttcccacccacaggggccngagccaacccccagctgggagcatgtcctcttcaccgcctgccacaaccagcacctgcagctgcagccccccncgccgcaggctgncactcgtgggcggacgactggaaggccattctggacagcaagcggccctgctgagctggactgtgcttcgggctcctctgtggggctctgacctcagggctcccagctcggggcctgtggggccagntatgctggtctgggagtccctcctagactcctgggccccatgacctcctgctgcatgtcccttcccttccccagccctgccaggccttaacctgatcacggggcagggctgggccctctgggcgcttggacatagacacgtggtcccaggnccgttcagcctgacctcaggcagcaggcaccaagctgccagaagcccaggggctcaggacagggaggagttgaggccactgttcagggggctggtggccgtctccactccctaggcaagttctctgaggcagaagggggttccctgttcccagagtctgcagccatcagcaaggaggaccaggaacccggcgactgaggtgcttccaggtggggacaagcccctcttggtctcagccacagcaccccttattccagctgccctgcccaacctgctcaccccacatgaccttctgtgtattcagcaaacactcactaggtgacagcggccaccaggctctgtgctgggggacgatactggccctggcctcgaccagcttagaggtttctcacacctctgttcccagggccccgctcagggcccagncagagagtccgtaggcttgaacatgtgttgagtgcatgaaaaataaatgctgttcatgtgtgtagctcaa

SEQ ID NO: 3200 - DNA, 466 bp, Homo sapiens
cagccagtatgtattgtactcactaatgtgttcatgaagtggggaggtgggtacctgcttcctgttgcggtgtttcatcttattgttaaagtcttccttgtattttcaggaacgctgtcatagtagccggcatctggcttgtccacggagttcagggtacttagcttcctattaggagaaaacgttttctgtctatctgtctttctgtctatctttcaaagtagcctcattgttcttcagtgatgtcccaatttgtcccgggtgtggcgagggcgcgtggccccggaggtgctggtggtcctgtgggtccatgcctcctccctgtgtgtgagggaagagctgccccgctctgctttttattgtattcagcaaacatttgcaggtgctgtaggggccttgcaactacattttgcgtaagttgggtcaaatcaaattcacagactcaccaaactcatactggccactg

SEQ ID NO: 3201 - DNA, 357 bp, Homo sapiens
  SITE (266): n equals a,t,g, or c
  SITE (291): n equals a,t,g, or c
  SITE (292): n equals a,t,g, or c
ctactacagccagtatgtattgtactcactaatgtgttcatgaagtggggagttgggtacctgcttcctgttgcggtgtttcatcttattgttaaagtcttccttgtattttcaggaacgctgtcatagtagccggcatctggcttgtccacggagttcagggtacttagcttcctattaggagaaaacgttttctgtctatctttctttctgtctatctttcaaagtagcctcattgttcttcagtgatgtcccaatttgtcccnggtgtggcgagagcgcgtggccccnngagtgctggtggtcctgtgggtccatgcctcctccctgtgtgtgagggaagagctgccccgctct

SEQ ID NO: 3202 - DNA, 472 bp, Homo sapiens
  SITE (370): n equals a,t,g, or c
  SITE (378): n equals a,t,g, or c
ctactacagccagtatgtattgtactcactaatgtgttcatgaagtggggagttgggtacctgcttcctgttgcggtgtttcatcttattgttaaagtcttccttgtattttcaggaacgctgtcatagtagccggcatctggcttgtccacggagttcagggtacttagcttcctattaggagaaaacgttttctgtctatctttctttctgtctatctttcaaagtagcctcattgttcttcagtgatgtcccaatttgtcccgggtgtggcgagggcgcgtggccccggaggtgctggtggtcctgtgggtccatgcctcctccctgtgtgtgagggaagagctgccccgctctgctttttattgtnttcagcanacatttgcaggtgctgtaggggccttgcaactacattttgcgtaggttgggtcaaatcagattcacggactcaccatactcatactggccactg

SEQ ID NO: 3203 - DNA, 570 bp, Homo sapiens
caatactgcaaggtgctggagatgagcccccactctttggtcagtaaaactgccaagatcaccgaccttgtgaagacatttgaggatgagaggttggttggagcctggacgtggagacagactctaaatagttaactacaagacacatgtaattacaactttgagagcttatagcgggaggcccttttgggaagggggtggagatggagaagaggaagaaagaaagggcttccctgaggaagtaatattgcagctgtgacctgacagatgaggccgaaccagctagactcgtgtttcaggcctcgggaatagcataaggactccagctggctccttccgggttgagtccttatgctgaaattggtatttggcacacaccagtagtagaacgccactcaatgccttattctcttccccttctctcagctctgtcccctccacatagtaggacaatgaaactggtaactatttttggtccgaatagtccttccattattatctgttatagtccaccatgcaggttcttcctaactccttttgatcaaaatagatatttttgaaaatgtgaag

SEQ ID NO: 3204 - DNA, 570 bp, Homo sapiens; identical to SEQ ID NO: 3203

SEQ ID NO: 3205 - DNA, 279 bp, Homo sapiens
caaggtacaatttgctgatcgcatactgattcattttcctcccactctgggtcctttcatctgctgttctcccagtccagatgccagccaggcatttgagaaccatctgatggtaacaggatggaggcgtgactcaacttcactccaccacctgccttcctgtcctgcagtggagattttgtacatagcttatcctttaagttcttctgcttgttactgctcacagcactgtgattctactttaggcaccttctgtacattcatattcattactttttt

SEQ ID NO: 3206 - DNA, 760 bp, Homo sapiens
aaaacacgaactaagaaatggtagtttattttctttttgccatgcagcaaaggagggtcgaatgtaaagctgatacagttgctggctgagcttttcccgcggcagccagtgcgtgcttcctccacttcttcgagacttctccgtgctcctgccccacctcccaggctgaagattcatgcaggccctgcgcttagcccagactctggccaggcccggcccagcccgaaggtgggcggctcccggcgcagggcggcccagccccaaccactgagaggaggaccctccggcgtcctagagtggccgcaggccgcggcgtcgggttggaaaaccaggagagcatggagctttttcgctggtccggcgcggtctcttgcgttcctgtggcgggcacctgactccccatgcccgagtactgtcctcaggcggaacggcgtctgcagcgaggagcggggttccagcaggctcggctgacgcggtccctggcatttcccgtgctggccctgggtcgccctcgatgctgcttcccgctgggagcctccttctgacggcggaaaggagcttcacctggggcggccggcggggaacggagaagaatccaccggggaagtggacggggctggctcccgggcctggcgctgcggctctcgggccgtcagacctcccgcgggttgcgtcactttcctcggttttctagacagcagttgtggggttgaatccttgccgtggttttgtaagaattaaatgagataatgaacgcgaa

SEQ ID NO: 3207 - DNA, 760 bp, Homo sapiens; identical to SEQ ID NO: 3206

SEQ ID NO: 3208 - DNA, 276 bp, Homo sapiens
caaggtacaatttgctgatcgcatactgattcattttcctcccactctgggtcctttcatctgctgttctcccagtccagatgccagccaggcatttgagaaccatctgatggtaacaggatggaggctgactcaacttcactccaccacctgccttcctgccttcagggagattttgtacatagcttatcctttaagttcttctgcttgttactgctcacagcactgtgattctactttaggcaccttctgtacattcatattcattactttttt

SEQ ID NO: 3209 - DNA, 422 bp, Homo sapiens
gtcttcataacaaccctacaagttacgtggtgttagtctcattttacatttaagaaatctgcagtgaagtgatttggtcaagaatacacaacaatcagtgccagatatgggcacacacctttgactccaaagtcttctgctcctctctgtttccattaaactttgaccatgactaggacattcgtttactttgttgtttttactaaataaatgttgataagggcagctattatattttaatttgtcttttttttttttttttttttttgagacggagtctcgctctgtcgcccaggctggagtgcagtggcgcgatctggctcactgcaagctccgcctcccagtttcacgccattctcctgcctcagcctcctgagtagctgggactacaggtgcccgccaccacacctgctaattttttt

SEQ ID NO: 3210 - DNA, 116 bp, Homo sapiens
tttttttgtatttttagtagagacggggtttcaccatgttagccagtatggtctcgatctcctgacctcgtgacccgcccgtctcggcctcctaaagtgctgggattacaggcatg

SEQ ID NO: 3211 - DNA, 4319 bp, Homo sapiens
atgacaggttcctgggccgcgccgcctcgccctgcctgggcggggttgggacctttctggcacctgcgtcgaagccggcggcaggatggactttgttgtcccggtcccagaccaccctcctccaccgtcgcctcccactgcaaaaaggcctgggtaagtcgcggccccgcgggcctcggtttgcccatccgcaaaatggcgcctcgtggtaccgggtttcccgggaggagctcggcgagttctcagcgctctcgagggatccttccatttggcgttcgcaagattgtgagaaagtgactgctgttattctctttaagataaggaacctaattcgagctacccttctctgtgaagctcgacggctgagaacgtcagggctcgttcccaagtctctttccagaggccaggctttatgggagcatgggttaccagcgacgcaccctgtgagttttcctctatcgatatgcatggagcggttcgggagcggtggctcattcctgtagtcccagcacttcgggaagctgtggcgggaggatcagttgagttcaggagttcgacaccaccctgggcaacatagcgagaccacatctctacaaaaaaaatacaaaaattagcccggtgtgatggcgcgcgcctgtagtccccgctacttaggaggttgcggtggaaggattgcttgagcctgggaggtcaaggttgcagtgagctatgatcgcaccactgcacttcagcctgggcaacagagcaagacccggcattaaaacaaacaaaaacgggccgggcgcggtggctcacagctgtaatcccagcactttgggaggccaaggcaggtggatcgcctgaggtcaggagttccgagaccagtctgggcaacatgataaaacctcgtctctactaaaaataccaaaaattagccgggcttggtggagggcacctgtacccagctacttgggaggctgaggcaggagaatcgcttgaacccgggaagcggaggctacagtaagccgagatcaagccattgcactccagcctgggcagcagggcaagactctgtctcaaaaaaagggactgagggactgtaggtggtgataccaaagaaagcatggccatttaggaagctagacttgagtgagcagtgggcaagagagattttgaagatatttccactagtaatggaggatcattttaaaaagctggcctgtgggttgggcttttgttgttgggtggtgttggcactcactgtgggtgggcaaaggggagtagccctttcagagggagaggaaaagttcaagtaggacaggctgaattcaagggagaggaaaatttcaagtaggacaggctgaattcgagggagaggaccatgagagaggtaaggtggaaggggcaaggtgttgggacaggccccagctggcaggaaggtgaacccagtcagagtgggcactgagaggaaagcaatctatggatggtacagccacaatttccatctcaggatcaagcagagaaagagaggctggagaaggaagagtgacagaagtaagaagagagtgtctctccacttccactccagccccctacagctcatcctccagcaggcagccaagggcacttttaggatctcacatcaggtccttgcctcacattctgcactggcttcccaagtaattaaagtaaaatccaaattccagctcacagcttagaaaactcagcaggactggcctctgtcctatcccacaccccacctcagtccctcaagctcatctcctgtcattcctgcccatttctggaccccagccactcctcaaacagggtaagtccattcctgcttcagggcctttgtacgtattgtttcctcttcctggaatcttcttccttgtacagccccagggttttctttttttcatccagatcacagcacagatgtcacatcctggtaacagccagctgtgactcatctccctaattctcaattgtattactctctttttattttcttcgtatcgtaactgatagtctcatacagtacagaagccaagttttaagatatgcaatcaccaaatacctgctacacaaacctcaatgttcatataaaataagactagaattcatattctaaagagagatgaggtagctctgttcacttttgagagggaactcaaatgagagagatacctttgacctaaaggtgtcaggaaaccagatgaagaaaaacacccctgctatgatttgaatgtttttatcctctccaaaattcatgttgaaacttactccccagtgcagtagtgttgggaggcagggtctaatgggatttatggaggtcataaggctctgctgtcatgaatggattaatgttgtaaaccaaaaaataaaattctaagccccccaccccccaaccatatgaatagacccctcctctcagccaagggcattccaaagttaatttgaaaaatgagttcgggccatgatgggaagcagaagctggacttgcctcattataccctcctcccttctagaattagtgatagaacagactctttaagtctgataagaaacatttacagtctgttatctccggaggtttcatctgcttggtaaaaccttgagttccacaaccccagacattcctttctattgacaataactctttaaatcaattggcaatcagaaatctttaaatctgcctataacctggaaactttctgtaccagtatacatcttatatgtattgattgatgtctcatgtctccctaagatgtataaaagcaagctgaaccctaaccaccctgggcatgtcctcaggatctcctgagagctgcgtcaggggccactggtcaccatatttggctcagagtaaatctcttcaaatattttacagagtttgactcttcgtcaacaatgccattgtaaaaggttcatggagagattctgcatgtgcttgcattctctttctctctctctctttctttctctccccccacccccaccctccaccaccctgccctttaccttctgtcaggtgaggatgcagtgtccaaggcaccatcttgaactcatcatcgccaaatatgtgagcaccttgatgttggacttcccaacctccagaccgtaaggcagtacatttctttgtaaattacgcagtctcagctattctgttacagcagcacaaatggactaagacaacccccgagataggaaggggtaaggtaaatgcaatgagagttggggttttcgatcttagtccagtaaaggagctggaactgttctgtataaacaaagggcaaggtaattgctacatagattcttttcttattattgctgattcttatcctaaaataaaggacattgccactacacatcctctagaatgaccaaaaataaaaatacagcatcaaatgggacgacatggtgccaactggaattctcataccctgctgatgggagtataatgtggtacagtcactttggaaaaaagtttgacaatttcttataaaattatacataaacctgtactatgacctagagattctactcctgtttgttcaaaagaaaggcaaacatctgtccactaaaagatatgtacaagaatgctcacagtggcattatttatgacggtccaaaccaggagataatccaaatgtctgtaaccaagagaatggataaagaaattttgatacgtcaatttaatggattactacttagcaataaaaataattagccatgctgggcgcggtggcttatgcctgtaatcccagcactttgggaggctgaggcaggtggatcacctgaggttgggagttcaagaccagcctgaccaacatggagaacccccgtctctactaaaatacaaaattagccggggtggtggcgcatgcctgtaatcccagctactcgggaggctgaggcaggagaatcacttgaacccgggaggtggaggttgcattgagccgagattgcgccattgcactccagcatgggcaaaaagagcaaaactccgtctcaaaaaaataaataaataataattagccacatatccacacaacaatattgcattatcacaggtatagtgataaatactgtatgattccatttatatgaagttcaagaacaggcaagtaatccatgatgaaagaagtacttacctctgggggtggcagcattgactaaagaggtacaagggagtcttctggggcctggaaatgttctatatcttgatctgggtggtggttacacaggtatacgcgtgttaagaaatcatcaggctgtatacttagtgtactgtaatggcattacactgtctttcaattaaaatgtgaaagaaaaaa

SEQ ID NO: 3212 - DNA, 372 bp, Homo sapiens
ccggcctcacctggctcgcggccggcggtcccccttgaaggcggcgcagcaggatcggggtctgcccgcctggggcgtttggcttttgtcccgcgccgaggtccggcccaggagtgcgcttgggagctcccggcgcggcctcggggacaaaggcccgcggagccgacgtgcagcagagttcacccaggcccgtccgaccagaaaacgaagaacgcccggaggcgggaggccggaggcaggctgctggctggagaaccgacggcaacgacggcgcaaagccggcgcggaaagggcaggcgcaggacccaccctgacgccgcctctcccagccggctctcctgaccccccaagccccgcagctacggcggcccc

SEQ ID NO: 3213 - DNA, 405 bp, Homo sapiens
caaagtttgcctcagccacataaagaaggggcctaaaaccgtagcagaccattctgtggcccagcaccttctggcttgaaactcgctgggagattgtggttcagttacttgtgattttcgtcttactctaggcctttagaaaacgctcctctaattagtgtctgtgcagtgtttccaggtaatagacagtgatagagcgctatgatagagcactttctctttattcatcacaaggcccatagattatagcagatctaatagagaaccaaacatgatatgttatccatgaactgtcacctgtgatatatgaattatacagtcttggtgttttagggactcgtgtgaagtgtcaaatgaaatgaagccatcaaaaacttagcgaaggggtaaaaggaaatattaagc

SEQ ID NO: 3214 - DNA, 179 bp, Homo sapiens
ctctactaaaaatacaaaattagccgggtgtggtggcacatgcctgtaattccagctactcgggaggctgagtcaggagaattgcttgaacccgggaggcagaggttgtggtgagccaagatcgcaccattgcactccagcctgggcaacaagagtgaaactctgtctcaaaaaaaaaa

SEQ ID NO: 3215 - DNA, 352 bp, Homo sapiens
gccgggagcaggagcgaaggcgtccatccaggctttgcttggctcctggggtcagcgggggctgaaggaacagaagcgtggttgagtgctcaggaaccgctcccatgcggcgggcgccaccacccgctgggatctggaagttgcccctgcgtcacccctgctgtggccgggaggcctctgtggtcaggcaggtggcactgactcccacccccgctgcctgcattggctgagggagggccgagtgtttgaggctgaggtccttggggctggccccctgcagggtgtggcccaggctgtctctccctcgtgcaggtgagcgctgagaagaagctgacaggcagtaccgtgggca

SEQ ID NO: 3216 - DNA, 2119 bp, Homo sapiens
tggtgcccgcgcgcatggcggagatggcccgctgcatccgggagcgagacttccccagcttcgcccagctgaccatgaaggacagcaaccagttccacgccacctgcctcgacaccttcccgcccatctcttacctcaatgccatctcctggcgcatcatccacctggtgcaccgcttcaacgcccaccacggggacaccaaggtgacgcgggccgggagggcagaggctgcgctcgcgctgtagcgcgtgtctaggcttgtgctgccgtggagacggccccggggctcgcgtgcagggcaatctgtgtctgaaagctccaccctgctgtgtgcgaagctcactgaccatctgggttcttctgtttcattttgtttcttgacttgcccgggtcacggccccaccaccttcttcctgggttcacaggcagacgtgtcaagtaccaggcacttggggtcacagctccactccagtgtggccctgagggcctagactgagctcttggagagcccaaggccgcctggcagaccagagggttggggagacaagggtcaggcaccacgtgaatagccagggtgactgctgtgggttccaggtggcgtacacctttgacgcgggccccaatgccgtgatcttcaccctggacgacactgtggctgagtttgtggctgctgtgtggcacggctttcccccaggctcgaatggagacacgtgagtgtggaccccgcccctcctcctttttgggagatggtgccaggaactctggtcggaagagacggaggcacctgaaggctgtggcgctgagacagggagtcccagggcaggcagcagtcccccgagtgtgggagccacgggcagggtgtccccatagagccatcccacagcccacgtccacagggaagaaagagaggccgctcacgcgtgtgtgagcaacgcccagggtctcccacctcctgagtgacagcgtcccctgcagctcgggaccccgcaggctcttattctatagaacagtggcttaggaaacacgcctgcactcccagatgtgtgcgtaagtgtccgacattttgaaggaaaggagtcaaagcccctgatttccttcttactgaagcgagttagagccagtcaaggcggccgggtgttgaccccgccccggcagttgggtgtcttttcttgggtggggtccggcagctgcatcttggcgccacagagcccccatgtacgccctcctcggtgcacagcttggccctgaaccgcctcttcccctgcgctgctctgtgggggtgccacagagcccccatgtacgccctcctcggtgcacagcttggcccagcctccttacgccccggggctgttgatttcttccctcccgtgttttcatggtgtcttattctcaatgtgagaggcgcctcccatttaagggtgtctggaagcgtgtggggatgtgcgtctgtcccgggtgggagcaataacaccttctaatggtcaggggcctgccctgtggggtggactcagacccacaccccaggactgcccgcctgggaagcaccaggctcgtggctgctgctccgggtggggcttgcaggcttccgctgttctgcagaacacggtgacgaacgcaccagcttgaattgggcgcttccctgagctgttaccccatggggcttggcagcacccttggccagatgtgggtccagcctgggcatagctgtttaccacataacctaaaatttcctgtctcagccattcgagagcatataatcctgcggtgttgaggacattcacagggtcatgtgagcaccacctcaagccacctccttaactttttcatcacccctaaaagaaacctgtccccacagcagccacctgccgtctccccctccctgagccctgacggccaggaatgcacttcccatctctggacttgcctgttgtagactgttgtagacgcttagagaaacggatgcattcaccgtgcccctgccctgcttttccaggtttctgaaggggctgcaggtgaggccggcccctctctcagctgagcttcaggctgcgctggccatggagccgacccccggtggggtcaaatacatcattgtcactcaggtgaggcctggggctca

SEQ ID NO: 3217 - DNA, 741 bp, Homo sapiens
catgggaaaggagaaggcagaaagaagagagggtaatcaacaaatacgcaaccatcaaagtatttactgagctccaatgtgtgtcaaagtctggcctctgcagatggccaaatccaagacccgagccctcggggagctggacactggtcagtgagagaggaaaaaaccacacatgcggcaatgaccctcagagcagacagcacaggacaaatgctgaagatgctgctcaggcagtgactgggatccaagggcaaactcgccaagcaaagcaggcaggcttccagaaaccgtgggacctgagctgatccttgggggaagggggctccaaggaagatgttctcaatcccagatgcacacattagaacacttagggaagttggaaaataatgctaattattggagagtgcaatctgcttgtgaacctttaaaaaaaaaaaacaaaaaactccccagatgattgtaatggtcatccaagattgagaatcactgaactaaatgatttctaagggctggctggctacttaaaatgtgatctgtggaccagcggtgtggacatcacctgggagcttgttagaaaggcggaacctcaggcccaccgcatgtttactgaaccaaatctgcattttaacaagatccacatgaatcactcaaacattaacattaattctggaagtcctgctgggcacggtggctcacgcctgtaatcccagcactttgggaggccgaggtgggcagatcgcc

SEQ ID NO: 3218 - DNA, 1738 bp, Homo sapiens
agtagtactcattgtgactgttgtcccgcctccgagctgccgctgcaatcacagcccgagactggccagtggagttgttggtgctgttttctgcacaggaacaggatagaggagatggtcacatcagagtgtggcctctcttcccactccaggagctctggagacagcagcctgacatgtccagaagaagctgttcccaccacccagcaatacctcctaatcccaaccctcctggccacctctgggagaggccataggaaagcaacaaggaaggcactggaagcgcaagagtcctgcagttgttcctccccagtgcagggggttctgcagctccgagagccaaagggcttagaccagggctgatgagagacacagaggagccagatcaggggacatgccatagcataaagggacagcaagtaggatgagcagctaagatcagccacctggagtcaagggaaatgactgaatagaagcggctagaacatgggctaaggaaaggaaaaagcaagggacaaagggtaaaagagaggcgggaacttggagtcctgcttgggaagagacagggaagggcagaggagcagggctgctcaccctctccgagggaatacaccttgaagccagacactttcttggccaggacggacttgggcaggttgaggagggcagggttgtagacagggaagtcatggtaatacttctccaggatccacactgccacgcgctggatgctgtgggggagacggcaggagggggtgggagaagggacagaccaaggggcacaggggaaagggacacattagggcaggttggcagggcaggagaggacacaggacagggacaagctgcttccgagaagcctgactccgggcctgaggtctacttaccaggctcccaagcctttcccagggctgggcctgccagtccctccccaccatgccaaagcctagcagagaaagggcattgggcctgggtccccagccaaagatcacctcatccccattcagcgttcccccaagatcctctacaggacccaggacgtgccactgatattctgtgtggcctcgaggggtagcttgtttactgggagctgaagaactctcctccttatctctttctctggggatccctcctctggccaggtcacttcacaggccactctgagtgctcacaagaagctgcgcctcccagaaaggactagaaaagggattccaaaaagcccctgtttgtgcacccccccatatttcttccctttggtccatccccctctaatattccctacctctaaatgcctattcattcccatctcataactcccaactgatcttgccccaagaccgtgtacatgaacctgcctatcaagcagcaaacattggtgaaaacctacttggtgcaaagtactcaactccctcccacacaaccctccaagcccatcacctccagcccaccatcataccctcccaccctagcagtcactccacatcctcccatgccctttccctcccaacccttctccagccgtgggctagtacctgagatggccaacgttgtagaagcggctggcgccgtcggtggagcgcacgaccttgagcgtgaactgaggctggagctggcgcagctccagcaggaccacggccaggtagtgcacgaaaagaagggcgtccaccagcgacacggcgaactgcaccacgccctggtagctgcgctcccgagcatccaggatgcgcacaccatagaa

SEQ ID NO: 3219 - DNA, 336 bp, Homo sapiens
ctggatatgacctgcggtgatatatggcaattgttttactgattatgtttagaaaaatccccaacgtgttcaatttcatattaaaatgcctagtatttatggtttataattatcatttttagtgcaatcttgcgcaacaggaatttcattttttataaagttatttgtcacagtgggaggatttgttttctctttagtttatattttataacaattgcaacccatgatttcacagaggagactatgattaggtataatacagattaacctattaagaaatacttgtaaatcttacaattgatcaagattattttgttatgcaaaaaaatagaaaat

SEQ ID NO: 3220 - DNA, 19616 bp, Homo sapiens
cagcctcctggaccatggccgctcttgtgacgacgtccaccgctcccgccatggcctcagcctccaggaccaaatggtgaggtcagtgctgccctggaccggggtgccctgagaactggggctccttgtgttgccccccaatgtggttgccttccagtcacctgccttctctgggcctcagttcccccagctgaaagtggggagctccttcaccccgggagggtccagccacagctcctccttctgatggcttggcctcatcccctcttccaggaaggccatttacggccccaacgtgatcagcataccggtcaagtcctacccccagctgctggtggacgaggtagggctgtccctgggtcttgccccagccctgcctggcgtgctgtgtgaccttggcccagggcttgcctcctctgggccactttacggtggcaaccagaccagctgtccccttctccatagtggatcgtcatctcagaacctgccgcagtcagcctagccagagagaccaggtccaggaattggaggttctgcccaaggcttgggtcacagattggggccccactcatagggattggaggccaagaggcaaatccacgcagcctgagcatctatggggtccccagagacacgccctagagcctgggtcctctctgtgcgtcctccactttcatgctcccaacagtcccgtgggttgggcctgggactgcactgttcacacctgagaaatccaagcttcagttggaggctgtgacatggccaaggtcacacagggacaaagagaagccagtgacctggacacaactagaataaagtgtgaacatcccagccctctgatcgggggcaggcaccatgaaagagatctttgagtctggccccatagaaatcagtctgtcacttagaagctatgtggttttttgttttttgtttgttgtttttttttttgagacagagttttgctcttgttgcccaggctggagtgcaatggcgtgatctcggctcactgcgatgtccacctcctgggttcaagtgattctcctgcctgagcctcctacatagctgggactacaggcgcctgccaccacgcccagctaatttttttttttttttgtatttttagtagatacggggattcactatgttggctaggctggtctcaaactcctgacctcagatgacccacctgcctcggccttgcaaagtgctgggattataggcatgagccaccgcacctggctggaactatgtggttttaggccagtggcttcacctgtccatgccttggtttcctcatctgtagaatggagctaatggtggtaccggccttgtagaattgtcattgccattgtatgacacttagataaagcacttggcgtgtagtgggggttcagtaaatacccttatcctatttatttatttgtttattttttttgagacagggtctccctctgtcactcaggctggagtgcagtggcgcgatctcagctcactgcaccctccacctccccagcttaagtgatcctcccacctcagcctcctgagtagctgggagcgtaggcacaggccaccccatcaggctaatttttgtattttttgtagatatggggtttcgccatgttgcccaggctggtcataaacccttgtcctctttagagcggagaaactgagggccctggggatgtctggttgggtggggatgggattgaccaggagaaaggcctggctccagtcctttggcagccactgggccctctgctcccatgggcacaggagacccagcctgtggctgggctgccctgggggacgcggccctgacgctgcctcccgcccctcccccaggcactgaacccctactatgggttccaggccttcagcatcgcgctgtggctggctgaccactactactggtacgccctgtgcatcttcctcatttcctccatctccatctgcctgtcgctgtacaagaccagaaaggtgagtgccataaggtgggtggggacgggacaggtgggtccccaggggcccccacccactcacggccctcttgtcccctgcccacagcaaagccagactctaagggacatggtcaagttgtccatgcgggtgtgcgtgtgccggccagggggaggtgaggagctagggcccagggggcgggggcaggagtgggagggtgggggggcatggctggggctggccccacctagctgagctcctctcctgcctgcctgcagaggaagagtgggtggactccagtgagctagtgcccggagactgcctggtgctgccccaggagggtgggctgatgccctgtgatgccgccctggtggccggcgagtgcatggtgaatgagagctctctgacaggtgagcccccagcccctggcctgcagcttccttcctcccctgccatccaaccctttgccctgcggcaaaagttttcatttgagtttccttttccttttttgtttttttgtgagacggagtttcactctgttgtccaggctggagtgcagtgacatgatctcagctcactgcagcctccaccccccaggttcaagtgattcttgtgcctcagcctcctgagtagctgggaccacaggtgcataccatcacgcccagctaattttttatttttagtagagatggagtttcactatgttgcccaggctggtcttgaactcctgacctcaggttatctgcccacctcggcctcccaaggtgctgggatttcaggcgtgtgccagcgctccgcctcctcttcctttttctctcaagcaacaatcccagctttaggacttgctaacctcacacccctgggccgttaccacgtatcatctccgtgcctcagttccttcttctgtaagatggctgtcagtcactcctcctggacagagttgtgcaaagtgcttaggagcgtgagaggtgcagcataaatggccagccacccagtgcatctgggctatttctcctttttttttttttttttttttttttgagatggagtttcactcttgttgccccggctggagtaccatggtgcgatctcagctcactgcaacctccacctcctgggttcaagcgattctcctgccttagccacccaagtacctgggattacaggtgtgcgccaccatacccggctaattttgtatttttagttgagatggggtttcaccacgttggtcagactggtcttgaactcctgacctcaagtgatctgcccgccccagcctcccaaagtgctgggattacaagcatgaaccatagcacctggctgcatctgagctgtttctataccagtgcccaccttcaggtcataaagattccagatggcacaggagagtgggaagccctctcccagagtgagagactgcggtccccattcactaccccacagtccccttcccttcccctccccagggcagccactgtgaagggtgtgaggtgtcttccacgcctttttctgcattacgtgtgtgcacatgggctgatttgcctctccttttgttctgaacgtgggattgtatgctgtgtattgttccatactttgctttttctcctggcatccttccacaagcacggatggccccacctcatggctgcatgagagtccacaatacggatgtatcgtaactgactcaaccggcccgctcgccatgagtatttagaatgtgattttccagccattgcaaaggacgccacaggagcagctttgtcctgtgtctcttgatgtgtgcaagtatttctttctctgagatgtgttatattttggtggtagatactggagagagtttactaaaaaccacaggatagtggtttttttccagggaagttttctggctggcattgtatttgtatcacaaatcgtaggccaggcgcagtggctcgcacctgtaatcccaacactttggcaggcagaggtgggtggattgcctgaggtgaggagttcgaaaacagcctggaaatcatgttgaaaccccatctctaccaaaaatacaaaaaattagccaggtgtagtggtgcacgtctatcgtcccaggtacttgggaggctgaggtgggaggatcgtttgagcctaggaggtggaggttgcagtgagccgagatcgcaccactgcactccagcctgggtgacagagtaagactccgtctcagaaaacaaaaaaaaagtagtaattgtgatcagtatgatttgtgggcacacgccctgagccctgccctccacaaactgtccacacatacttcatctgctcatctcttgtgaggcagacatggcaggattgtctgactcccttgcaggaatgtgcacacagtaggtgctcaatagtcccagcctgcaggcattcagtaagggagtgccactgtttgctaggcagcctgcccaggacttcacagggccatggcgagcatgcagtgcttttctcactccaactcatggaaatatttgccccctccatgtaaatatttctctcccctccccctcctccttccccctccccttccttaccccatcccctcccctcccctcctcttttgagacagagtttcactctgttgtccaggctggagtgcagtggcacgatctcggctcactgcaacctccgcctctctggttcaagttattaccctgccttagcctcccaagtagctgggattacagatgcccaccacaacacccggctaatttttgtattttagtagagacagggtttcaccatgttggccagcctggtcccgaactcctggcctcaagtgatctgcccacctcagcctcccaaagtgttgggattacaggcgtgagccaccgcatctggccccttgtaaatatttctgttggttggagttagaaaagcactccatgcatgttataaaataattccagcagaaagagaacgactcccccaccctgccccactgcacacatgatgcccacacatgctctgtctgacccacccccccccgctggttccagggagctggctgccacctgcttccaggagtgtctccctgtgcctttatatctccgtcctctctgagcctcagtgttcctctctgtaaaatggggctgtgatttcttgttcacacctggttacagagttaactgagacttagagcttgtgggacaattctacacagaactcctggtttgctggtgggagggaggggtgtggagtggtcctcacaccacgttccccaccaggagagagcattccagtgctgaagacggcactgccggaggggctggggccctactgtgcagagacacaccggcggcacacactcttctgcgggaccctcatcttgcaggcccgggcctatgtgggaccgcacgtcctggcagtggtgacccgcacaggtatgagccgggaggctgggcttgagagagatcccgggctcagcacccttgggagaggtggagtgaggcagggtgggacctggaaccctggaccccacgcccacctctgctgctgccctgctgtgggacctcgggccagttgccccccatctggggtctgagcattcccatcttagcagaagttgggccagactaaggccaagcattgcaagatctggaggagccgccggggttacagtgctggagcgggcagggatgtagcgggcaggcaggagccttccctgtgtctggattttcagtggaaccacccagtgtttagatgctatccactagttccttgtttaaagcccttaaaaagcctacaagagccgggccagacctgttaggactccacactgctgatggctaatttcacaaacatcatgtcttgcaactccagaggcacgggtcgggagggctaggggtggggaaggcctgccctcaccctggcttccctgccttggggtccccgcctcctccccagggttctgcacggcaaaagggggcctggtgagctccatcttgcacccccggcccatcaacttcaagttctataaacacagcatgaagtttgtggctgccctctctgtcctgggtgagtggccccctgcaccctcctctgcccatagccccccccacctgggtcccaaatcccactcagtccttcgctgtccccacagctctcctcggcaccatctacagcatcttcatcctctaccgaaaccgggtaagccttgggggtggggtggggggtgctgccagcagggcccaggggccaaccagccaggtgctcacattcatggtgccccctgccaggtgcctctgaatgagattgtaatccgggctctcgacctggtgaccgtggtggtgccacctgccctgcctgctgccatgactgtgtgcacgctctacgcccagagccgactgcggagacagggcattttctgcatccacccactgcgcatcaacctggggggcaagctgcagctggtgtgtttcgacaaggtggggccgcaggtggggttggtgcaggggagcgggacagccacaggcgccccagtgaggcctccacacccgcgttattctctcagcagcacccacaggatgccaggtcctgtctagggatggaaacccccagaggatccaccccatcccactcctgccctcactgggctcacggtctggcagatgaaatgtctagaatcatgtattcatgtgttcaagaactggtggggggccgggcgcggtggctcacgtctgtaatcccagcactttgggaggctgaggcagatacatcacttgaggtcaggagttcaagaccagcctgaccaacatggcaaaaccccgtctactaaaaatacaaaagttagccaggcatgatggcacatgcttgtaatcccagctactcgggaggctgaggcaggagaatcgcagaggttgcagtgagccaagatcatgccattgtactccagcctgggtgacagagcaaaactcaaaaaaaaaaaaaaattactggtggggacctggggccctagtgtgcatcccgtgctgctcccaacccttggggcccagcagtgaccaacacaggcatccttgtggtcactggagtgtgtgtgtcccccaccaaagtaagtgatccaggagtgcacaaaggagctgctggggctgaggagtgggcagtgggttttaggaaggaagccagtgggatagcttgatgggttctagatggggacacttccttagagagaaggcagtcaaggaagccccctgagcaggtccctcagtgacctcagtgaggggcaggtcgaggagaagcaagggtaaaaggtgggagtgtcatagcacagatgtaccgtgtgcctggggcacagggagtggcgtggcacagatgtgctgcgtacctgagcacagggagtggtggagcaggacagggccgggtaggcagtggcctggttgacagaggctaggtgacattcagaggctgtcgggggccacagagcgcttttaaactggggagggggcccagcgcagtggctcatgcctggaatcccggcacttcgggaggccgaggcgggtggatcatgaggtcaggagttcaagaccagcctggccaatatggtgaaaccccgtctctactgaaaatataaaaaattagccaggcacggtgacatatgcctgttgtcccagttactcgggaggctggggcaggagaatcgcttgaacccgggaggcagaggttgcagtgagctgagatcacaccactgcactccagcctgggcaacagagtgagactccgtctcaaaaaaaaataaataaaccggggagggggatgaccagattcttatagttcccaggctagccaaggagccagacgcgtacttgggcagttagagtctaggatggggaacgcaggcactgactcatgcgctcattcaacagatatattgaggctgggcgtggtggctcatgcctgtaatcccagcactctgggaggccaaggcgggtggattgcctgaggtcgggagttcgagaccagcctgaccaacatggtgaaaccccgtctctactaaaaatacaaaaattaggtgggcgaggtagcgcgtgcctataatcctagctgctcgggaggctgaggcaggagaatcacttgaacccgggaggtggaggttgcagtgaactgagattgcgccactgcactccagcgcgggcgacagagcaagactccatctcaaaaaataaaaataaataaaaataaaaataaataaataaataaataaataaatgagagagagagagcgagccaaccgtgggccgggtccttaaccacaatgcacaagtgtggggaagtgaagaggccatgggtaggagcccagagcaaaccacctgccctaacttgggagttaaggaggaagacaccctggaagagatgatgctagacagagagacggtgggggctggggagggggaccccagcagagggaatcacatgtgccaaggacagcagtcaagaaaggtcatcttttggctccagctcgagttcctggggttcccatagggtccgccgggcctggggtttggaggcccagctcagcagggtacccccatcccaggactcatcgctgccccacccacctgtctcccacagacgggcaccctcactgaggacggcttagacgtgatgggggtggtgcccctgaaggggcaggcattcctgcccctggtcccagagcctcgccgcctgcctgtggggcccctgctccgagcactggccacctgccatgccctcagccggctccaggacacccccgtgggcgaccccatggacttgaagatggtggagtctactggctgggtgaggaggccaagcaggtcagccccctgcctctgggcagtggggcctaacgaatcccaccctgtcttccctctccatctttcagggtggtctcttattatgcccaccattaataataataggccaggcgcagtggctcacacctgtaacgtggctcccggcgctttgggaggccaagacgggaggatcacttgagcccgggaccccagcctgacctacatggcaaaaccccatctctgccaaaaatacaaaaattagccgggcgtggtggtgcatgcctgtagtcccaggaggctgaggtgggaggattaattgagcccgggagggcgaggctacagggagctgtgatcacgctactgcactccagcctgggtaacagaacgagaccctgtctcaaaaaataataatgataggccaggtgcagtgactcatgcctgtaattccagcactttgggaggctgaggtgggcagatcacctgaggtcggaagtttgaaagcagcctggccaacatagtgaaaccccgtctgtaataaaaatacaaaaattagccaagtgcggtggaacatgcctgtagtcccagctacttgggaggctgagggcaggagaatcatttgaatccgggaggcagaggttgcagtaagccgagatcacaccactgcactccagcctaggtcacagagtaagactctgtcttaaaataaaagtaacataataataatggcaaggcctcaggctgagtgcctactatgcgccagcgcacggccacagaggcctggtctcatttcctcttccccaagccctagcaagcaagctcaaatgttgcttcacggatgctgaggctgggagatttggagtgacgtattccaggtcacccaacagcttgtaagtagcaaagctagagtttgaatttgagtccaccgggctccaaagcccacattcttaacccaccattcagtctcccatgaaggaagtcttccctgagtctagctcaaatctctctgtgagccaaagcccccagacaccaaacttccctgcctgcctgccaggtcctggaggaagagccggctgcagactcagcatttgggacccaggtcttggcagtgatgagacccccactttgggagccccagctgcaggcaatggtgagctgaggggggcctgttgggtgcagggcagaggggtgggctccccagccagcacctcagctgcctctccaaccctgcaggaggagcccccggtgccagtcagcgtcctccaccgcttccccttctcttcggctctgcagcgcatgagtgtggtggtggcgtggccaggggccactcagcccgaggcctacgtcaaaggctccccggagctggtggcagggctctgcaaccccgagacaggtgcagggggaagcccctgagtccccctggttgggcattggcacagaatggggtgggtacccagcctctgtccctgccatcccctccttgtgacacctgcctctccctggcagtgcccaccgacttcgcccagatgctgcagagctatacagctgctggctaccgtgtcgtggccctggccagcaagccactgcccactgtgcccagcctggaggcagcccagcaactgacgaggtgggcctgtctcctgtcccacccactctgaggactaggcagagggaggctctcacgcaggcagagcccaaggaagatgccctgcctggtggctgggagaggggccctggccactgcatgacctctgatccaggtctgcccaccctccagggacactgtggaaggagacctgagcctcctggggctgctggtcatgaggaacctactgaagccgcagacaacgccagttatccaggctctgcgaaggacccgcatccgcgccgtcatggtgacaggtacaatggcatgtaggggcccgggctagcagggcagaatccgccccttcctggcagagaagaggggcaccagggattcctttttggggcatctttttgggcccttgcttcaggccaggtcctttttaaacatttcgtgaatcttcacaatatcccccccgcaagtggtaattgtcacccctgtttgacagatgaggaaactgagactcagaggagtggagtgacttccaaggaacccatgtgcgctgtcagacagcctgggttccaggtggcacctctgagaaatggggataatgatgtcagcctcagaggctgtgacaagctcaaggagcaggaagagaaagattctggccgggcacggtacttcatgcctgtaatcccagcactttgggaggccaaaggagaaggatgtcttgaaccctggagttcaagaccaacctgggcaacatggcaaaactccgtctctacaaagaatacgaaaatggccgggcacagtgtctcacgcctgtaatcccagcactttgggaggccgacgcgggcggatcacttgaggtcaggagttcgagaccaacctggccaacatagtgaaaccccgtctctactaaaaatacaaaaaattagccaggtatggtggtggatgcctgtaatcccagctactcgggaggctgaggcaggagaatcacttcaacccgggaggtggaggttgcagtgagctgagatcacgccatttcactccagcctgggcaacagagagagacccagtctcaaaaaaaaaaagattctagctagggtgagacagcaggagctaagaggtctgtgtccttgtcctccccgcccctgcacacacacatatgtgcacacacattcatgggcacttggcagcagagtcacacagcagtaaggagtatatgtagcctgggcacatggctcgtgcctgtaatcccagcactccgggaggccgaggcagggggatcacctgaggccaggagttcaagaccagactggccaacatggtgaaaccccatctctactaaaaatgcaaaaaaaattagcctggtgtggtcgcaccctcctgtaatcccagctactcaagaggctgaggcaggagaattgcttgagcccaggaggaaggaggttgcagtgagccgagatcaagccactgcactccagcctgggccacagagagagactcttgtcttaaaaaaagaaaaaaaaggagtatatgtggagctccagcccacggctccaggttctcctaagacccttcaatgcctggatctacagatgagaaaactgaggcaaagggatgttggtaacctgcctcagctcacttggctggtggtggcagacggatttcatccagcctgttttcccatctgtaaggatcaggatgaggatggcctccccggatagcctcagaccctcaccttgccccataacccccaggggacaacctgcagacagcggtgactgtggcccggggctgtggcatggtggccccccaggagcatctgatcatcgtccacgccacccaccctgagcggggtcagcctgcctctctcgagttcctgccgatggagtcccccacagccgtgaatggcgttaaggtgaggctaacccagagttccagctgtacctcacccagtgaccccacccctgtgtcacctgacccaggccccaactctccagggtgggcagggggagctaagctgagcttcctgggcccccaggatcctgaccaggctgcaagctacaccgtggagccagacccccgatccaggcacctggccctcagcgggcccacctttggtatcattgtgaagcacttccccaagctgctgcccaaggtagggccgcccccagctccctggccgccctgcgcctcccctgctctgtctccttcctcacggctcgctctccctggtgggtgcctcagccctcccccatctccctgtgctcccaggtcctggtccagggcactgtctttgcccgcatggcccctgagcagaagacagagctggtgtgcgagctacagaagcttcagtgagtgctcggcagagggtgtgggcaagggcctgcggagactgagcttgtccgttcgtctgttcatctgtccttccccagggccctgtctccctcctcaggcaccagagagctgtcacccctcctcaccaaaagcaggcaggctctcccaggtctttcatgctaaaaataataattgtaggctgggtgcggtggctcattcctgtaatcccacctctttgagtggccgaggtgggaggatcacttgagcccaggagtttgaggccagcctgggcaacaaagtgagaccccatctcttattaaaaatttaaaaattagccaggtgtggtgacacaccggtcatcccagctactcaagaggctgaggcaggagggttgcttgagcctgggaggctgcggctgcagtgagccatgatcacaccactgcacttcagcctgggcaacagagcgagactccgtctcaaaaaatagtaataggccaggcgcggtggctcatgccagtaatcccagcgctttgggaggctgaggcaggcagatcacctgaggtcaggagttcaagaccagcctggccaacatggtgaaaccctgtctctactaaaaatacaaaaattagttgggcatggtggcgcacaccagtaatcccagctactcaagaggctgagggcacttgggcagcagaggaggttgtagtgagcagagatcacgccactgcactctagcctgggcaacagagggagactctgtctcaaaaaataataggccgggcacggtggctcatgcctgtaatcccagcactttgggaggccgaggcgggtggatcacctgagatcaggagtttaagaccagcctggccaacatggtgaaaccccatctctactaaaaatacaaaaaattagccaggcgtggtggcgggcgtctgtaatcccagctacttgggaggctgaagcaggagaatcacttgagcccaggaggcagaggttgcagtgagctgagatcatgccattacactccagcctgggcaacaagagtgaaactccgtctcaaaaaataataataataatgataataataataataattgcatctattcactgagcgcctcctgtacaccaggcaccatgtggcattaggggcccagctgtcatcatattctgccagcccacccatggggtggtggggtaattccccaggccacacctgtccacacctctcttcaggtactgcgtgggcatgtgcggagacggcgccaatgactgtggggccctgaaggcggctgatgtcggcatctcgctgtcccaggcagaagcctcagtggtctcacccttcacctcgagcatggccagtattgagtgcgtgcccatggtcatcaggtaaggcaggcagggaccggtgggtgagggctcagcagggctggtcagccaacctgggtcccctaatgtccgtgccctgccacccagggaggggcgctgttcccttgacacttcgttcagcgtcttcaagtacatggctctgtacagcctgacccagttcatctccgtcctgatcctctacacggtgagtatctgcagagctccgtacccagagccgtcccaggactagggaggggacacagccctgtgccttggagctggcaggtcccagaatagatgacgtgggcccagatcctgaccctgccactctccggctgtgtggttggagaggtggcaaggcttgggggagatgagaaaaacaccaggcacggagcctggtacccactaggtcctcacaaatggcagcagctgtcatgggctaacatcttgaccgcaactctgggagctccccaatctgcagggaagactgaacggaggcagggccaaaaccctcgcccccgccccatccccacaggtctgcccatttccccagatgcacttgctttgccccataccttggctgtacctcccacaccctacttggaggagctctcccctcccctgctctgggcatggcctgctcacccccagcgaatgaggtgacactgcagggcggcgcacatcttatacttgggtctgtccctgtgtctgcctgaaagcgaggagctccctgagggcaggaactgtgcatgccctggtagctatagggactccgcaaggcagagccgaagcctccccttcgggccgggagtttgttacagggagggaaacctcccctcagatttaggcccccaaggtcagcacaggtgccctttccatcagaccaggggtttgtctcacatcaagagcggcacctcctccgctgggctggcaggagagtacggcccccattagactgggggatgccttacccatcagattccttcggggcaggggtggggcctctgctatcagactaggggctgccagggccaggtcttagtttcccctctgtcctcccttccctgtggcagatcaacaccaacctgggtgacctgcagttcctggccatcgacctggtcatcaccaccacagtggcagtgctcatgagccgcacggggccagcgctggtcctgggacgggtgcggccaccgggggcgctgctcagcgtgcccgtgctcagcagcctgctgctgcagatggtcctggtgaccggcgtgcagctagggggctacttcctgaccctggcccagccatggtgagtagggagctgactgaccacccccatcccgccccttccctgtccaccccacgttcgttccctgacccccatccctgtacccccaggttcgtgcctctgaacaggacagtggccgcaccagacaacctgcccaactacgagaacaccgtggtcttctctctgtccagcttccagtacctcatcctggctgcagccgtgtccaagggggcgcccttccgccggccgctctacaccaatggtgccactgcgggcgcgggcgggagatgctggcggagggagggaggagccctggggtgctggggaggcagatgggagagaggtgccggccgagtggaagactggcgtgcacacgtgtgtctgtgggtgccgggggggcgtggctcctgcctgagagactctcctgctcccagtgcccttcctggtggccctggcgctcctgagctccgtcctggtgggccttgtcctggtccccggcctcctgcaggggccgctggcgctgaggaacatcactgacaccggcttcaagctgctgctgctgggtctggtcaccctcaacttcgtgggggccttcatgctggaggtggggcccgccctgggtctcagcagcgggagagaagggaggtgggggtgcattgaccccagctcagccccggctgcccctgacaccctccctgccctttgcagagcgtgctagaccagtgcctccccgcctgcctgcgccgcctccggcccaagcgggcctccaagaagcgcttcaagcagctggaacgagagctggccgagcagccctggccgccgctgcccgccggccccctgaggtagtgcaggcccacgggcaccccagacactggaactccctgcctctgagccaccaactggacccctctccagcaacaccaccgccaccacctcccacatccctgaggttggcgactgtctacactcctcccccgagaccacccccaccctggggaagcgttgactactgtcccctaccttggaccatcccgcgtaggggtggcagcccccagctcccctcagtgctgctgtcagtgtagcaaataaagtcatgatattttcctggctctgctgtgcctgtcttgtacctggcaccatagaccctcccacctgcccaggaggaaatgcacatacccccgggtgcccagctggcagcccctgcacgtgtctgcccctggaaccccctggggggctggtttttcaggctggtttttcagcctgacaaccccctggaaccccctggtttttcagactccattggccaactcccctctctgggcctgtgttccctcatctcacagtaataatgtttcctctgtgtccagcatgtgcctggatattccgtttagcttttttttttttttttttttttcttgagatggagtcttgctctgtcacccaggctggagtacagtggggtgatctctgctcactgcaacctccgcttcccaggttcaagcgattctcctgcctcagcctcccgagtagctgggattacaggcatgtgccaccacgcccagctaaattttgtatttttagtagagacagggtttcgtcatgttggccaggctggtctcgaactcctgacctcaggtgatccgcccaccttggcctcccaaagtgctgggattacaggcgtgagccactgcgcttggccccatttagcattttacacacattgtcatgtcatccttccaacaactgtggtactattcccattttacagatgaagaaaccaaggcttagaggttacacaagtagtcagagtggggccggatagctttgactccagcttcgatgttcctaaccctcctaccctcctttggaggacaaggagatgtaggcttgcctgggaggcatttgctagggggcagctccctctctcccaccttaccccctccccgtcccaccccagcatcctgggacatgtttgtgggcagttccttcctcagatgaaatccaggctcggagcccacatctcccagccagaaccacgcgcatcatccctcagggaagggtgggtgcctctgagctcatctcaccagcgggcccctggccaagcccctctgctctagagaggcagcttggccgtctggctcatctgggcaggggagaacaggaaagaccggctgtttcctgccttccaaaagccctggccaacctcattcctggaacccctggtgctatccccaggcctgccagagtaggggctgagaaaacgttgaatcatgctggggagaagggatgtgggtgtgaagatgaaagtcctgccaggaggcacatcacagtggacctctgctcctggcactgtgttgccagccagcgacggttcagggtggtagatgctgtttaagaggaagccacagagaggcctgggttcaaatccctcctctacccttagctgattattcatgaatctgttggacaggtgtgtgccaggcaccaggactaactcaacaaactgaataaaacgggacaaaaacatggtctaaccctgcgagcagttcaccatccagcgtgaaagcctggcagggaaggagcacatctccaaagacgtagtgggagcacagcaaccacagccccatcccctcccctgcccaaagaaacagccaggggaatgggtagaagcagcagagaggacatgggagccaggacacgaattgtcagctttagcccctcagtttcccagtttttcttttcttttcttttttttttttcagacagggtcttgctctgttgcccaggctggagtgcagtggtgcaatcgtggctcactgcagcctctacctccccaggctcaggtgatcctcctacctcaacctcctgagtagctgggactataggccagcaccaccacacccagctaatttttgtattttttgtagagatggggttttgccatgctgtccaggctggtctcaaacccctgggctcaagcggtccacccgccttggtctcctaaactgctgagattacaggtgtgagccactgcacccaacctccctccttttttcaagggtaggggacagcatttctgctgggtgagttcctctcttttgccagtgggattgctcctggcagcagtggggtctaagggcaggcagagagggctgggctggcctggcctgagggcccacctctctccaggtgacaaaagtctctgctgccctgcaatagacactggggggcggggcatgggaatgaaggaggcacagggcatatttactccctccctaagactcagagtctaagggaggtgggggaatgactggcgatgaagagatcagatggcaagggtctaaatcaggggccatcctcatctcctcccagcccgcagcccctacaactctcactcccgcctcaggcctaggctcctgggcagggctgaaggctgcccctcacgcagaggatctgcacccccagccagcttctccgggaagagtttagtgtacagttcactcattcattccaccaatgtttgctgaactgctgctctgagccgggctctgaacttaatgagcaaaactgaagatgagcaaaaacagccttggtcctggccttcacggggcaagatgacagtctcatcgggaagagggacagggctcagatggtcacagacataggccaacaagacaactgcaagcagtaaagctagaaagcacaaaaaaaggaaaaagggaaggcccctctgaggaagggagggtttgatctgtgaccccatggaggagacctcagccagtgctcgggaggaagaaacgcctcagtgtgggagggagaggggtttgggagaaaacccccaaaggccagtggctggaggaggaagaggaggcagagccaggctgccataaagggccggggccctggaagccacagggaagttgagcctctaacctgagtgaaaggcgatcagtagaaggggcacgatctgcgggggtgagggaggcaggacccacgtgggagagcccagagtggaggctatcgcagagcccaggcaaatgatggtggtgtcaactaaataagaaatcagccttttgaccaggtgcagtggctcacgcctgtaattccagcactttgggaggccaaggtgggtggatcagctgaggtcaggagtacgagacgagcctggacaacatggagaagcctcgtctctacgagaaataaaaaaaaaaaaaaaaatagccaggcatggtggtgggtgcctgtagtccccactactctggaggctgaggcatgagaatcgcttgaacccaggaggcagaggttg

SEQ ID NO: 3221 - DNA, 1293 bp, Homo sapiens
tgcggctccggccctgcaacctggcccacgccgaaacactcgttatcgaaataagagacaaagaggtgagagtcaggctgagcctggggctagagaagcgcagtgagggtcagggtcgggggtggaggatgcttgggtgccaacccggccactgactttccatgggacattaggcaggtcccgctcttctctggacctcagctttcccatctgagcattgggcagaagggacgggtcgggtggtttctggagggctctccatagccttgatttctgccttctccagcaggggccgcctggctgtaggacagggcctgggaggggaggggactcttctgagactgagtccatacctctgtgttccaggatagttcctggcagctcttcactgtccaggtgcagactgaggccatcggcgagggcaggtgaggcagccccattgccccttcccagaagcccctgctaccctggcctccccaacttccccaaccctcggcccccccataaaggctgactctggcgcctcccatcctagggagggaagatggctctgtgagcacagggaggtgccagggcagctcccagagctcgagagtaaccctcacctgcttccccagcctggagccgtccccacagtcccaggcagaggatggccggagccaggcggcagttggggcggtaccagagggtgcctggaaggatacggcccagctccacaagagcgaggaggcggtgagtgtcggacaggtgggttctgaaaaagtccttgcccctctctcggcctcggtttcatgatctgtgcaatgggagagtcagacttcatgttctcccaccaccttttagttctgttgtcccaaacatccaggatgctgtctgagcacgtttacactttcaggcctctccccacctctctgtctggtgacaccagtccctgccccctacccccatccctcggctcccagcataagcacactgcttctggggccggggccagcttccaacccatcctctcctctctcccacccagaagcgggtgctgcggtattacctcttccagggccagcgctatatctggatcgagacccagcaagccttctaccaggtcaggtaggagtcagggcctgtgtggctcatgtcacctcccagagtggcactggtttgggcacagacggtggcatggcatggcctgggctcccctctcagctctgatgcttttgctgtctgaaaccttgggcaggttactgagcccctccaggcctgggatctctgtctataaatagggcatgaagataa

SEQ ID NO: 3222 - DNA, 7067 bp, Homo sapiens
aggccagggtgggagcagtgaacggagtcacaaaagaaatttttcaggtagcattcacgggtgggtgctggattagatgcagggctaagggcaggggaggaagcctgggtaatggaaggctgcggggccaaggggggactgggaatcctggagggccaggtctgggggagagttaggaggtcgtgaatttggacttggatgcttgttgaagctgatgcatcttgaggacatttgtgggacacataggctgggtcagggctgaaagaggtgctggttatggccgggggcagggactcatgcctgtaatcccaacagcccaggaggatgagacaggaggaatgcttgaggccaaaatttcgaggccggaagttccagacgagcctgggcaacacagcaagaccctgtctctagaaaaggaaagaaagaaccgctggttgtggaagccagccatggcccagagctcagcagtgtaggagaggagggtgcgggcctgagagaggcagcaggcttggctggagaggcagaaggaaaaccaaggcaggagagtgtcctggaagctgggagaaggcagagggagatcgaggcttactttctggctgaggggcctagggtgagtcactttgggaggcttgatttcctcctctgtgaaatgggcaacacacctacccttgcccacctcacccccctcaccccgtcgacgtcgagtgaggagcagctgtgaggaggaggaagctttgcacagacgtgaggacggccccgggcgcctctaccccggggacacccccccccccaggagatggaaccccgagggcacggcgtggcggcccatgcgggcagctcgcgttaggacccagcggctccggggctggagggcgggcgccagccccgtcgggggcccggagggggactcggagcgggccaaggggcggctccggcgggcggactcggagcgggcggcggagtgacccggacaggtaggcgcgggcctggcgcttgggggccccggggggcggtcaggggcgtcggcgggtcccccggcgcgggggcgagggtgccaggctctctgggtcctcgatcctggggcagccgcggaggttcctgaaccccgcgccttcagagcggaggccaagggggcacctggaaagtttggggttgctctgcagagagaacgcgaattgggaagggcggggagcccgagtttggggggagccagaggtgaggtcgtcgggggatgggacatcttttgttctcccggggaggttggaatgtggcgggtggggtggggggggggggtccggtgggaatggccgagacagagacgcagagagacaaagagagatcagagacgggagcgcgagggcgcgcggagcaagtttccgcggctgattgttcccagctgtgcggcgctgcaacatctgggtttctcccgccgggacccctccccctgagcccggctctggagccggcagagccctccctccgtctgatgtctgagcgagcgtcggggccccctgtcccccacctcccaggacgcaggggagtcgggggtgggggaggccgcagctgtggaagaggccagaggtgggggtggggcagcctcccaggcaggtcctggcctcccgcacgccccaaaaccccttcgtctagaagagctcggagatgtggtcccgtgggaggagttcatgaactccacactgacttctctctttcctgcctccccgctagcccgtgggcctccttcccccaataagcctgggttcgggggccagtcctaggggaggaagactccccgcagggtaccgacaggcatcccccaacaccttgcaacccctcttgccccaattcagcgccttctgctgagcagcgggggctccgaccgacctgacggatggggagaagggcaaggaaggctctctgggtcttttcatccccctcccatgaggaggtcaagggttttcagaatggggtgtggggagccagctatccctcgcctctggggcagcttggtcctgagcttcgtctcccggctcccactccaccttagtgaggtgcctaatgcatgagaggagccagggggtcaggaggcctcaggattgagaggaaggagggaaagacctcctgctttctcccctttccctcccctctccctggactcccagtggggaaaatagaccaaagttggggtttccagctagctctctgaaaggacttcctgggttgcagccgggaggggccctcctggatggaccccgccctcgcagccctccctacagaaggctgacggacctgaggtggccctccactgagctggggctggatgtggggaaccggaggctcccccaagtcccaccgtgtagccaggactggaggctgggctcttgaatgtcaggagcctgatgaaagccacggaccccatgccctctccctccaaatgacacacacacttgcctacagtgtcagggggtgcagaacccccagcctgggtgatgtcacggccccttcagtgctgcctttctgggatccagaggagccccctcaggcttcactctcgtgcttcctgctgctgcaaatagcccgggtctcgtgagcctgtgatgcacacagccaggtcttgcgaggcctggaggcctggcaggagaggagtcttctgggagctgggagccctgcccggcctggccgctctgggggccgggcaggcccatgtgtatgtggtttcctgctgagcaggatgcttagggcccaggggctaattgggagcaggtggtggcttggcagaagctgctgagtccaggcggtgatgccggctggccagggctggggtcccaaggatgggcctgggttcagtgattcacgcagtcagtgccttggacacccagggagccactgggccagagggctgagcacgggtgtgggtgaggacagaatggcctgggctgggagcacattaggaatgtccccttagtgagcagggcagggtccgcccttccctgaccacatcaagtacacccactacacggggtttgcttgtcaggatcagccctggagctgggttggaggccttgtcccttgtgacctgaacacctgggtgggccagcagggactgggatgtccctccactccagccctcccatgcctggcttctattctgggtgccaccttctccagggcgaaatcaggggatcaaaggtgagctctgctgtcctgggtgtggccctgggtagagctctcccaccggtctttccccagctgtcctctctgacaccaccccggcctgcctctttgttgccatgagagctgcctacctcttcctgctattcctgcctggtaagtggctcctggggcagggggtagctcctcttatgtggggctgaggagtagggttagtagggggaattcatagtgagcctttgtcacgacttatgaccagaactcagctccccagctcccagggccttctgcctgcttggaccacagactggaccagccaaccctggcagcatctggaggcagctcctggcccttcccccagccttccacagcagcaggcaggcagggttctggagggcacgtcccaggcacaaggactccgtgggcacaaggcacaaggcctctctgggagccgatgtgcaggtgcaggggcacccaaggcagggagtccggatgcttgagttctagatccattcagggcccttctgctctatacagtcctgaccttgtgggggtccctactggccaaatgaagagaatcaatgaggaccacaaaagtcctagcagggccaacattcattcattcagcagcgatgtgttgagtccctaccacgtgccaagtgctgggctaggccctggggattcagcgatgaaccaggcagacacatcgttgctcctcatcatgctgccagtccagggaagggagacaaataggaaacaagcagacatgagaaactccagcatgtgctgagtgctggacagaaatcagcaggagggctggtgggctggaggtggggcggcatcttggcacagctgaaattccagggaagacctgaaggagctgagcaggcctcacaggcccagggagtgtcaggtgcaaaggctctgagggaggcaggagcatgtggagtcctaggagcagccaggaggccagcaacaggaaggggcagggtaaggtcagggaggtgacccatgaccagggtggggaagggtctttaccatcgaagaagagtctggatcctctaggaatctgcttgtggggtcctaggctcttatgggcctgaccttgtgacccccgcctccactctccagaagcgcctcgggcccccgttgcccctcccgatggggtaccctacatgctttgcctccccacagcaggcttgctggctcagggccagtatgacctggacccgctgccgccgttccctgaccacgtccagtacacccactatagcgaccagatcggtaagggccttgccgggtcaccgaggcctggctgctcagatgtgcctggctcagccagggaccgcactggacacgctgatgggaactctgggggttggtccctggctcaggagggaacttgtttgccccaggggctgggggattagccttactcccaccaattccactttcatctttgtttgcagacaacccagactactatgattatcaaggtaacgggctaggggtaggataggacgggccggcagctggggtggggagaccccctgggaggggtagagggagcagacccccttatcctcccctggctgcagaggtgactcctcggccctccgaggaacagttccagttccagtcccagcagcaagtccaacaggaagtcatcccagccccaaccccaggtaggccccagaccctgctcccacccgtctcagctcctgcctcacccctccccaccctgtcaaccctgggagtgggggtctgccagggctgggagaggtgactccccttgccctgaggagacccctcccagtgatgtctgcctacctctgtctccacaccagaaccaggaaatgcagagctggagcccacagagcctgggcctcttggtaagggctttcttgacagctggaaaaatggaggcacgccctgaagttggggtggagtagggggtggtgctggtgggctggaggtctttggcccttgcccatgtgggctcttggcagtgtgggcagtatgactgccgtaggctggcatcaccaggccccccaggcagctccaggaggtcccacctgtccccagtgtgcctggctggaggctaaattggcagcctaggaaggcccctgacctcacagatactgggaggggcagggagtgtgctgggggcttcctgccagccagagagactgagtggtgcacatgtggaggcgaggaagggccagggagtgcaggctggctgagcggtgccctccggctgccctagctgagagcttgaaagaacaaggtgtgtgtgtgcaggagaatccgtgtgctcactctcgtgtgggttggtgtgagcgctcctatgtgggcttctgtgagcgtgggcacgtctgctcgggagttggtatgggcttttgtggcgatgcatgggtgggtgcaaatttctgtttgaacttaggcttctatagtaagtgcggttgtgaattgatacgtgaatattacagccctgggaagtctgacaatgctgcgtgggtctatgtgggcatgtgtaggtatgggtgtctgcacggggcctgaaggtacaggggggactaggccctgtgagccagcctcaggtgggtgaggctgggggccgccccccactctgggctcctagtctgaccccacctgtcaccagactgccgtgaggaacagtacccgtgcacccgcctctactccatacacaggccttgcaaacagtgtctcaacgaggtctgcttctacaggtgagcacagatgggcagctgtcgggaggattccggagcatggggggctagagggcacaggggacagctctggcccgccaaggtgggagttggaggaaagatagtgagtccttaagttgagctcagttctgtggttgagcctgggccagggacctcctccactcctgggctccagtgccaggttctgtccgggctcccgtgccaggttctgtccgggctcccgtgccaggttctgtctgggctatcccagtgggattgggtggaagtggggctgagacctcccgtgccctgtccccgcagcctccgccgtgtgtacgtcattaacaaggagatctgtgttcgtacagtgtgtgcccatgaggagctcctccgaggtaggaaggccacctccccaagacctcccctgtccccacacccgcatcattatctggccacctagccacccacctgatgtttattcaacacatattatccaccaggcccacttccaggacaccctgagctcccctccttgctacttttcatcctcaaaacactcccatcaccagagttgggggaggggcagcggttcccatcacccagctccaccctgaccctgcctccttcctgcccccaatagctgacctctgtcgggacaagttctccaaatgtggcgtgatggccagcagcggcctgtgccaatccgtggcggcctcctgtgccaggagctgtgggagctgctagggtggtgctggcatcctgagtcctggccctcctgggatctggggccctcgggccctgcctgacctggtgcttttttccccatccccatgttccttttattctgtaaaaagttagtggactgcagccctgggggttgcaggctgcggtgcctcaggcccctccttcagcctgtggccacctctggggcacaatgggggctccccactgcccagtctgcccctcgggttgggggagtatcccaggcctctctgtgggacctgggcccctgacgggccttctcagcccgttttgaggacagacagtcccccgaggtaggctacatccccccaccccagctggtctgcttggatttcctacagcccccgtgggcatggaccacctttattttatacaaaattaaaaacaagtttttacaaaagatcaagt

SEQ ID NO: 3223 - DNA, 363 bp, Homo sapiens
gcagattttggtatctgtaggggttcctggaactaatttcccaaggatactgagtgacaacagcatacatctcaggaaaaatgtccacttgttctaagtttccaaagttccaatgttttgctatcttctgtccttcccacccaacctgacccagctgcttcttgggacagtggtttcatatggcgtccttcagcgctagtgattccacaaagattcctgaaccctgtggcctggttcctggtcaaaatatttcagtcttccctttgttgtacattttactttaagtgtaatttggtcaaaccaagtactgaccacttgtctagtattatgtatacatgaaaaagaatgaaaaggaaatgacag

SEQ ID NO: 3224 - DNA, 519 bp, Homo sapiens
tgtaaactcatatgtcccctcatatcttattttcccatcagattatagaatgcctaaggtctagtgcttgtttcacttcctcattatttggtttctctatccattccaataaaacagtatcttacacattttaagaccaagggaaaaatcaaacagcttagaaaaaatttttaaagctcttctctctagttaagtctattttctttctccttctgtctttttgtcgtgtcttccttagcatctttccctttgttcagtttcctctctacaccttttttctgctttgagatgctttaagatacttttaaaattaaaaatttatcttcctcaagaaatttttatgaacttacaatatttttaccagttatgttccagtctcttgcttaacagagtgaacatgaaagattaatctgatgccagggggtacagtgtcagtgcaagggatggaaaacagaatggaacatgttttttcatcaggaaactccgtatgttcccttgtggtgatgataaattcagcaa

SEQ ID NO: 3225 - DNA, 1819 bp, Homo sapiens
aagagaagtagaaaaactacttctaaatcaacaaatacctgataccttatttaactccttgaaatttttaggttttcctgatggttactttaagtgaaaaatgagcattagatttattaaagttacatgatactatgtttgtttcttactctataagaaatgttgataaatttttagttcctgaactcaataaataaagattgaataccttctccatcagaggcacccttagcagtatatgggcgacaaacttacataggttagtaactgtcataggagcttacaatctagtagaagactgaaacagaatgaataatgtgtttaaattacatggactatttgggtagagtctagtgcagagactgccagttgtccttcaataattctcctccccttctgtttgtctggacatatatggccacccagaataaagaccacatttctcagccaccctagtggcttagtattgccatctggctaagttctagacaacaggatgtaagagtaaatgtctgtgatggcttctagtaaccttcctaagagacaggtgatacatgctgtctgtcccttctttcccagtcccccatcctactgtttaaaatgtggatataatgactggagctgcatccttgaccctgaaggaaagggccatatcctagggatgtaaggtagaaagtccaaaggtgtcttggtccccaaggtctttgtggagcacagctacagcaccaagcctgagctggctacctctgggcttttacaggagagagtaataatactgtgttcttgtttaagctatttttattttgggttttcatgatccacagttaagcctaatcctaagtgatacggtgtaacaatgcaagcaccacacgtgtggagaagatggacaggtagcacctaaatggagtggaatagggaagaggtagcattagagaaatgaattcacagttggttcagaatttttaaaggagagacatcaggaatgaaaggtagagtattccaggcaggaaaaaacaaaacaaaacgaaacagtataaaacacattgctgacatggaagagttctatgtgtaactgggaaacactaaatagttacagattgtcaagaataaaatgatgatttcaggctgaaaatgttaggctaggacagatagtgaaagattttgaaagtgtaatacaaggaatatggatctcattcttttactgatgggaatattatagtgtcctttagaatgtgcctcagagctccaattgtagaaagagtagctccaattgtctcaagttgctgtgctctggaagccatcaacaagtttgcactgaggtcacctctaccagggttgatcccagagaaaaagactgagcacactagggacactaaagtaggcctaatcctgggaggcccagtattcttctcacagtaaatttcagctagaggacttcccagcagccttgccaaaccttccttagaactgttcagctgtctaggatacttctgtacaactttccttccttcttcctctccttaactctgggtcagactttcgtgttggtctgatggctttcctggctccttccctctggttctcacagggtgttttctctaataaatttctgcacatttaatctaatcttggcatctgtttcttggaagacctggactaactcacacatctaaggctttttgtacaatgtgtatcaatgaactgtatatgagtgcattgttgggatgagagaattaggtacgtggagcttgaaaagataaatttctgtgctttagaattaaatgggagtcactgcaggtaatgtaaaccaaagacaaat

SEQ ID NO: 3226 - DNA, 347 bp, Homo sapiens
ggccaagattgtgcccaaggacttcccagcctcatctcctccatcacagtcagcctgcagcccctcattcagccccacctttagcttagagtgtttacagtgctctccagtaaaaaacaaatatatctgcctggacttgcagtgcctttcagcctagagctacccaccgtcatctctgggtggctaagtacagaagagccgaggaggcactccaggtcaaagttagcttccttagcagcaccacgtctcattcctgtctccatagcctgcagatagagaaggtacaatttaaaaagaacgcatgccctctccagcttgagcaagctgcataaagcactatgaatatt

SEQ ID NO: 3227 - DNA, 347 bp, Homo sapiens
ggccaagattgtgcccaaggacttcccagcctcatctcctccatcacagtcagcctgcagcccctcattcagccccacctttagcttagagtgtttacagtgctctccagtaaaaaacaaatatatctgcccggacttgcagtgcctttcagcctagagctacccaccgtcatctctgggtggctaagtacagaagagccgaggaggcactccaggtcaaagttagcttccttagcagcaccacgtctcattcctgtctccatagcctgcagatagagaaggtacaatttaaaaagaacgcatgccctctccagcttgagcaagctgcataaagcactatgaatatt

SEQ ID NO: 3228 - DNA, 464 bp, Homo sapiens
cacacccagataatttttgtatttttagtagagacggggtttcaccatgttagccaggttggtcttgaactcctgacctcaggcgatccacccgcctctgcctcccaaagtgttgggattacaggcgtgagcccctgcgcctggctggcctgaacatttcgatagagggaagaaatgtggagccctgatagccactatggtcaataagcctgcgtggagctctggatagcatgaaatctctagggagggaggcccgaggctgcgagagccctgtgacgtggcgtgcctgtggttacatagcccattaatggcaaaattgacttagcagagtttttccaaactttcccacccaagtgctcccaaactactgaaaattgtattctagagacctagaaggacagttaaaatttcttggaagtatgacttttgatcttaaatgtgaatgttgcaatctactgcctcga

SEQ ID NO: 3229 - DNA, 464 bp, Homo sapiens; identical to SEQ ID NO: 3228

SEQ ID NO: 3230 - DNA, 360 bp, Homo sapiens
gtcactgcactccagcctgggcgacagaacgaggcaaaaaaaaaaaaaaaagatttacatgataccatgtgtctatttagtaactgagaagaagactaaagtctagttttaatccactgctccagggccctggtgccaccaatagtctccttagtgctaaagccaggccctgcgtcactgtgtctctcagtgacatcacaggccctaactcagctgactactccttccttctgcaactttatccttctggccttctgaatcccatgctgtccctgctgtcttttctacccctctgcttgttccgtatcattttcttggtgggctctccttttgcttgtgcccttcttatatgctgatttc

SEQ ID NO: 3231 - DNA, 360 bp, Homo sapiens
gtcactgcactccagcctgggcgacagaacgaggcgaaaaaaaaaaaaaaagatttacatgataccatgtgtctatttagtaactgagaagaagactaaagtctagttttaatccactgctccagggccctggtgccaccaatagtctccttagtgctaaagccaggccctgcgtcactgtgtctctcagtgacatcacaggccctaactcagctgactactccttccttctgcaactttatccttctggccttctgaatcccatgctgtccctgctgtcttttctacccctctgcttgttccgtatcattttcttggtgggctctccttttgcttgtgcccttcttatatgctgatttc

SEQ ID NO: 3232 - DNA, 388 bp, Homo sapiens
gagctttcctcttatgatttcacactgccataagccagcaagggcatgtcaggtccttcagtttaaagagcactttgtattgtaagtttctgggcttgtggaaatgaatattccaatgatcacttactgtgtgtctggcgacatgtccctgagagggccttattgttgcacaagtcctgggtccctgggcaggaggcagggtctgttagacacatggtgttcctgtccctgaggcagcctctttgggcacaagaggagggtcttagtccattcatactgctataacaaaccactctgaatgggtgactgaaacatcagacatttcgcacagttctggaggctgcaaagtccaacctccagataccggcagatcgggtctgctgaggac

SEQ ID NO: 3233 - DNA, 149 bp, Homo sapiens
ggtggcacgtgcctgtagtcccagctactagggaggctgaggcaggagaatcgcttgaactggggaggcggaggatgcagtgagctgagattgcgccactgcactccagcctgggtgacagagcgagactctgtctcaaaaaaaaaaaa

SEQ ID NO: 3234 - DNA, 17286 bp, Homo sapiens
acaggagctgctgccgggcagaagaaaagcagggcaggctggctcccaggcctcagggtggggatggcagtgggaatgaagcacctgtaactgggcccttcctgccctaatgttcagggggccctacccctcgtgagcttgtcttattaagaaccctcaaaaggcctaagttaaccagcaggtccaaaggtcccaaggaacaaggtcagagacgccagggaaaagaggtgagctgtgcaggactagcactgggaaaactggcaatttgtgttgtcaagtgtgtgcctgtgcaagtgctccaactgctgctttgggtgaacttcaggccttgcctcttccctatcaccatcgtctccatcaacaccctctttcttttccagcctctcctggtgccttaggaatcagacgccaataaaccacagagcccagcatgtccaccttcgcttttattgagtagttagtgttctcaagctggctcacacccatgcggtcagctggggcctagggtggctctttgcaaagctgaggggcaagctaaggaagccaggcaggtcaggggccctttcggccttctcaagcctccacctgagttctcgtcaatgccagtctccctggtatgattggggacattatcagagaaacatctaatagcgcacatctgggcacccacactctgcttcagttgcatccatcctcccaccccaaattcaactcctgacccaatacaaaagacttttttaaccaggatttcttcttgcaggaaagctgacttggaaacacggggaggtggcagggaggggcaaaaaggactctggcaagcagatccacttgtctgggtccctgcagtgaagaacccaagatccaggtacctcagcctggaagaaaccgtgcactgcaggtcttcccttctatcaaaactaaaagcaaggaacagaagtcaattgaaaccccaggtcatcctacccaccttctggcagtctctggataatgatctaaggaaataagcttacatttataattagaggataatttggagaatttatactatttacacggaccaccctgcaaagatcagggaaggtaagagactgctgggcagagaatggaaacaggctggggggttcctaatctcttttcaccattgcctttgttgttcccacccttcagctcctggcagggacagcagaggaatcagatactcttggggaacacaaggtcccagcagtggctagggtgtgactgctacttttgcataatcaggcagcagggagctatgaggagcagaacagtccctgcctgctgtcctcactcagaggcttggggtgcactgagccttggagtgcccgggatggtggacagcttgagcacaggggcaagggcagggctctactgtagctcaggaataaactgggaccagttgatgttgtcagggcccagtgggtcctcgtccaggccaggaaagctgatgtccagcaggatcttgctgaggctgtcattcattgtgtccaggaccaggccttctgtcagagaacgattggctgcaaggccagaaacctgtggctccggggagcctggcttggggacgtctatatctgagggagaagagttgccaaaggggacggagatgaggtctaagggttctgaactgaggagcctttgcggtgattcaagggggggagcactttgcaagggagtggtgctgagatccatcagccccagggggtcaggcaaggggtcagaggcaccctgggaggtttgtactgggctgaaatccagtccccctactttggctgggggcgtgagcctccaggattcaggggttctggggaggacagatttgctcggggtggaggagatgggcagcgtttccttaatgggtgtcttaaaaggtcctcccacttcctgggagtagctgagctgggaggcagggtcagaggagtctgctgggaacgggagctctgcggcccagcgggaagtactgggcccctctgagaagagcagctccggctcatccacacagggaggcagtagatgctgttttctccgagaccggctcctctccctcctctccctgtgttgaatcacaagcatttccgagacacaccgggttggggacctaagcccactgtaggacttcttgggtcttggggtgggagattgggacgaatcctcccaggagtgagatgattcctctttgaaagatggggccggggagggccactcttccaagggagggctctccactttgatgggtctcgctaagtgtggcatttcctccccaggctggatttcttcctccttgatagtctgaactggaagcaaaggagaaaacccttctccaaacaggagtttctcctctttccctggtcctgcagaagaaagaggagctatcccctcctcagctagcagcacctgaaagggaaacagagataaggtgaaccaacggtcaccagacaggacgcacaaaaatatcacatacgggttctgatcctctttgtgtcgttttgaagtcttaaaatctattaaatatgagaatacgatgtatgttgaagttggtagttcaattctgggggtaaaagatgcgggtatgtagtatgtagtggcataattataatagcattcatccgagaggaaataaaattgcatgcttgtcttacactgtatacaaagatttaatgcatgaaaataagaaccttaggctgctctgatggtagcgggtagtgacattattgtcactaaagttggtacacaacccccaactgctaaatttgactggctttaaaaaaaaaatgaaaaccttaaaatcatacaaatcctgaaagagaatctaggagactacatatacaatctgagggtgcgggtgaccttcttaaccaagactggaaacccagaaactgtaaaagagaagagagacatttgactacataaaactttaaaattttactgtggcaagagataccataaacaaagttaagaaacaacaaacaatgcctgtaatcccagcactgcaagacactgaggccagtttgagaccagcctgagcaacatagtgagatcccatctctacaaaaaaattttttttaattagctggatgtggtggcatgcacctgtagttccagctacaggtgggaggctgaggtgggaagatcacttgagcctgggaggtcaaggatgtagtgagccttcattacaccactgcactccagactaggcaacatagcaagatcctgtctcagaaaagaaaagaaaggaaagtaaagagataaacaatagaagtagaaaaatatcttcagcataaaagaaagaagattattttaacaacaaagagctctcacagggggctgggtgcggtggctcacgcctgtaatccagcactttgggaggccaaggcaggcagatcacctgaggtcagaagttcgagaccagcctgaccaacatggtgaaaccttgtctctactaaaaatacaaaattagccgggcgtggtggcatgcacctgtaatcccagctactcgggaggctgaggcacgagaattgcttgaacccgggaggcagaggttgccaagatcacaccactgtacttcagcctgggtgacatagcaagactccatctcaaaaaaaaaaaaaactctcacaggctgggcgtggtggcttatgcctgtaatcccagcactttgggaggccgaggtgggtggatcatgaggtcaggagttcgtgaccagcctggccaagatggtgaaaccctgtctctactaaaaaatacaaaaattagctgggcgcagtggtgggcgcctgtaatcccagctacttgggaggctgaggcaggagaatcgcttgaacccaggaggcagagtctgcagtgagctgagatcacgccactgcactccagcctgggtgacagagcaagactccgtctcaaaaaaaaaaaaaaagagctctcacaaattgataacaaaacctatataaaaatgggcaatgttcataaataaccaattcatagaggacaattccaagtcaccaaacataatgacaaggtgctcagacttactgataaacaaagaaagataaaattaaacaagctggtgatgggtgtaccaaaatctcgcagatcgccactaaagaacttactcatgtaaccaaacaccacctgttccccaaaaacctatggaaataaaaaatttaaaaataaataaataaaacattttaaaaaattaagaagatataacctatacatattagattggcagatattaaacagactaataataccaattgctggcaaagatatagatcttatcatatattgctggtttaaacatgacttatcatagcttttttggaaagcaatctagcaatatttagtagaatttaaaataccttctcacccaacaatctcacatctgggactctatcctagagaaatgaaagcactagtaagagagatccttgcaaacatatttattgcagtgtcgttcattgggcaaaatttgagaaacagaatctgtccataaaagtggaatggctgaaaaatctgtggtgtagccacatcatggaatattacatggacactaaaaaataatgaattaggactatgccaagtgacttggaagaaattccatgaggcattgttgagttagagacatgtagaggctgggcgtggtgggtcattcctgtaatctcaacactttgggaggccaaggcaggcggatcatgaggtcaggagctcgagaccagcctgaccaacatggtgaaaccccatctctactaaaaatacaaaaattagctgggcgtggtgacgtgcgcctgtgatcgcagctactcaggaggccgaggcaggagaatcgcttgaacccaggaggcggaggttgcagtgagccaagatcatgccattgcactccagcctgggcgacagagtgagactccgtctcaggaaaaaaaaaaaaaaaaagagacatgtagagaagtatgcacaacatgattacattatcaatgttctgtgtgttgtatgtgtacatataaaatggctatcgctatacatgtatagtataactaagagcattgataaaatatgcaagaaagcatcataaattatcaaccagttatcttgggagtaggggtgatgtgggtgatggtagggtggagagggagccaaaaaggaaaggggagaaaacccactgcatgaaaacccaaacagggcacatgctacggccacatgaatgaatttacgctaaattatgtatgtgtggtataattttgtgtgtaatatgttttatttataattaaagaaaatgttttttagagacagggtctcattttgttgcctaagctagaatgcagtggcacgattatagctcattgcagcctccagctctggagctcaagtaatccttctgcctcagcctcccaagtggctgggacaacaggtatacatgaaaatgcctggctaattaaaaaaaaatttttttttttttgttacagacagggtcttactttgctgcccaggctggtcttgaactcctggcctcaagtgatcctcctgccttggcctcccaaaatactaggattataggtgtgagccactgtgcatggcctaaaagattttatatattaaaaaaaaagcaaacccaagtcgctctaaactccagactctatgctattttcatctctctgaaggggatgggggaagcttttcactttggttacatgtcagcccgtactcacagaaccctttaacagtgttaagtgcagatctgatggctgatccaagttggctctgaatttacccttctcaccttcccctcaagctagaccagtgatactcaagcaggggtgattccctccctgccaggggacatttggcaatgtctggaggcatttggattgccgcgcctgtggtgggtgctactggcgtctagtggggaaaacaagggatactgctaaacacccttcagtgcacaggacagtccctcccacgcccaacaaagaattctccagctgtcaacgtgaatagtacttgagaaaccctgagttagtctgacccagtcactttactactgccaggtacgaactgcatttcccgcctccatggcactgcccattagcatgctctctctacacctgtttgcttacccaaatctactttttttcttttcttttttgagacagggcctcactgttgcccaggctggagtgcagtggtgcaaacagggctcactgcagcctcaacctcctggactcaagtgatccttctgcctcagcctcctgagtagctggtaccacaggcatgtactaccaccgtggctaatttttttttttgcatttttagcagagactggggtcttgctatgttgcccaggctggtctcgaactcttggctgtaagcaatacccctgcctcggcctcccaaagtgtcgggattacaagtgagacccacagcgtctagcctcaaatccacttctttcttttctttttttttttttgagacagagtctcgctctgtcacccaggctggagtgcagtgatctcggctcactgcaacttcccttcctgggctcatgtgattctccagcctcagcctcccaagtagctgggattacaggcatgtgccaccaagcccagctaatttttgtattttttagtagagacggggtttcgccacgttggccaggctggtctcaaactcctgacctcatgatccacctgccttggcctcccaaagtgctgggattacaggtgtaagccacagcgcccggccaaatccatctctttctaaggcctgcctcccttgtgtatcttccttaataatcctagcccatctatcacaatcacttttgtctgaattcttacaagctcatcaggtatttatgggccttctgacaccacttacattgtaatccaaatacctttttagctcttctaatgctattacacttccctatgtttttatgccttttctacccaactagatttataagctctcaaggaacacttatcagagtgctttgcaagctgaaggtccaacattcttaattggccagaatctctcttcagaggaaaataggacacccaccttgggggcaatgcggactcgcttgctatggcgggcaagctctgagctcatgagggaagccgccaggggcaatggcaccttcaccgagggctgcaacaccagtgactggttcaccgggaactggataggtaccaggtatgagctgacccgtggtagcagtggcttcatcttccgccctaggaggaaacacgagagatcaggagcagggggactggagtacaccccttctcagccccaggagctttgctctccttctctgggctcagatccctttgaggtgggaacagaatcccagagtctggttccctaaagatatggccccagaacaaggaccaggcccaaggcccactctcccatactaacgtgcgcccagggggagttcggttttgatggtcatgttccggcggagctctggattcggtcgtttctgctgctgcttgtggcagatggggagagaaagaaacctatgttaacacaataaggtaaagaggggatggcaaaaccccaccagctgctctggtggtgtgtgcttgagttaatgacagcccagagagaggaggccaacctgaggggatggacgtaggcgagcagtctccaaaactgtgatgagtgggcaggtgggtggcctacagacacatgatggcagagtggcactaccgcttcacccacgtgtcctcaacacccctgggggatgccagagcaggtagctatatgcgtggcaaagaaaagctaggcacaaaagtgagcgaacgaactgccgcccctgaggctggtgccatgcgcttgtggctgctgcagcatgctcccctgctgtgccctgctctgctcagtgtgcccttgtgatgcccatggaaggggagggaagtgggtgtgtgcctgaccctcagggtgttctgtgtctagggctggcacctagacaaaacatggccatagggacccttccccacatcacatcttgtctctgtccactaaagccatgctgagcagtgaaaggaaaacaaggccaagccccgagccagagggaaagaaccttactgattccaagtgctcgggcaattgtggagaccctgggtccagtggctggtggcggccaggcattgtgggagagaaatgagatgaagttaccaccaacgtggtcaatttgaccggattgggaaaaacacttattcctgactgatgacaaaagacaccccagacaactgcccctcccaggagaatggttacagctaccagcagccttatgggcactctgaaaaaccaaaataacttctttctgaaaagacgttctggtagctcagcttctggtctccagcctaaggcaggcttttttttttttttttttttttttttgagacagactttcactcttattgcccaggctggagtgcaatggtgcgatttcagctctccacaaccaccgcctcctgggttcaagggattctcctgcctcagcctcccaagtagctgggattacaggcatgcgccaccacacccagctaatttttgtatttttagtagagacggagtttctccatgttggtcaggctggtctccaactcccgaccttaggtgatccacctgcctcagcctcccaaagtgctgggattacagacgtgagccaccacacccagcaggaagggctttttttagagcaagcattcccagaatttcttgtaagaatcacctgagatgcttgctaaaaatacaaattcctgggcccatcccagaagcactaaatcaagagccccaagagaggggtctgggaagctgtgttttaacaatgtcccaggcaattcccattcacagggaagttaggaaaacactgccctggggagccctttctgttgggtcagaacagccttctccttgctctggtctggcacaaaaatgtgtcatttggtatttgtcaagtgtacttaattcactgggttttgtgcaagtcactaattgggtggctggcttctaactctcccctgatcaaatgaaagcatcactagcagaacttgtttccttttgagatggctatgacaacctccaacttaggccctatttagaggaaagcagggcattcaccttaaacacctggtccaatgtcaagtagcggttggcactggggtgaatggtccagaaggagaccttgccattggcagacgtctcccggacaaacatgtcgtgcagggaaaggttgtggcggatggagttctggaagaagagcaagacaactggttatcagctactttagattcagaaacatcacccttcaaacacatggggaaaccagcctcaggcccctcccactgtgctcagcacaggcttcgtctggtgtctttgcagccctcttggcaactctcctgacactccacaccgcagagccgtcaccttcagccataaacccatctattctacgggaataaagactgatgccaaccttagattgtgataaagaaaagacctagatagctgtcaggggctagaaaagcagagtaaggctgtgaggtagtgatcaatagcaagaaaggtggctcagagaaattaagaaactagggaattaggcccggcgtggtggctcacgcctataatcccagcactgtgggaggccaaggtgagtggatcacttgaggccaggagtttgagaccagcctagcaaacatggtgaaaccctgtctctatcaaaaatataaaaattagccaggcatggtggcgcatgcctttagtcccagctactcgggaggctgaggcaggggaatcacttgaacctgggaggcagaggttgaagttagccaagatcatgtcactgcactccagcctgggtgacagagtgaggccccgtctcaaacaaacaaacaagaaactaggaaattaaggctgggtgtggtggctcacgcctgtaatcacagtgcactgagaggctaaggcaggaggagtgcttgagactaggagttcagaccagcctgggcaacatagtaaccagcctgggcaactgtctctacaaaaaaaaaattagcggactgtggtggtgcacctgttatcccagctacttgggatgttgaggagggaagagcttgagcccagggggctgaggctgcactccagcccaggcaacagggtgagaccctgtctcaaaaaacaaacaaacaaaaaactaggaaagtaagctgatggaagggagtaaaattaaaagttctaccatgaattagccaggcgtagtggcgggcgcctgtagtcccagctactcgggaagctgaggcaggagaatggcgtgaacccaggaggcggagcttgcagtgagccgagatcgcgccactgcactccagcctgggtgacagagcgagactccatctcaaaaaaaaaaaaaacatagttctaccatgaggggccaggtgtggtggctcatgcctgtaatcccagcactttgggaggtcgagacgggtggatcatttgaggttaggagttcgagaccagcctgaccaacatggtgaaacactgtctctactaaaaatacaaaaaaattagccaggcgtggtggcgcatgcctgtagtcccagctactcgggaggctgaggcaggagaatcgcttgaaccttggaggcggaggaggttgcagtgacctgagatctgccattgcactccagcctgggtgacagagcgagactctgtctcaaaaaaaaaaaaaaaaaaaagaaagagttctaccatgaggaaaacaaagcacacttgacttggaattgagcacccgtcagaagacctcatttgtggctctgacaccgaccaactgcgtgagctatgttgactcacaggcatctcggtctttccatgaatgaagtgaaaggaaaacccctgcccactagaaatgctatgtgacgctacaggagatgacatcttgggtcatgaggctcacagacagcatttttttttttaatcaagacattttcataaaactacttagccactctagctgctggcatctaggacggctgttgagtgtagcagaaaagtgggcttgagtgctacattgaagaccctccatggactttaggtagtaacacatgaagtagttaaggagctcttcttaatgattttgcctggattcaataagattgagtcacaatctaaaagatacatttgtttatcattctagtgtcctttgcacttaactgctgtcccagatacaagttgcagtacagcactggagagactgtcaggctgggctgaccttgattttggttgctgtgggacacattaccttccagcctggcttggcaatgtgcttaaagtagggaaagtggtcctcaatccacgtatagatgtctttcaaagtcatgcgcttcctctcagtgctgttgatggcgaattgtatcatggccatgtaagagtagggtggccgctcagacacagagttctgccaggacgctgatggtctcgaaggctcctcaacctgagggttatgacacagggaatgacatgaaagagttcatgagaagcacccccaacccaagcccttgaagaacatctagagaaacctttatcccataggacggtctagaaacaaactcatctgagaccactatctcatagaataaaattttagagttgggaagaatcttggagatgatctagcctagaccctagccaataagaaactggttttgtcatccatcattttgttgaatttggagaaaatccagtcccttccagttgaaatttcttaggaaagtttgagtatgtactttgattctcaaagcattgatgttacactaaaaccacgcccgtttttcagacttttgggtctagaaacctaggtcttagtcccatttctgttcctgatgtgctgtgaataaacgcatctcatttcaatgtttgtatgagagaaacattctcaagactatgagtcagacaatgtctgcaaagcacacagttagctaagttttaggcaaagagctgatcaatcacatttctttttctttttttgagacagggtctcactgtgtcacccaggatagcgtgcagtggctggatcacagctcactgcagccttgaccttcccaggctcaggtgatcctcctgtctcagcctccaagtagctgggactacaggcatacaccaccacgcccagctaattttttttttttttttgagatggagtttcactcttgttgcccaggctggagtacaatggtacgatctcggctcactgcaacctctgcctcctgggttcaagcgattctcctgctgcagcctcccaagtagctgagattacaggtgcctgccaccacgcccagctactttttttgtatttttagtagagatggggtttaccatattggccaggctagtctcgaactcctgacctcaggtgatccacccaccttggcctcccagagtgatgggattacaggcatgagccattgcgcctggcgattttttttttttttttcgtatttttagtagtagagaccaggattttgctatgttgcccaggctggcctagaacttacgggctcaagcaatctgcccaccttggcctcccaaagtgctgggattacaattgtcagccgctatgcccggtctcattcacatttttaaaattggagatattactttctaaagtacacaaattttatgtatatagcacaattaatatttacttacatatacacgcatgtaaattttcactttttttttttttttgagacagagtttcacttttgttgcccaggttggagtgtaatggcacgatcttggctcaccgcaagctctgcctcctgggttcaagtgattctcctgcctcagcctcccgagtagctgggattataggcatgtactactgcacccagctaattttgtattgctagtagaggcggggtcaggctggtctggaactcccgacgtcaggtgatccactcaccttggcctcccaaagtgctgtgattacaagcatgagttatcgcgcctggccaaattttcacttttaaagattgttgagctggaggctatgatcctaagcgatttaatgcaggaacagaaaaccaaatattgcatgttctcacttataagtaggaactaggctgggtacggtggctcacgcctgtaatcccaacactttgggaggctgaggcgggtggatgacgaggtcaagagattgagaccatcctggccaccatggtgaaaccccatctctactaaaaataaaaaaattagccgggcgtggtggcgggcgcctatagtcccagctactcgggaggctgaggcaggagaatcacttgaacctgggatgcagaggtttcagtgagcagagattgtgccactgcactccagcctggcaacaaagagagaatccgtctcaaaaagaaaaaaaaagaggccgggcgcagtggctcacgcctgtaatcccagcactttggaaggccaaggcaggtggatcacgaggtcaggagttcaagaccagcctggccaacatagtgaaaccccatctctactaaaaatacaaaaattagccgggcgtggcagcgggcacctgtaatcccagctactcagaagtctgaggcaggagaatcacttgacctgggaggtggaggtagcagtgagctgaaatcgcagcactgcactccagcctaggagacagagaaagactacgtctcaaaaaaaaaaaaaaaaaaaaaaaaagcaggagctaaacattgagcacacatggatatgaagaagggaacactagacaccagggccttcttgagggtggagagtgggaggagggggagacagaaaaactacctagcaggtactatactcactacctgggtgacaaaatcatttgtacactaaaccccagcgacacacaatatacccatgtaacacacctgcacatgtaccccctgaacctaaaataaaagttgagaaaaaaaagaaaataaaggttgaatgagtgatttacacatatatacaatagaatctagatgtgttatattggtaactgtgggaaaaaaacccagactacacaattgggttagatcaattttgattgctagagaagtatttaaaattcgtatctaggccaggctggtggttcacgcctgtaatcccagccctttgggaggctgaggcaggaggatcactagagcccaggagttgaaatcagcctgggcaacatagcgaaaccccatctctacaaaaaatacaaaaattagctgggcatggtggcatgcaccaagctggcaagtcccagctacttggaagactgaggtagaaggatcagttgagccctggaggtcgaggctgcagagagccatgactgcaccattgcgctccagcctgggcaacagagcaagacgctgtcttaaaaaaaaaaaatatatatacgtgtatatatataactgactttatctgctattaatattatatcttctaataaaattaacttgttgtattctattcaattcatactgttcatactgttgggaagcatctttaaagttcaggtggattcccaaaatgaagacctcttaatcatttcctgaatacctactaaggacaaaatactaaacccagtgctggctggaatacagagtgaccaagggactctgccctcaaggaaatttcacagatgggagagaaaagatcccaggcagaaaaatagctcaaaagttatgcagaatagcatgaagtggagagctaataccagaacttggaaattctggtccatcaggccacttgatccatttccctacctaggaattccctacactggatctgatttctttagtgagggacggaacaattcaccttaacctgtcgctgctccaggtgacaattctccttttcctccatctcttgcttgatgctgcgggagcccagtccatcagaactcatctttcgaagccactggatgttggataggctattgttgatagtgcagcctgctgcctcaccatctgctagagggaaaataatccaacaccccacttagctgcctcatcagatgcccaggtgtgtccatcagaattggtggctagcaggccgggtgcagtggctcacacctgtaatcctagcactttgggagggcgaggcgggtggatctcctgaggtcaggagttcaagaccagcctggccaacatggtgaaacctcgtctctactaaaaatacaaaattagctgggtgtggtggcacacgcctgtagtcccagctactcaggaggctgagacaggagaattgctcgaacccgggagacgaaggctgcagtgagccaacattgcgccactacactccagcctgagtgagactctgtctcagaaaaataaaaaataaaaaagaaagaattggtggctagggatcacttgtccaagacctctgcctttagggacggagaacacatgctgaatctattgtggctctaagttactctgccccattatgcatttcaggacaaatttaggagcatagttcaaattgcatttcaagctgagccacactgagccttagagatcaatcaaggcaggcttacaaaagaattattgagatatgcacaccaaaaaagtcacttttcagcctgggcaatatagtgggaccccatctctgcaaaaagaaaaaaaaaattaactgggaatgatggtgcatgcctatagtcccagctacttgggaggctgatgtgggagaatggcttgagtccaggcattcgaggctagagtgagccgtgattgcgccactgcactctagcctgggtgacagtgcgagaccgcatctctaaagaaaaagtcattttcctcctcttgcttcagttttctcctttatcaagaaggaaaatgaggccaggcgcagtggctcacacctgtaatcccagcactttgggaggccgaggtgggcgaatcacctgaggtcaggagttcaagaccaacctggctaacatggcaaacccctgtctctactaaaaaataccaaaattagccaggtgtggtggcgggtgcctgtaatcccagctactcagaaggctgaggcaggagaatcacttgaacccagaaggtggagattgcagtgagctgagattgcaccactgcactacagcttgggcaacagagcaagactccatctcaaaaaaaaaaaaaaaaaaaagaaggaaaatgaagtcaggcgctgtcgttcatgcctataatcccagcaccttgggaggcccatatggttggatcccttgagctcaggagtccgagaccagcctgggcaacatagtgagaccccttcttcatttatttatttttgagaccccttcttttttcatttttatttttttttttgagacagagtctccctctgtggccaggctggagtgcagtggcataatctcagctcactgcaacctccacctcccaggttcagcgattctcctgcctcagcctccagagtagctgggactacagacgtgtgccaccacgctcggctagtttttttatatttttagtagagacgggtttcaccatgttggccaggctagtccaaactgctgacctcaagtgatccgcccgcctcagcctcccaaagtgctgggattacagggatgagccactgtgctcggccagaagcctgactgttgtaagcatcaagactgactacacaccttgccactacagaggaaaggctgggctccctcacccctttccctggaagaccacataccacaggtctcccgtttctgctcgcaaagggctccaggtggtctaggaagattcacatccctagctgcaggttttggtcccaaggtctccagggtcacttctgtccttttggcatcatagctggtttgggtttgaggccggagtcctggaggctgagttggggctcccccacagctgatgaggatgaatttgttgggcccactactgccactctcttttcccttggcagtcagtgctgtgatgatgctgtgaatattagcattgttggggatggccactacttgcgtgttgggcatggtggggtggttaataatcttgatcccagctggaaacttgcaagagttggactctgccacttccttggaggcctctgcttgattagactcctgttgggcaggggatctcttaggttcctcctctgatgtttcacttggggcattttgaacaggaaggggcagcctccgtcttttgagaatcagtggccgacgggggctagttttcattatgaatctgcgttttcactctccattgagaatcacaagtgtggaccctggaaaatgca

SEQ ID NO: 3235 - DNA, 693 bp, Homo sapiens
ccacctcccgggttcaagtgattctcctgcctcagcctcctgagtagctgggattacaggcgcgtgccaccatgcctggctaatttggtatttttagtagagacggtttcatcatgttggccaagctggtctcaaactcctaacctcaggtgaaccgttcccctcgacctcccgaagtgctgggattgcaggcgtgagccactgtgcctggcccccaggacttttctgattgcaaaaacccacctgtttcttgagcttgggcccctaagtcatttctacaggatcaccccagtgggtggggctgggagatgtggcactagccaggcatctcctctctgttctgagctctgggttcctagtgtcataggatgaaaaggggaagacagcagaaaatgtatgggccaggcagtctgctgcccagaagaaagcctggcccactataagggacagcctgtagcccagtggggtacaaaaaggtaggcggcagagatgggccaccccctacctgcaggaaaggttcttccatatgagatgggtgactgggccctctgagtgatctttgccggttactggccattcttctgggcctcagagccaggaggggcggctttgtggggaagccctttctggcaccattgtttactcctggggttgctatggtgatgctgcttgagtggtgatgcagagaagagg

SEQ ID NO: 3236 - DNA, 15745 bp, Homo sapiens
aggcatagttacaccaaaagtgatctatgaggaagcaactgacctagacaaattcatcaccaatacaggtatttaatgttacactttgacgtcatttcttcagaaacagatatgtcatttcttacaagtaatatataccctcagagtgtatatttttgttagtcatttaaaaaggttcacaatagttagaaagatctgccaggaacatttcatttgttcctcgttctgtcctgctgggctttagagtgctctctgtgaccttgagcctgctcctccacagtcctggattctctgagttccaccgacccttctagttccagcttccgtgaacctttccttaaatgtttgatagttaaataattctttttttttttttttttttttttttgaggcggagttttgttcttgtcacccaggctggagtgcaatggcatgatctcggctcactgcaacctccgcctcctgagttcaagtgattctcctgcctcagccccctgagtagctgggattatagtcacccgccaccacacccagctaattttgtatttttagtagagacggggtttctccctgttggtcaggctggtctcgaactcccgacctcaggtgatccacttgccttggcctcccaaagtgctgggattataggtgtgagccaccgcgcccgaccagttaaaagaactttttagggcacagcattttcactttttgctttctttcctttttttttttttttttttttgataattaaactttccaattgtgatgcagccaaataagttacgtagagtttggcagattttttttttttttttgagatggattcttgctctgtcacccaggctggagtgcagtggtgtaatcttggctcactataacctccacttcctgggttcaagcagttctcctgcctcagtctcccaagtagctgggattacaggtgttcaccaccatatgcctggctaatttttgtattttagtagagacggggtttcaccatgttggccaggctggtttcgaactcctgacctcaggtgatccacctgccttggcctcccaaagtgcaggggttacaggcgtgacgacggcgactggctcagtttggctaattttaccagaactttagtttttaatgaaggatactgtttgtttctttcttttcttttttttttttaattggagacagagtcttgctctgtcgcccaggctggagtgcaatagggtgatctcagctcactgtaccctccacctcccaggttcaagcaattctcatgccttagcctcctgagtagctgggattacaggcacctgccaccaatcccggctaatttttgtatttttttgtatttttttttttttgagacagtctcactgtcacccagactggagtgtagtgacacagtctccactcactgcaacctctgcctcctgggttcaaacgattcttctgcctcagcctcccgagtagctgggattacaggtgcctgcccccatgcctggctgattttttgtattgttagtagagagggggtttcactgtgttggccaggctggtcttgaactcctgacctcgtgatctgcctgcctcagcctcccaaagtgctgggattacaggcgtgagccactgcacccggcctaatttttgtatttttagtagagacagggtttcgccatgctggccaggctggtctcgaactcttgacctcaggtgatctgcccacctcggcctccccaagtgctgggtgtctctttctgatgtgttgtacttctcaaatttattcattggctcatcaaatgttagtggagttcctacgccgtagtagggaactagatagcgggcccctgcctggcggaactgaccctctggtctttcatctcacaaacattttaccaagtgcatgctccatggcaagctatgagccaggtgctggagatatagaaatgaaaggaacagatctcattctgggtactgtgatggcatagaggaggcagctaatgctgacttggtgggaccagggcaggcttcctcaaggaagcagtgaccgtgccatgttagggagctggagatagggagggcaggggcagggcacttggggaaggccacgcaagcagagagaacctcccagtaacagagtcaggctcaaagagggtctttaatttatgaacatattcttgtatttgcagaaactcctttaaataacggatcaacccctagaattgtgaatgtggaagaacattatattttcaaatggaataataataccatcagtgaaataaatgttaaaatttttagggcagagattaatgcccaccagaaaggtaactttgatgagggtagcaagcatgctttcactgaaaagtatttttttttcctcttttcaagattctcataattataacccataaaactaagttggacttgtttcttatgtgcatttatgatttaattaacgagagtacactttgtatgacaaaatgcaattttaaggtaaacactatggagaataatttcttttcctagtgaaatggtgcacattatattttattttgttttatttctagggataatgacacagagatttgtagtaaaatttttaagctataatagtggtaatgaagaagaattatctggaaatccaggtaagatgagtatatgccagtcattgatcttacaaacatactttagttcaacactcccagccatcaggatggttataagtaactctctccaatttagtttctgactctgacctttttctttattttctctttttctttttttgagacggagtcttgctctgttgcctagtctggagtgcagtggcgcaatctcggctcactgcaacctgcacctcctgggttcaagagattttcttgcctcagcctcctgagtagctgggattacaggtgcacaccaccatgcctggctttttttttttttttttaatcacacaacacaggaagttttattcatctgctacttctccaaagagaggcttgcagggttgctcactttaatataatttttatatttttagtagagataggctgttgttcaccgtgttggccaggctggtcttgaattcctgacctcaagtgatcccctggccttagcctcccaaagtgttgtgattacaggcatgagccactgccccagcctctttattctctgttgtggcactgtattcattttttttttttttgagacggagtttaactcttgtcacccaggctggagtgcaatggcacgatttgggctcactgcaacctccaccttccaggttcaagcaattctcctgcctcagcctcccaagtagctgggattacaggtgcccaccaacaccctcagcaaatttttgtacttttagtagagatgaggttttgccatattggccatactggtctcgaactcctgacctcaggtgatccacccacctcggcctcccaaagtgctaggattacaggcgtgagccactacgcctggccgacatggtattctttttgtgataacaatgtattttttttttttacatagtctgttgtacatagtaacaagttgctgtaaatgtgaagcattctttctctttagctactgttttttttgagacccgaagttgccatctttctctcaagggtattttcgaaagcttcgcctatgtgttttctttccttgtgcatgactcttgtattatttgcagagttagggcttgctatgctggaggaaacaggctcacgttcctttgttgtgtttgtctaggttaccaacttggcaagcctgtccgagctctaaatatcaacaggatgaataatgtcacgactttacatctttggcaatcgggtaatccggtttggtcattatgattagccctttggcaaattggtgttagaagtattaccatattttgaatctaatcaagcaatcaattattttaaagcctagttggtttatttagcagagaggtacatgctgctgaataacagtgatgatggtttttcctgcttctacagctttttaaaaaggaatgctaacattgtttgcacctgaagtgctggttgctagtagaaaagattgaaatatgagattggcttgagagtcccatgttattgttgcctgtagcccaggatggtgctaattggagacatgaaaataacttcgttctgaactgcaggaaatctgtgcttcagtggtaattacgcacacctgccagaggcagtgtcacttctgaagaaaccaccgctcaggatctgagaagtctgataaaggcacctttgttcagctttgaaaggattagactaacagtgatctcagtttttgaaaactggcaactttatttctacttactgttttctgtttttcacggaaaactgaagttaatctttacttttgtttagcaaaaagtagcaagaggataatctttttcttttatagctggaaggggtctgtgtacatcagcaactttcaaacccattttatttggagaaaatgtactctctggatgcctgttagaagtcgggattaatgaaaattgtactcagctcaggtgagtgtttcattgatgaatatatcggcaatgtgaatggtttgcctagaattaattcactacatgaatatcaaagacagcatgaatatgaaaaattagagtcaattaaaatgtgtaaaagtgataataaatacagacatgtaatacaatttagagttgattcaaacatcaatatgagggaaaataaactttttcttgggactaaagccagttcatccacatttaagcaaatttcatccacatttaaacaaatgtctctgccaaagtttgttcagctcattggaaccttttttgttgttgttgtgtggttttttttgttgagatgaagtctcactttgtcacctaggctggagtgcagtggtgcgatctcggctcattgcagcttctgcctctccggttcaagcaattctcctgccttagcctccctagcagctgggattacaggcatgcaccaccacgcctgctgattttttttgtatttttagtagagatggggtttcacaatgttggtctcaaactcctaacctcaagtgaccttgcccaccttggcctcccaaagtgctgggattataggcgtaagccaccgcgcctggcctcattggaaccttatactcctagagctatgaaaaaggccagagcaaagtgtaactggggtgattaacttttttttttttttttttgagacagggtctcactgtgtttcccaggctcgggtgcagtggtgcaatcatggcttactgcagccccaacctccccaggctcaggtggtcctccacctgccttggcttcctaaagtgctgggattacaggcatgagtcactctgctggcctatgttctgtttttgtttttgtttttgttttgagacagagtttcactcttgttgcccaggctggagtgcaatggcataatctcagctcactgcagcctctgcctcccaggttcaagtgattctcctgcctcagcctcctgagtagctgggattacaggcatgtgccacctcacctggctaattttgtatttttagtagagatggggtttctccatgttagtcaggctggtcttgaactcctgacctcaggtgatctgccctcctcagcctcctaaagtgctgggattacaggtgtgagccactgtgcccagccttgttttttgtttttttgtttttgtttttttttttgacagtagccatcctaatagatactaagtggtatctcattgtggttttgattgcatgcgttctttttggcttgttttttgagacaaggtctcactccatcacccagactggagcgcagtggtgtgatcacggctcgttgcagcctgaccctcttgagctcaggtgatcctcccacttcaccctcccgagtatcttggagtacaggtgtgtgcctggctgatttttcgtattttttgtagagatggggtttcaccgtgttgctcaggctgctctcaaactgctgggctcaaacgatcctcctgccttggcctcccaaagtgctggggttacaagcatgaaccattatgcccggcctgcatgcactcttacacacgttttatctgttacatatcccaagatgtgtagttctttgggaagcaggaagaaatgggggtaacattgagaagttaaggaaaactggtataaattattggcagcagctcctgattataggttttgaggcctgagtccatgggcagagtccctctcctgcagttcatgagatttgtaccctccagtgacagtactgggaaggagggaatgctacgttccaactcttagtcttcacttaattttatgactcaaaattccagctagatatataggttacttttactgttggatcactctggcccacgaatgtatcctgctaacttgatgtgtgctctaactacctcctaagtttggtgacagtcggcagagtttgtgaaccatgtgattcccaacttaagttactaacattttttttttttttttgagacaggatcttgctctgtcacccaggctggagtgcagtggtacgatctcagctcactgtagccttaaccccaccaggcttatgcgctcctcccacctcagcctcccaagtagttggaactataggtgcataccaccatgcctggctaatttttgtattttttgtagaggcagggttttgccctgttgcccaggctggtcttgaactcctgagctcaagcaatcctcccacctcagcctcccaaagggttgggattacaggtgtgagccactgcacccggccaagttactaacattttaagtctaaagtaaaagattgcttctgtatgttctcccccaggtgtgtgggtccatcctgggaaggccatcagacacacctagtccatgggtgacacccagccagtttttaatgccagttcctctggcagtttttaatttaggcactcggaagtgaaacccggacattcactggaaatgactttaggacaagacctgctggccatgagctgagaaatgtcttactctcttgcagggagaatgctgttgaaagacttgattcattaatacaagcgactcacgttgcaatgagaggcaactccgattacgctgatcttagtgatggctggctcgaaataatacgtaagtcaaacccgggtacaataaagcctgtaacttggttgctgtgactaccaactgtagtcgcagcattagagcccaacccagtaggtcatcttcctgaggcttgactgcggcttaactggacgtttgcccaggggttagatctccaggcaggaaacttggcatgtctttttcttcttattcacaatgacttttttgattttctgtttttgtttttttgagacagggtttcattctgtcacccaggctggagtgcagtggtgcaatcacagctcattgcctcctcatcctcccaggctcaagggatcctcccgcctcagccttccaagtagctggaaccacaggtgtgcgccaccacatctggctaatttttttattatttgtagaaatgggtttcgccatgttgcccaggctggtcattaactcctgggcttaagtgatctgcccaccccaacctcttaaaccccaaccatgttgggattacaggcatgagccattgcgcctggccaacaacagtctttgtgaaagaaagtctaggctgggagcagtggctcacacttataatcccagcactttgggaggtcaatgcaagaggattgcttgaggccagtttttttgtttgtttggttggttttttttgagacggagtcttgctcttgtcacccatgctggagtgcaatggcacaatctcggctcactgcaacctctgcctcctaggttcaggtgattctcctgccttagcctcccaagtagctgggattacaggcgcccaccaccacctggctaatttttgtattttttaaatagagacggggtttcaccatgttggccaggctggtctcgaactcctgaccccgtgatccacctgcctcggcctcccaaagtgctgggattataggcgttacaccgtgccaggccgaggccaggagtttaagaccagcctgggcaacatagtgagaccttgtctctatgaaaaatttaaaaaattagtcgaatgtggtggcatgtccctgcagtcccagctacttgggatgctgaggaaagaggatcgctggagcctaggagtttgaggctacagtgagctctgattacaccatcacactccaacctggatgacagagcaagatcctgactctaaaaataaaacaaaataaaataaaatacattaaaacaaagtccaagcaaggtttgaagattgttagtgcacttcagtttgcattgctgtttttgattgccaggaatacaggcatttgagaattgactttgtaatttataaaggtaattttgttaacttaaaagaaaataaagtgattgaaaatattgtgatagaagccagacacaaaagaccacatattgtatgactcaatttatatgcaatgtccagaatgggcaatgtatagagacagcagattagtggatgccggaggtggaggagttgggaggaaatggggagagactgccgtgggtaaaggatttcttcgcagagtgataaaatgttctaaaatagaatctgctgatagtcacagctttgtgactataccagaaaccatcgaattgcacactttaagtaggtggattgtatagtatgtgaattatatctcaataaagctgtcaggaaagaaagtaattaaggtgcaacagatcggctgggcacggtggctcatatctgtaatcccagcactttgggaggccgaggcgggtggatcacgaggtcaggagatcgagagcatcctgcctaacacaggtgaaaccccgtctctactaaaaataaaaaaaaaaaattagccgggcgtggtggtgggcgcctgtagtcccagctactcgggaggctgaggcaggagaatggtaggaacccgggaggcggagcttgctgtgagccgagattgcgccactgcactccagcctgggcgacagagcaagactccgtctcacaaaaaaaaaaaaagggtgcaacagatctaataatagcagggatcatgggggccagatagaaagacttgacagctcagtgcctctggccaaaggtatttgcagtgttgaattggcaagtagctcgtacacaaagggaaaaagatataccacatgtacatggaataaaggtaaaccagactttaaagcttcttcatcaggcctgatttcacctctgaatccaaaatatcctttgagtcatggagatccagctcatcgggttatgttggagaggcctaaggtcacagtgagttttggcagagctagaatgaaaacctggggttccaacctctttcctctgttccctggtagcaagttaggtaacttcccggtttcttggggagccttgagtctgtaaatactttgaatggaaagctttttttattgagctaattaatggaattgccttttgggaccagaaagagcccaatgagtgtgcgcatctgctttgcccctgcccagctctccctgcagatgctgctctgcccctctcctctgcctggtgggtagggatcagccctctggatcctgtccctaccctttccatctcctctgaggtcagctaggctcagtaggctggaattcacacaacggcccatacagacacacacctgtattgtgcctactccttgtgattggggtcatggtgatgaggaccctcccttccccctcttggtcatggataatgtgatatgtctgtgagcttgaggtgccccagaccactctctgacttggggagggagtcctgttggactccacccccacggggcactcaggctgctgtttgctcatctagctggtgctcaaggcactgggcccagacctagatcctcatttgcaaacggaacccagaggtcgagcttgtcaagccctgggctctgccacccaggccagctagataggctgtggaatgaccctgagggctggagaaaagtcagcagttgggaaataaacggtagggaaaatgtccagacggagaacccaggttgatgaggtacgaaatcagtgtggtgatgacattttgttgccttcaaggtggaaggggttagcttttatttcatgtctgagccaaaaagcaaccttgatcctggttaataagcagaagagaagtggtgttgacacatgtataaggaaattagacataaaacagtgttactgaccttcggaatccctgaaggagcaaagaacccccttcagaggagccatagaacctaccctacttcctccaattgaccttgctgggttttctccaagacgaatgcaaattcatttctcattcaatttcattctcttccaattgtattaatactatggtaacacattaggaaattacttacctatctaatacatactaattaaagtcgttagtgtggattttgttttattattatttttttttcaattattatcattattttttttttgagatggagtctcactttgttgctggagtgcagtggcatgatctcggctcactgcaacctccacctcccaggtttcaagtgattctcctgcctcagcctcccaagtagctgggattacaggtgtgcgccaccatacctggccaatttttgtatttttagtagagacagggtttcaccatgttggccaggctggtctcgaactcctgacctcaggtcatccacccacctcagcctcccaaagtgttgggattacaggcgtgagccaccacgcccgactgatttttatttttattttttgagatgaggttctcacttttgtccaggctggaatgtagtggtgccatgccatcacggcttactgcagccttgacttcccaggctgaagcaatcctctcacctcagccttctgggtagctggtgtgtgctacaggtgtgtgccaccatgactggctattttatttttctcgaggagacagggttttgctatgttgcccaggctggtctcaaactcctgggctcaagcagtgcttctaccttgacctcccaaagtgctaggattataggcatgagccactgtgcctggcctaaagttgttagtatggattttaaatgtcttacacagcttttactagaactgtgactgcatggaataacgatggcatttcactgcaattatatatgtttctgttaaaaggctgggtagatttcagtgggagcttggaaactgaatcatgatttatggctttaatatgtgggtcagggcttttaagttccagtgactggctaacatacaaggaaactttttttttttttttttttttgagacagagtctccctctgtcgccaggctgcagtgcagtggtgtgatcttggctcacggcaagctccgcctcccaggttcacgccattctcctgcctcagcctcccaagtaactgggactacaggcgagcaccaccacgcccagctaatttttatacttttagtagagatggggtttcaccatgttggccagaatggtctcgatctcttgacctcgtgatctgcccgcctcagcctcccaaagtgctgggattacggcgttagccaccgcacccggcccatacaaggaaacattttaaacacaatttttattagtgccatcctatgccttgtagactttaagggataacacagttatggagtgacaagtaactagagcctgtaagagactaaagcctcattaatgtgatgcctgcctgatattattccccattttggttattacgacattgtaggaaaacttatcaaattattctttgaaaagtgtataacttaacatttctataggtgtagatgcccctgatccaggtgcagacccgctggctagcagtgtgaacggcatgtgcctggatattcctgctcacctgagcatccgcatcctcatctcggatgtggcgcggtggaagggattactcagcaggagatactcggtgtagagacaaggtatgatcacatcttggatcaccgtagtttagagagagtcaggaaagttgagagcatcccaaacaatagggaaatgtttatttagaaactgattgtttatttacaacttgcaattattagcaagatgtttatatgcacatatggaatatgtacgaactatgtgtataatggagacttattctcacaagtatttataaagccatatgtaagagagtctgcaagttattttagggagtacaaagatgaataaagggccccttagtactaagtatattttgaaatccatggatgtaactgataatctgatcagagaatattgtctgtggttagagactttggcagcagataggttcaaatcatggctgtcctacttaggagctgtgtgacactggccaattacttaacctttctgagctgtagtttcctcctctgtaatatggtgataatacctttatgtatcaagcctccatcagttttttttttttttttttttgagacagagtcttgctccgtctccaggctggagtgcagtggcaatatcttgactcactgcaacctccaactctctagttcaagcgattctcctgcttcagcctcccgagtagctgggattacaggcacgtgccaccatgtccagctaatttttgtatttttagtaaagacagggtttcaccctgttggccaggatggtctcaatctcctgacctcatgatccgcccgcctcggcctcccaaagtgctgggattacaggcatgagccaccgcgcccagcctgcctccatcggttttaagtgacaggcgcccagttcatactgacttaagcaaaaaggggagtttattggttcaagttcagagtaatccacatacagctagttcatggttcatggttccagtgtggtcagggatctttttgttttcgtatctcagctcctcttcctttgggttggcttcattctcagggaggttctcctcaagagatggcaaagatcagcaccagcaatccaggcttatgtcactgcagcaagtccagtggggagaaagcccctttcctcctctttcctttctttctttcttttttttttttttgagacggagttttgctcttgttgcccaggctggagtgcagtggtgccatcttggctcactgcaacctccaccaaccgggttcaagcgattctcctgcctcagcctcctaagtagctgaggttacaagcatgtggcacctcgcctggctaattttgtatttttagtagagatggggtttctccatgttggtcaggctggtcttgaactcccaacctgaggtgatctgcctgcctcagcctcccaaagtgctgggattacaggcatgagtcaccgtgcccggcccctcctctttctcaaaatagatctgggcagacttttattggttcagtttaggtcatgtgctcctttctgaaccaatccctatgactggggcaatggacagctcttattggctaggctcaggtgatgggtgcacctctggattagggccaattccttctgctccactgaactggaaatggagagtggtggctctgcaagggaaaatgggagtgcagttaccacctccgcagtactcttctgaggataacatgagatggtgtgttgcaagcaagttatctctgtgcctcgaacgtggaaagccctcaataagtggctagctgctgcttttattattatattgtttgagaaaaacaggtgatgaacaaaggtacctttgatagcacctgtatacaatgcactggctggagaggagtgagactgacaacaagactggcagatgttgctgggcgacaggcccatgaggggttattaggagtttctcttctctttggatctgtctgtggaaatggtcaaagaccatggacaaatactgagaaaaaacagcccaggtagaatgcgaaacttcttaggagaacctcaggttatattgtgattgcatccgttacctgctgttcttggtggaatagaactgaatggtggctatgctgaccatgtgatctttccctcctaggttctcctcagtgaactggcagtaccagtgtgggcttacctgtgagcacaaggccgaccttctccctatcagtgcatccgtccagtttattaaaattcctgcacagttaccccaccccctgacaaggtactccagttgctcacctagttgacattaggaagcagaaaaatatatatttgaaaattggaagtttattcctttaatcaagttctgatacttctcacttgtagtttttgtaaccctctaaaatgttttctagattccagatcaattatacagagtatgactgcaacagaaatgaggtgtgttggccgcagcttctatatccatggactcagtattatcaaggtagggtgaaacagatttctatgaccaattatgttatgtcaatttaaaaaaattttttaaatgatgtctaaatgttacagaaagcataaaacatatagaaacttaaaaaaaagtacggataatattgccacttggaagtgatcaccattactgttttggcttagtttatttctacctacactgtttttttttttagagagtcttgctctgacaccctggctggagtgcagtggcacaatctcagctcactgcaaccattgcctcctgggttcagacaactctcgtgcctcagcctttggagtagctgggattacagcaccaatatgcctggctatttttgtatttttagtagagacggggtttcactgtgctggccaggctggtctcgaactggcctcaagtgatccgccctccttggcctcccaaagtgttaggattacaggagtgagccaccacacccagcctatacctacactgttatcaaaagagttaagaaatactgctgttgaattttgtccattgtttttcaggggagctgcattctcagtgtgttgctaagggcttactgttgctgttgttcctcacattggccttgttcctcagcaacccctggaccagaatatgcaaagcctatagttagacaaccacctggcttttatttttttgagatggagttttgctcttgttgcccaggctgaagtgatctcggctcaccacaacctcctcctcttgggttcaagcgattctcctgcctcagcctccggagaactgggattacaggcatgcaccaccacgcccggctaattttgtatttttagtagagacagggttccaccgtattggccaggctgctctcgaactcctgacctcatgatccgcccatcttggcctcccaaagtgctgagattacaggcatgagccaccgcacccggcctttttttttttttttttttttttgaggcggggtctctgtcacccaggctggagtgcagtgcacaatctcggctcactgcaatctctgcctcccaagcaatcctcccacctcagcctctggtgtagctgggaccacagatgctccaccatgcctggctgtatttttggtaaagacggggtttcgccttgttgcccagggtggtctgtaactcctgagctcagatgatctgcccacctcggcctcccaaagtgctgggatcacagacgtgagccactgcgtccggtccatctgacttctcaaagactttagaccttgacttcagtgatttgttgtagtcttgtatgcttctctataaaattttaataaatgaaatgtcttatttttgtagaaaattttta

SEQ ID NO: 3237 - DNA, 224 bp, Homo sapiens
ttttttgtagagaagggggtctccctatgttacccaggctggtctcgaactcttaggctcaagtgatctacctgccttagcctcccaaagtgctgggattataggtatgagctgctgtgcccagccctggaatagatgtttttagccacggtcctacagtggccacatggcacatcacctgtaagttttctttgtgtgccaggtaacttagttgtttcagatgg

SEQ ID NO: 3238 - DNA, 1003 bp, Homo sapiens
ggttttcattcagatgaagatgtggcccccagttccctgcgctctgcgctccgatcccagcgaggtgagtgacgggggaactccacctctttagcgtcacaggaatttatcctcgcccttcgtgtcagctcttccctgttcaactagcctctgtcagttgccgaatgtgttctgtgttcagagtccaagctagtctgggcagcgggggaaacacacaagcaagacttagtccctgccctcctggagcgccttcctctgtgtgtagggctggcttgatccatctccccacaactattctccttttaggtcgagcgccccgaggtcggggtcgcaagcataagacgaccccccttcctcctcctcgcctagcagatgtggctcctacccccccaaagacccctgcccggaaacggggtgaggaaggcacagaacggatggtgcaggcactgactgaacttctccggcgggcccaggcaccccaagcaccccggagccgggcatgtgagccctccaccccccggcggtctcggggacggcccccaggacggccagcaggcccctgcaggaggaagcagcaagcagtagtggtggcagaagcagctgtgacaatccccaaacctgagcccccacctcctgtggttccagtgaaacatcagactggcagctggaaatgcaaggaggggcccggtccaggacctgggacccccaggcgtggaggacagtcaagccgtggaggccgtggaggcaggggccgcggccgaggtggtgggctcccctttgtgatcaagtttgtttcaagggccaaaaaagtaaagatgggacaattgtccttgggactcgaatcaggtcaaggtcaaggtcaacatgaggaaagttggcaggatgtcccccaaagaagagttggatctggacagggagggagcccttgctggaaaaagcaggaacagaagctggatgacgaggaagaagagaagaaagaagaagaagaaaaagacaaggaggg

SEQ ID NO: 3239 - DNA, 426 bp, Homo sapiens
ggaatcccctcctcctgtggtcccagctacgtgctccaggaagaggggccggcctcccctgactcccagccagcgggcggagcgggaagctgctcgggcagggccagagggcacctctcctcccactccaacccccagcaccgccacgggaggccctccggaagacagtcccaccgtggcccccaaaagcaccaccttcctgaagaatatccggcagtttattatgcctgtggtgagtgcccgctcctcccgtgtcatcaagacaccccggcgatttatggatgaagacccccccaaacccccaaaggtggaggtctcacctgtcctgcgacctcccattaccacctccccacctgttccccaggagccagcaccagtcccctctccaccacgtgccccaactcctccatctaccccagttccact

SEQ ID NO: 3240 - DNA, 12167 bp, Homo sapiens
gctgctcagggtacagcccctcgtgagaaccgagccacagtcatgtttcctacatcagcctcctgctcaggggtttgtacagagaccactgccagccctctaggtggtccctgcaaagaaagtcccagctcccaaggctccaaatggacagggcaccatgttgaccccttcgttggcctccagttcgccgactgtaacatgtttcatccagttcaggacgtttatttatttccaacttgcatacaaaacatactgagaaactaaaaccatcgttaaaagtgaagacacgttgagacaggtatctcgacctgccaagtatacagctaaagctgagttcataaaaagggatgatttggccgacggtcatctgccagattctgatgatgattcagaagtcagtgtggaagaagatcagagggagaggcaggcgctctttgacttatcaagctgctccctgaggcccaaaagcttcaagtgtcagacttgtaaaaagtcatatatagggaagtggggactggcccagcattttaaacttaatccaggccatggccagctggaccctgagatggtgctatctgagaaagccaatgggagcaccctccgggggtgcacagaggaaaggacgctcagcctgaccttcccggggctgtccgtgccagcggctccgcgtgagggaggggcccgctcctgcttggtgagagagtcagcacgcggtggcctgcaggtaatgtttgcatctgggtgtcgttttcggccattctcacactgttataaagaaatacttgagaccaggtattttataaagaaaagaggtttagttggctcacagttccacaggctgtacgggaagcatggtgctggcatctgctcagcttctggggatgcttcagaatcagtcacggtgaaggcagagtgggagcaggcatgtcacgtggccacagcagggacaaggggccggggtaggtgctgcacactttttttttccttttcttttttggagacggagtctcgctctgtcgcccaggctggagtacagtggcgcgatctcggctcactgcaagctccgcctcctggtttcacgccattctcctgcctcagcctcccgagtagctgggactacaggcgcccgccaccacgcctggcaattttttctatttttagtagagacggggtttcatcgtgttagccaggatggtctcgatctcctgacctcatgatccacccacctcagccttccaaagtgctgggatgacaggcgtgagccaccgcgcccggcaggtgccacacacttttaaacaaccagctatcatgagagcagcaccaagcggatggtgctagagcaatgagagattcaaccatatcagtccttattcctgcctctgcctgcccatcatccttaagttgacctttacaatgtctgatgggggctcaggcgaaggctcaggcagaaccagaatcattcttgtggaggatctgagacccctcatgttgtctgcactgctgccgaacaggctggaagatgcatgtctgtgtgtcggcatgatttagtgagcaaatctgatggaggccaaccgggtctataggtttggtcagtaaaaccaatggcagtgcgctcttggctgacgctgccattacagagggtgatgttgagaaaggcagtccctggggatgcttctggtgtgtcaatagcctctggctgctcagcgtgtcctctccctcctgccccttctgaaactcccgataaagcaggtgtgagtcgctgtaagtttgcattatcacatcaaaattttttttccaacatattttattgtagtaaaatatacatagcataacatttaccatcttagccatatgtaggtgtgtggttcaggggcactaaatacattcacgatgttgtacggccatcacccccacacatctccagaactcttttcatcttgtacaactaaaactctgagcttcaagttggggtaagcggggcgggggtggggactaaaactgtccccataaacaccaactctccattccctttttccccaaccctggcagccactattctactttctgtctctatgattttgactacgctgctttcttcacagaagtggaatcacagaatatttgtctttctgtgactggcttatttcacctagcacagtattctcaaggttcatgttgtagaaagtgtctgaatgtcctttaaggcggagtaaaatttcactgtgcctaccacattttgctcattcattcatctgtcaatggacacttgggttgcttccaccttttagctattatgaataatgctgctgtgaacacgggtgttcaattacctccttgagaccctcctttcaattttttggggtatatatccagaagtaggattgctagattttaagtggaattttcattttctttagttccttttcagactgttcattgtttgttagtatttagaaatgcagctgatttttgtgtattgactttttttttttttttcagtctcactctgtggcccaggctggagtacagtggcgcagtctgagttcactacagcctccacctcccaggttcaagagattctcctgcctcaacctcccgagtagctgggactacagtcacgtaccaccagtaattttttatatttttagcagaaacggggtttcaccacgttggccaggctggtcttgaactcttgacctcaagtgatccattcaccttggcctcccaaagtgctggaattacaggtgtgagccaccgcacctggcctgtgtatttaccttgtatgctactacattgctgatttcatttattagtttttttttttttaattcttttttaaaaaagaaaaaacagacacagtctcgctctcttgctctgtcgcccaggctggagtgcagtggcacaatcttggctcactgcaacctctgcctccagggttcaagtgattctcgtgcctcagcctcccaagtagctgggaccacaggtgcccaccaccatgcctggctaatttttgtatttttttgtagagatggggttttgccaggttttgccatgttggtgaggctggtctcgaactcctgacctcaagtgatctgcacacgtctgactcccaaagtgctgggattataggcacaagccaccatgcctggcctcatttattagttctaacgtgtgtgtgtgcacacacgctctttaggcatttctacttataagatcctatctgcaaatagagataattttccttctttcttttcaattttgatgccttttatttccttttcttgcctaagtgtgccggttagaacttctagcactgtgttgcatagaagtaatgaatgcagacatccttgtcttgttcctaattttagaggaaaagctttcagttttcaccattgagtgtgttgtggctttttcatatatgaattttattatgttgaggtagttttctctattcttagtttgctgaatgtttttaatcatgaaagcgtgttgaattttgtcagtgctttttctccgttaactgaaaaaatcatacatttttggaaatggaaatgcagccacatataatggccagcctgggctctcctggtgcccacttgccccagccggcctcttacaccccgggctctgctccactctgaggctgcagcccagactgcctgtgccccacacttaccatggatgcagggtcagtgcacccctctggagctgacagcccagcctgtgcccaggacctttctgccttcccttcccgccctgtcctgagagctcaccgtgccctctgtggccccgaccccaaggcttgtttgtttcttggcctgctcctccctgccctgcgccatacggaacacacagtaggtgctcactggggagtgaaggaaacgcccaccactgagtggctgctcaggggctgagaaccgaaactttgtttaggttttcttctgtattttccttgcctcaggtttaaacttttttcttaatctttatcttcacaaaggttgaaaaagatcatctagcaaagccttttttcccagctacatataaggaatttgaaagtcacataaaatggttaagaaaatgtgccaagattacctcagtaattctggtctgtgttctcaggagaccctggaaataaacaatggtaaggtacaatctcccatggcagaaagagtttccctcagagttagccaaaacaagggccaggcgcagtggcttacacttgtaatcccagcactctgggaggctgaggcagatgtatcacttgaggtcaggggttcaagaccagcctggccaacatgacaaaaccctaatacaaaaattagccgggcatggtggtacatgcctctaattccagttattcaggaggctgagacacaagaattcatttgaacctgggaggcgaaggttgcagtgagctgagattgtaccactgcactccagcatatgcgacagaacgagactctgtctcaaaaaaaaagtccatgaatgaaggagaatgtttttagtaatgatattttcctagtcagcctcattttagcttcttcccatcaagtgaaatttttttttcttaaagcaataaatgcgaccgggcgcggtggctcacgcctgtaatcgcagcactttgggaggccaaggcaggtggatcacaaggtcaggagatcaagaccatcctcctggctaacaaggtgaaaccctgtctctactaaaaaaaatacaaaaaattagccgggcgtggtggcatgtacctgtagtcccagctactcaggaggctgaggcaggaaaatcgcttgaacccaggaagtggaggttgcagtgagccaagatcataccactgcactccagcctgggcgacagagggagactccgtctcaaaaagaaaaaaagcaataaatgctcttccagaaaactcaaaaatgaagataagctaaaagaaaatggaaagcaccagaataccagaatctttccactcactgatgatcagagttaatacctcaggtacccttttcgtctttctgtttttgagacaaggtttcactctgactctcaggctgaagtacagtggtgcaaatacagctcactgtggcctcgatttcccaggctcaagcaatcctcccttctgggcctcccaaagtgctggaattataggcatgaaccactacacccagccctgttttcttctttacgtgggtttttggggatgggttatataggagccatttcattattgtttgtggtttttctgacacaattctcatttcagtgtcactgttaccatcaaactgcttttagctacattggattttttggggttttttgcatagagtctcgctctgtcgcccaggctggagtgcagtggtgcaatctcggttcactgcaacctcggcctcccgagttcaagtgattctcccacctcagcctccccagtagctgggatcacaggcacccgctaccatgcccggctaatttttgtatttttagtagacatggggtttcaccatgttgtccaggctggtcttgaactcctgatctcaactgatccacttgccttggcctcccaaagtgctgggattacaggtgtgagccactgcgcccagcccctgctgcgctttaagcagagagaaaaacactgtagtcataagagctattaaatacagtacataattttaaaacatttttgaaacacagaaaacacatacttttttgatctcaggaaggaggaggagttagtaggggaggcttgcacccatccatgcttctgagcgtgcactcacacatgcatgcacactaccactcattcacatacactcacacacacttgcactcatgccctttacactgtgcacattcagatccacaccatgtacactcatacactggcaaacccacacatgcatcacacccctacacttgcactgtcacatgcacacttaagcacgttcacaccctcatggttacactcacacacacagcctcacatatgcacactcactcaacactcatacatacacatttacatgctctcatttatacacactgatacatccacacaccatcacactacacacacttttacatgctttcacacatacccgttggatatggacacacccacaagcactcattcccacacatgcttgcactgcacacactgacacactacatgccttcatagttgacacacacttccatgcacattcactcacctttttgcacactcattcacactcccatcacactgacacacttctgcctgtcctcacacgcctacacacttgccacacacactgagtgttccatgcacactcacacatcctgcgcagtcactaacttaccctcatgaccacacacacacacacacagactttcaaatgcactcatccacagacacatattctcatatgcatacgcacttgcacacacaccctcgcacgcttgttcacactccctgacatgcagtcacactagccatcactcatgctcacacgcatacacactcacaccccctttgcacacacacttcccccacccactcaccccaagcccacctgacaggtgacacactttacctgcaggctgggatggctggtcctctgcctgggcttcgaggttccttgggggcagcggctcatgctggttttcccactgcagtgtcttctgtggcttcagcgtcacctagtgcaggctgccattcaacaaacgcattgtcaacagtcaaccaaaagaaacccattggccaccataccctgaggactaaccctgacacagatgcccttccagatgccctcagtagtctaactgattccatcgccccagccttgggggagaagcactgctgcctatgcactccatttacaggtgagactgggagaggtttagggagtggccaagtcccctgcctacacagctgcctcccaatctatcttctcaccctcccccttctcaggctaaaatcacactcgatgtttttatgggatcatttgatctggacattgtcaaagaaaaaattgcaccagacaagttaaaccttcaaggaaggactcagtcaggactactgcaatacggaagagaggagcttaacttcattgaaacaaaaggctggggagtttttaagtgccggggtgagatgctgagaaggaactggagacatcaggaagaggttaggaaatgccgtaaagctatctgcgttggctcattggaatttttcaaaactgggaatctgcccttctacaaaaactgagacacagatgtatcatctccttcaataattgcattttaaagggatggctctgaagtcttgagaaaggcattcctgggttgcaaaactaggaggaggctagaagaaaatttgggagaagatttgcctctcaaagaggtagagaaagaactcacaattgcaagtttcctaaaataaatcctccgtgaaaaaaggaggcctgatggatggaactggaggtcattatgttaagtgaaataagccaggcacagaagaaaaatactgcatgttctcactcacatgtgggagcttaaaacctggatctcatgaagatagagagtagattggtagctaccagaggctgggaagggagataaaaatagtttgattaatgggtacaaataagtaggggtttttgtttttttggagacagaattctgctctgttgcccagactggagtacagtgatacgatcgtagctcatagtaacctggaactcctgagctcaagtgatcctaccacctcagcctccccagtagctgggactacaggtgcgtgccaccatgccaggccgatttttgtattttttgtagagacagggtctcagtagattgcccaggctggtctcaaactcctgggctcaagcaatcctcccgccttgcaaatacagagtttgataaaagaaataagacctactgttcaataaatcagcagggtgactgtagtttacagtaatctattgtacatttcaaaatagctaaagataagaatttaaatgtttctagcttaacgaaaaggcaaatatgtagggtgatgaatatcttgatcacaatgatgtgatctttacaaattgtgagtgtatttagtaatcacatgtacccccaacatatgtgcatcaattatgtatcaaaaaaattaaaactaaaaaatagacaaggaggtcgggaggaaaactgtgtaacagtcaagctgagggaaatgtgaaggctgtcttagtcaacagatttgcctttttccctttaatctgctaattatcaattgatatggtttggctctgtgtctccacccagatctcaccttgaattgtaataatcctcacatgtggtggaagggaactggtgggagctaactgaattatgggggtgggtttttcccatgctgttcttgtgataagtgaatgagtctcagaagatggttctataaagggcagttccccctgcacatattcttctgcctaccaccatgtaagacgtgactttgctcctcttttgccttctgccatgattgtgaggcctccccagccatgtggaactgtggatccattaaacctctttcctttataaattaccagtattaggtatgtgtttattagcagcattgagaacagactaatacatcaataactccctttgaggacattttagctgtttggaaatgtctgctcctatcttgtttttgtttttgtttttttgggacaaggtatcactctgtcacccaggctggagtgcagtggcacgatcttgaaactctcaatataaatgcctaaggtgcagcacttggcagataagaagccatatgcagacacattcttttaaaagaacacatcattatttggttctttctcatgtgagagtcggatgactcagagccaacataaattccaagtggtatgcagaaaaccaatgcatagctggagagggtaatgaaggttagtatctgcagtaaggctgagtcgatgcaaacggccacacagtcatggattcacaatgatctgggtctccatcatcctgcaatccaacaccttgcacagccttcaaacaccagctgggaattcaaaagtggcatgtgcggtagcaggagatctgttcaccctcttatttcctctcatccccatgtagcaatctggtgcaatcacagctcacagcaacctcaaactcctggactcaagtgatcctacctcctcagcctccctagtagctgggactacaggtgtgtgccaccctgccagactgatttttgtagaaacagagtcccactaggttgcccaggctagtctcgaacttctgggctcaagcaatcctcccgccttgcaaatacagagtttgataaaagacctcctgaggtcctacagagagaagtctttaagctccagggcagagacaatttgcatttttctcaccacccagggaatgctaactgggcagcccagggtacccgggagctcaggccatccagtgtcctttgagatgttaggaggaagcagaacagccagctgccaaatgaaacacggcaaaatgctcacccttcaagggtctgcttttgttttgtttttgttttttgagacagtctcactctgtcgcccaggctggagtgcgctggtacaattttggctcactgcaaccaccacctattggattcaagcaattctcctacctcagccttccaagtagctgggactacaggcacgcaccaccacggtcggttaatttttgtttttcgtttttttggtagagacggggtttcaccatgttggccaggctggtctcaaactcctgacctcaagtgatctgcctgcctcagcctcctaaagtgctgggattacaggcatgagccaccgcgcccggcctccctcaagggtctgaatccagccagtgtcctacgtcatacctgcttcagcctatgcaatggagagagcctgagattttatttcaataagaaaatctactgagttgcattacatcaaactaaaagggagaaacacaaatataaaaaataaaaatccagaaattccaacactaggcaaccctccaaaatgtggcaaagctctgtgtatattaaaaatgtattgagtccgggcacggtggctcacgcctataatctctgcactttgggaggttgaggcaggtgatcacttgaggttaggagttcaagaccagcctggacaacatggtgaaaccccatctctattaaaaagaaaaaaaaaattagccgggcatggcggcaggagactataatcccagctatttgggagattgaacccagaaagcggaggttgcagtgagccaagatcacttcactgcactccagcctgggcgacagagtgagactctgtctcaaaaaaaagaaaaaaaaaaagcattgaaacatgcgacatccacctttttgtaatagttcccatagcctacacaaatgcatatgaaatgcttaatattttgcttgcactattcttttctgctggaagggtggttctgactaaaaaattttactttcccattctttgctttttcattaatgctattttctttgctccagggttatagagtggaaagtcccacaatctttttcttctctattttcaggtagatgcattttattactatattctatctatccatttattccatctatctattccatttatcatctacctacctattattatctatcatctatgtattccatctacctgtcattgatctatctatcatctaccaatctacatttttgtcttgtagaaaaacgttgacctcttggcgagaatgcaaagaagggaacgcttgcttatacgctgttggtgagaatgtaaaattgtacaatctctatagaaaacagtatgtagatttctcagagaactaaaaatagatctaccctttgacccagcaactccagtaatggttatctacccaaaggaaagaaattatcagaatagacacctacacttatatttttattacagcacaattcacaatagcaaaatcatggaatgaacctgaatgttcattggatgaagaaaatgtggtatacacacaccaaggaatactatgcatctataaaaaagaatgaaactatatcttttgcagcaacataaatggagctgcgggtcaatatcctaagtgaaataactcaaacagaaaatcaaataccacatgtcctcgcttataagtgggagttaaaaaaaatgggtacacatggacctatagaatgacattaacagacacaggacaccttaaaaagggggaaggtgggaggggatgagggtggaaaaattacctatctggtattatgttcactgtttgggggttagaaggccaatccccaccgctaggcaatatatccacgtaacaaacctgcacccttatgccctgaatctatttgtttttcaacattgacttccatggtcactatttgtgaaatcactcctcatgaaccaggacttgcatgtttttttgtttctcaggtgaactgtcacccctacaactcagcttgcaaccagccctggccaccagtttccccacactgagctgaatatcggacatgcccatctcagacattccagcccattctgaaattccacatcgattcacctgacaaagtctgaagttccagggcaatttatctggaaaagcttacctggaatcacgtgtcatttcaaccaacaactgttgaagaggacgtggcattaaaaccaagggtatcaattatttataagggctgtgtgctggttggtccaagcatctctccttcacgccatcactcctttcaagagctgcctctgttttctaatttagcacaggaatttagatgcccctaaataagtaggcatccagtatctgcccacaccagttttagtgagagtacatatggagacactaccaccacccctgctctcctactgcataccccaccatgccaaagcatggtggctcacacctgtaatcccagtgctttgggaggccaaagaggaggaacacttgagatcagaggtctgagacgagcctgggcaacatagtgaaacctcatttctacaaataagttaaaatatatatatgtagggcatagtggcacacacctgtggtttcagcttttcagcaagctgaggccggaagatcacttgagcccaggagtttgaggatgcagtgagctaggattatgccactgcactgtagcctgggca

SEQ ID NO: 3241 - DNA, 141 bp, Homo sapiens
gtggcgtgtgcctgtaatcccagctatacaggaggcagaagcaggagaatcactcgaacctgggaggcggaggttgccatgagctaagatcgcgccactgcactccagcctgggcaacagagtgagaccgtctccaaaaaa

SEQ ID NO: 3242 - DNA, 431 bp, Homo sapiens
acatttcacagctttcattaatttaattttgaagacattgattttttgtgcatatcagaaattatggatcagataattggccaaataagaaaaattcagacagcattgcttttctaaacatactgaaaataacgcatgtacctggtgaaaagtgaagacgtcatgacagagggtccagccctgctgtccaggccacccccaggatgggagccctgaatcctcatgggatgtgcgctgagatacaaggaggtccctgcacacacctgcctttccccgctgctggactcttgcaaatcatttcctgtgagtgtcagccagcccactgcatgttccgaaagctctgcagagtgcgccaatattccagagtttcaaagtagtgccctttgaaaagatttaaacctgcaaataaaattaaatttgcatttgagaat

SEQ ID NO: 3243 - DNA, 583 bp, Homo sapiens
gtctgcttgggtaaggcattaaattatttcaagaatcattttggtctttgctctcaagtaaaagtggttttagaaggaaacttctacctggccatcgtgtgacaacactggctgcatatcaagaaaagtgagactttattttttgcacatgattttatactcatgtatgcttgaaggaatatgcaagcgtcgtgagatctaatccatacagaagttgagaatgtgtttccattagaaggtaaagagcctctagtattcaaagcctttgattcagcgggcaggtgcgaacggtggaggactgtgcttctcgcttgcagacacctcgaattatttttctttagctccctctgtgctttcagggagcctgcgtgagttaagcctctccttgtagtgatttcccgatgcccagcaaggccgaagctctcatttcctttaggagtgttgttttttttttctcaatgaaggatgaattttctaaatccataattacacctgaccatgatggcagcttctctgttaagggcttggaaagtaccttgttaattacttgacttattttgtcaacattttttcatgttctccc

SEQ ID NO: 3244 - DNA, 9372 bp, Homo sapiens; identical to SEQ ID NO: 3049

SEQ ID NO: 3245 - DNA, 351 bp, Homo sapiens; identical to SEQ ID NO: 3050

SEQ ID NO: 3246 - DNA, 274 bp, Homo sapiens; identical to SEQ ID NO: 3051

SEQ ID NO: 3247 - DNA, 1870 bp, Homo sapiens
aggcgcacggcggccctacaggagggtctgaggcgggcagtctctgtgccgctgacgctggcggagacggtggcctcgctgtggccggccctgcaggaactggcccggtgtgggaacctggcctgccggtcagacctccaggtaggggggcccgggggaccccaggcctcctgccgcaaagcaggaagcagctgttggggctgagttgctggagagcacggtggttggctgggctgagccaggtagggagacctcacttcacgggcagttcccggggctttggcctcctccaacagggccggggtgtccgctgccttctaagatctcgctcacggcggcaccacagacggagacccaaatgtgtctgcagagcccaccctgaccactgtataagtgtatactcccccaagaccccttgtatcacccccactgtcttgttctagaaaacacctatgtcagcccaggcacaatggttctcgcctgtggtcccagcactttgggaggctgaggcgggaggatcacttgaatagaggaggtcgagaccagcctgggcaacatagtgggaccctggctgtacaatagatacatatgagccaggcacggtggtgcctgtggtcccagctacttgggaggctgaggcaggagaattgcttgagcacaggaggtcaaggctgcagtgagccgtgatcacaccactgcgctccagccttggtgacagagcaagaccctgggtcaaaaacaacaaaacacgagaaagcacacaaggcagctcttggaagtagatgcctcacactgacaggggccacagctgggcagagggtcccagagaaggagcgtctctctcatgggctcagcactttctgcagctgccctaagacctcatggtcttcgggttctttataggaaagacgcctcttttcagcatctggtcccagagaagtgtcccctcagtccctgggaagtgtccctgggcagtgggcgggccgttagcctgaagctgcctccgggggccctccaggggatgactttgtctctagaactgtggtcctggttcctagagtggcggagagcctccagtgtgactgctcccaggcctcctgtggggctgagccctgcttggataagagaaagttttgttttctaagctcagtggtggggcttagccctctgtggggcgaaagcgggggctgcgctgggctccttgtgaggaggaggacgaagtccggcctgtcccagagcccgtcaggcagagaccctccttccggcagtttgctcagccttgatccatgtaggggctccctggggtccttgcaggtggcggccaaagccctggagatgggcgtgtttggcgcatatttcaacgtgctcatcaacctgagggacatcacagacgaggcatttaaggaccaggtgagcaggaggcaggtgtggtgcccggaccccacgtgggggcctggattcacagcctcagggtgattgccgactggctgtgggcagtgggggtcggaggttgctgcccagcaagctgggctgaagactggaactaccagacccctctttccctgtgtccatcagatccaccatcgtgtttccagcctcctgcaggaagccaagacccaggctgcactggtgctggactgcttggagacccggcaggagtgacggtgcgggaggcctctccgggctctgtggcccctccctcgcccatccccagagggcagagctgtgacctcggtggggacacagcttgttcgtgtggggcccggagggtaggtgggcaggcagcggggcatcgcctgggaatggaggcgctggcagggacagaaggcccctagtcccatgtgacctccagtaaagttttggcaccaaa

SEQ ID NO: 3248 - DNA, 1713 bp, Homo sapiens
cagtgagccgtgatcacaccactgcgctccagccttggtgacagagcaagaccctgggtcaaaaacaacaaaacacgagaaagcacacaaggcagctcttggaagtagatgcctcacactgacaggggccacagctgggcagagggtcccagagaaggagcgtctctctcatgggctcagcactttctgcagctgccctaagacctcatggtcttcgggttctttataggaaagacgcctcttttcagcatctggtcccagagaagtgtcccctcagtccctgggaagtgtccctgggcagtgggcgggccgttagcctgaagctgcctccgggggccctccaggggatgactttgtctctagaactgtggtcctggttcctagagtggcggagagcctccagtgtgactgctcccaggcctcctgtggggctgagccctgcttggataagagaaagttttgttttctaagctcagtggtggggcttagccctctgtggggcgaaagcgggggctgcgctgggctccttgtgaggaggaggacgaagtccggcctgtcccagagcccgtcaggcagagaccctccttccggcagtttgctcagccttgatccatgtaggggctccctggggtccttgcaggtggcggccaaagccctggagatgggcgtgtttggcgcatatttcaacgtgctcatcaacctgagggacatcacagacgaggcatttaaggaccaggtgagcaggaggcaggtgtggtgcccggaccccacgtgggggcctggattcacagcctcagggtgattgccgactggctgtgggcagtgggggtcggaggttgctgcccagcaagctgggctgaagactggaactaccagacccctctttccctgtgtccatcagatccaccatcgtgtttccagcctcctgcaggaagccaagacccaggctgcactggtgctggactgcttggagacccggcaggagtgacggtgcgggaggcctctccgggctctgtggcccctccctcgcccatccccagagggcagagctgtgacctcggtggggacacagcttgttcgtgtggggcccggagggtaggtgggcaggcagcggggcatcgcctgggaatggaggcgctggcagggacagaaggcccctagtcccatgtgacctccagtaaagttttggcaccaaacctgtgttgtgtgttggcggttttgggggcagggctgagagctgagctgcgggtcttggggcaggagcaggacatatggtcagtggcccatgggagccagggttggagggaatggggttgcagcgtgaggagacagacctcagcgccagggtccccagacacccagtgcagcccacagtgggcagggtcacaggtattcagaggacctggggttcagtgcaggtccctgggctgtgaggccccttgtctgagggaaaggggccctggttctgtgcatgggacagaaaccccagggacagcaggaccttcgacgctggaaggatagcctcgcttcccaggtgcagctcccggcaggtctggacagttccacagagcacggtactggccctgtcctcagttcccgtccacccttcaaccagtggctcctgggagacttttcctccctgcctcagctccctgcccagccagcctcctgtctccagagaagttctccattaaaaaataatttagcaaatca

SEQ ID NO: 3249 - DNA, 259 bp, Homo sapiens
aggctctttagctgagaataagggccctgagggaactacctgcttctcacatccccgggtctctgaccatctgctgtgtgccccgaccccccctaccctgctcctccaccaagcctgatgctaagggctataaaccactggcccaacagaagcttggttcccagagaactggtccctgcctgggacatgctccttgctacagccccttgtgggagctcagagggcatggctgctccccctacggtccctcgcccagtgg

SEQ ID NO: 3250 - DNA, 32207 bp, Homo sapiens
aaacaaactttccctactttaaatagtctcacgtagtcttgtggcaaaatttaggctgcctactgagtatccagtgcagtataaagcagtgaagaagttgagttgtagtggcgaatcagaattgacataactgtaagatagctctttaaagaagagcatatggcaagaagacttaagttgtggtcatgtttgtgcttaccatgtaatatttccttggttttacttttcctgtttatagtgatagtgggaactgaagagagaagccagagtatattctaattgtagtaaatggttcttttcattccctcccttcagttgccagaactgattttgctctgaagaagtagtttatcaattggagcttctgaaacatctacttgcctcaactcttccctagacctgctgtgccagatggtctagggattgggttctgagcactttcactttataaaaaaaagcttcataaaggacacttatacccatacctgattaaaaaccactgctctgggaaaaaaatgtaattcaaattccagttctggagcccatcatatacctgggatattgagttaaacacaagtagatataggtaattgtactggcaagaagtaaatgaggcatagaaaatataacacaatttcaaataaggtgtaccacttttactctcatggtatcctctgctccatgttgtctctgcaccccagtgtactgtgggagtttttgtggggttttttgggttttggtttttttggcttatgtttttgtttccatccctagagtataagtttctcatgggcagggactggttgttgtctatttctatatcagagttatcagatacaactcagagaatactgaaagatagttaaatgtaaaaacacattcttctttgtagctgccatatgattatgacctttaggaattctgtcttcatgttacatcttacaccactacttctgttgttttttaaaattgtggtaaaatacatataacatgaaacttaccatctgtttttaaatgtgcagttgtcctattaaatacatttacattgttgtacaccatcaccaccacccatctccaaaactcttcatattgcaaaactcaaactgtagtcattaagctactccccattctccctccccacagcctctggcaactactattctttttgtctctatgattgactactctacatacctcatataagtgattatataagtgaaatcatacagtgtttgcctttgcatagctggcttatttcattttaaagtctaagtaatattccattatatgtatataccacattttccttatccattcatttgtcgatggacatttgggttgcttccccatttgagctattgtgaataaggctgccatgaacatggatatacaaatagctgtttgaggtcctgctttcaatatttccaggcatatgctcagaagtggaagtactagatcatttggtgatgctatttttattttattatttattatttttttcagacagagtctcactctgtcacacaggctggagtgcagtggtgctatctcagctcactgcaacctctgcctcctgggttcaagcgattctcctgcctcagcctcccgagtagctgggactacaggcacgcaccaccataccccgctaatttttgtatttttagtagagatgggatttcaccatattggccaggctggtctcgaactcctgatttcaggtgatccacccaccttggcctcccaaagtgctgggattataggcatgagccaccatatgcggccaaattttttgaggaactgttttctagagtgactgcaccattttacattcctaccagcattgcacaagagctccaatttctccatatccttgccaacacttgttatactcactcgttctggtagttgacaccctaattgagtgtgaggtagtatctcatggttttgatttgcatttaccaaatggttaacgattttgagcatctttagctgtgcttattattggccacttgttgatcttctttgtctatttttaaattgagttgtgttgttgagttttaagagttctctgtatgttctagatattaactccatatcagatatgtgatttgcagatactttcttttgttgcctgtacctctgatgtcatatccaagaaatcactgccaaatccagtgtcttgaagcttttgccctatgttttttttttttttttaacagttctgtggttttagctcttacatttaggattttgatccattttgagttaatttttgtatgtagtgtttcataagggctcaactttattcttttgcatgtggattatccagtttacccagcaccatttgtggaagagtactagtcatgcaccacataacaacgtttcagacaattacagaccatatatatgacagtagtccaatgagattataatgtcgtatttttactgtaccttttctatttttagatgcacagattcaccgttggtttgcagttgtctacagtatgtagtacagtaacatgctgtacaagtttacaacctaggagcaattggctataccatctaggtttataggtacactatgatgttcacatgacaaaatacctaatgatgcatttctcagaatttatccctgtcattaagcaaagaatgactatactgatataggtatattttattgacagatctgagcattttatatacaacagctacacaaaggatatattacccccattcacacataaagaaacttgaagcctagaaagtttaagtagtttttacttgctcaaagttacttggtttataagtggtagagcctgcatttatgtctagttcagtctaaattactatgctaatgctacactatattatctatctttcttacacatggtcagggttatttggttatgataactaatatgtgaaatggtggggataaacactaaataactaaaaatttataaattgaaaagtgctttggaaatgagcataataggaatacaaatcatttgttcaataactgcttggcatttgtctcaacgtattttattatactttagctcattggtgacattttttggtttctagagcaatgttgatcccagggatgatgtatttggatatcctcaacaatttgaagataaaccagcattaagtaaaactgaagatagaaaagagtacaacattggtgtcctaagacaccttcaggtcatctttggtcatttagctgcttctcgactgcaatactatgtgcccagaggattttggaaacagttcaggtaaactatggatggacagtaatagagatacttcttaaaatgaacatctcaatacactaacattaaacctctaaaagacatgttggaaggcatctttttttaagcactggtaatattcaaactgtccttaattgggtgggtttttttttttttttttaggtccccttaggaagaagtagaaactgccatagtaagtaagggcaacatcctttagtctcttaaccatattattaactttttattaggaaaacatctaataaatacagaagtagaaaaaatagtatgaacccctgtatacttgtcacccaacttcagtagtagtcaacttgtggccagcctcatttaatctatattcttaacctattttttttttctttttttctttttctttttctttttttcttttttttttttgagatggagttttgctcttgttgcccaggctggagtgcagtggtgtgatcttggctcactgcaacatccgcctcccagattcaagtgattctcctgcctcagcctcccaagtagctgggattacaggcacccaccaccacgcctagctgattttttgtatttttagtggagacggggttttaccatgttggcccagactggtctcgaactcctgacctcaggtgattcccatctcagcctcccaaagtgctgggattacaggcgtgagccactgtgcccggcccctacctatttctttctagattgttttgaagcaaatcttagttccatctgtaaatacttaagtatgtgtctgtagtgtctgtctcaaaacatgatcatgataccattatgtttttttaaaattgcttaatatcaaatatctctgtcagtgtttgaatttaccgagttatctcataactggtttttactgatattttttaaaaataagattcagttgaggtccatttaccacaaatggttggtaatgatcttgattattcatctgtttcttttttccctttacaattatgggggaatcggaggacaaatagtttagcatgtaaattttcccacagtctgaattttgttgatggaatccctgtggtcgtttattattttctgtttttcttggtcacctgcatcttctataaacaccttatgagatctagaggcttgatcagattgtggtattatttttctttttgtggaatggataggcaacgctacttcataggggataatgtttatctccatgaggagtgacattataatgtctgtcttcttatgatgttaacagcaattttttattattattattatatatatacaatttttttttttcccctgagatggagtctttgctctgtcgcccaggctagagtacagtggcgtgatctcagctcactgcaacctccgcctcctgggttcaagcaattctgcctcagcctcctgagtagctagggttaacaggggttacaggcgtgggccaaccatgcccggccaagttttgtatttttagtagagacggggtttcaccatgttggccagtctggtctcgaactcctgacctcaggtgatctgcctgcctcccaaagtgctggattataggcatgagctactgctccctggcctttttttttttttttttttttttttggagatagagtcttgctctgttgcccaggctgaagtgcaatggctcgatctcagctcactgcaacctctgcctcccaggttcaagcaattcttcagcctcagcctctcaagtagctaggacgacaggcccaccacaccccgctaattttttgtagttttagtagagatagggtttcgccgtgttggccaggctggtctcaaattcctgacgtcaggtgatccacccgcctcggcctcccaaagtgctgggattacaggcgtgagccactgcacctggccaattatcattatcttaatacagtatttcttcagggttataaaataacaatattttattttttcatttaatagctagaaaagatctataaagggaaaattgccctcaccattttctttttaagttagaaaactcagattacatttttatcttgtttcctttgactttaagtcagtactacgtcatgcactgtgctaaaataactacagtacaaccacgtaactcttactgtgtatgaaaaggggtataattctttatagcagtgaggtttggtttgttttgttttgtaagtaatcctccttggaatcccttcaaggtgcttcccggccagctgagaggagcggggaacgaagggtcacctgatactctgatccgccttcccttcttctgacaaagcagtataaatttcttttcctcccctaactaggccctctacttactctgtactagtgtcttgcgtggaccaccctccctcccatctctcattttgcttttagtcccgtcacccagcataccattctccctcctctctgactatttcagttctgtcttctttccctaggttattccaattccatctctgccttaaggctattttagcatttctgtttatgctcttccaaactgaagaacacaaacagaggcttatactgggttttttttttttttgagacagagtctcactctgtggcccaggctagagtgcagtggtgtgatctcggctcacggtaacctctgcccgctgggttcaagcaattctcctgtcttggtagctgggattacaggcgcctgccaccatgcccagctaatttttgtatttttagtagagactgggtttcaccatattcatcaggctggtcttgaactcctgacttcaggtgatccacccgcctcagcctcccaaagtgctgggattacaggcgagagccactgcgcccagctgaggcttacactttttaaactttcgtcttgtcattcagttacaattttttctcttgtaatgcctttgcttttttgacttttcagttactcgctgtgctagtggagctcggtttgtatagactagcactttggattatccacactttagacacataatctactcttgacacaagcgggttagttaactacacttcctcaccccactcttttattttgaaaagtttcaaacctacagaaaagatgaagaagaggtataattatcacctttatgttatattctttatgcggttttactaattaacattttgccatatttgcttatcttgccatatgtgtgcttggtttttggtttattttttttttaagttttgtttgtttgtttgtttgttttttgtttttttgagatggagtctcgctctgtcgcccaggctggagtgcagtggcgtgatctcggctcactgcaagctccccttcctgggttcacaccattctcctgcctcagcctcccgagtagctgggactacaggcgcctgccaccaatgcccagctaattttttgtatttttagtagagacagagtttcattgtgttagccagggtggtctcgaactcctgacctcgtgatccacccggctcggcctcccaaaatgctaggattacaggcgtgagccaccgcgcccggccttttttcttaagttgatagtgaagttgcaaacaggacgcttcaccccttcatacttcaacatatatcttataagagatcatatatcagaataaggcaattttcctacttatgtatgatacagttatatccaagtaatataataacgatttttaatctctaatattcatcagtatatattccgatttcccaaaagtggtctttataacttatctctctatcccaatctgatactcatgaaggaatcacaaggatttggctgttagctctttagttgccttttatgtaaaataatctccctaacttgtgacttgtatcgcactgaaatttttaaagaatccaggccagttgtcttgcagaatgtgttttttgatttgtgtgattgtttcctgatgattagctttatgttaaatgttgagggggtgggggcaataaaactacataattgatgttttgtgtttctcactgcactgtattgggaggcatgtgttatccacttaattattaagtgatattaattttgatttcttggtgtcttaacagatctctcctttataaagggtaccttttcccttttgaaattagttgattacatgtttgaaagtttgaggagttgaatatggtttgaaagtaaatagaacggactggtgtaatttccagtaatgaaacaagctgatttttaacaaataatatatttgattttaaacttactgtatacaaatttttacttgtgtaaaatataatagagatcagattatttgctatgtagaaaaggtttttacaaaagtataaacagacagttcttgcatactttaaaatgtcatttcttgcttagaacaaatacacttaaattctctatatacattattctgtatatacaaaatcaggtattattgatagtttccagcagtgcctgagttttagcagtatgagttctcatttttgtggtatgtagtgatggtgtcttttcttagattactcaagagattaactctagaacaagttaaacctttctctcttcacttgggaaaaaaataaatttaagagtaactagatctgatctttttactatttataatccaaaatttaagcaaaatgaaagaaataaaatagtgattgtaacatccacataagagtgagatccaccacctcatcttaatagtatctttaattggattcaaaatgcatgcatgtgtcataccacctgaagcaaccatccttcctggagccgtactatccatcaattacaccactagttttgtggcagttctttgccgctagagtactagttttactatgaggctcactctcttaccccactacattctacagggaaagcacattctttttttcctactttttccatgtaattgaggaataaaatctcggttttatatactgttgtttgtggtcttgttgcttttttttcccctgaaaaatatagttgtacatattgttctgtgaatgttacatgttacatgttttatttcattcatttcttaggctttggggtgagcctgttaatctgcgtgaacaacacgatgctttagaattttttaattcattggtggatagtttagatgaagctttaaaagctttaggacatccagctatgctaagtaaagtcttaggaggttcctttgctgatcagaagatctgccaaggctgcccacataggtaagtactaattacacattgaaagtatatgttgtaccatgtatatactaacagaaataaaatttttactagtacttacatacaaaagtggagtatatcactgattactaaatacctgaaacagaatgatttatatactttgcataccttactgctgtggggcttttttttgtttttgtcagttaacttttagttccttctactctgcctgatctcttagccattttattatattatactcttacagtctctttcttcctttcctttcctttcctttctcctttttcttttcctttctctttttttttctttctttcttttttgaaagagacaaggtttctctttgttgcctaggctggagttcagtggcatggtcgtaactcatagtaactttgaacttgtgggctcaagcaatcctgctgcctcagcctctcaaatagctgggactacaggcatgtgccaccacacctggctaatttgtaaatttttttagagatcgaatctcttgttgcccaagctggtctcaaaactgctgacctcaaaatcagtcgtcacacctcaacttcccaaagtgttgagatgacaggcgtgagccactgcgcctggcctactcttacattcttttacagaagattattcctgaggaaataaaatggcattttgcatatagctacaggtgttatttataaatttgccctttatcttagaacttgagtgattataatagtgtaaatacagtaagtttagaagatgacaaagctatggtagtatttcctatacaaatgaaataatgacttttaaaatagcattgattattgtcattatctttaaggtatatttgtatacaaaacatatcaaacctattgtaaaaaaagattttacccccgtccgggaggtgaggggtgcctctgcccggctgcccctactgggaagtgaggagcccctctgcccggccagccgccccgtccgggaaggaggtgatggggtcagccccccacccggccagccgccccgtccgggagggaggtaggggggtcagccccccgcccagccagctgccccatccgggaggtgaggggtgcctctgcccggccgcccctactgggaagtgaggagcccctctgcccggacagccgccccgtccgggagggaggtgggggggtcagccccccgcccggccagccgccccatccgggaggtgaggggtgcctctgcccggccgcccctactgggaagtgaggagcccctctgcccggccaccaccccgtctgggaggtgtactcaacagctcattgagaacaggccatgatgacaatggcggttttgtggaatagaaaggggggaaaggtggggaaaagattgagaaatcggatggttgccgtgtctgtgtagaaagaggtagacatgggagacttttcattttgttctgtactaagaaaaattcttctgccttaggatcctgttgatctgtgaccttacccccaaccctgtgctctctgaaacatgtgctgtgtccactcagggttgaatggattaagggtggtgcaagatgtgctttgttaaacagatgcttgaaggcagcatgctcgttaagagtcatcgccactccctaatctcaagtacccagggacacaaacactgcggaaggccgcagggtcctctgcctaggaaaaccagagacctttgttcacttgtttatctgctgaccttccctccactattgtcctatgaccctgccaaatccccctctgcaagaaacacccaagaatgatcaattaaaaaaaaaaaaaaaagcctaaaaaaataaaaataaaaaaagattttacaagaaaaacattgacaaaacaaattgtttgacttgaaaattgattaagggcttctattagaaatagttaatgagttcattactgataaatatacatgcctgtcatatggaagttttactttgggacttgttataatatggattaatgttgatttgcaatcgtttttcaccaaaatgtcacagtaagatagtattttctacaatccaaactgtattaaatatagtcatgggttgagtacacatgtggtttgtgggggtgttttgtttttgattaccaggaaatgattgggtgagaggtaatactatataaatgagaaatttctagcaagttatagtcttaccactcattcataattagggaatatacttattcacttagcctaggcaacttttagtccttttgaaaggccttttatattaggtgaacaataaaataaaattttaaccttgtttttaattagtgataaaaacagccaactttggggtcatttgttcatgttactcctccttagttttagacaattttctaaattatttggaaatcactggttttctttggcaagtgaaatgtcaaaagattatggtcttgaaatcagatccttatacctgatcaacagctaaactagtcttatttttttaactagctgggcatgggggtggactcctgtagtcccagctgcttgggaggctgagtcaggaggatcgcttgagcccaggagttagaagttccagtgaactgtgatcatgccactacattccagcctgggtgacagagtgagacctcacctcattaaaaacaaaaaagaaagaaactctactttgagtgcccatacaaccattctgtttttcactctcagtacagtattcattgaattacatgaatctttgtgttacaagattttgcccaactgtaggctaatataagtgttctgaacacatttagggtaagctaggctaaagctatgatgtttggtaggttgggtgtattaaatgcattttcagcttatgatattttcaatttatgatgggtttattgggctgtagccatttcataagcaaagagcgtccgtacttgctgcagagaccatatgcttcacaaagcctaagataaatttactatctggccctttacagaaagactttgctgtcctctaatgttagaacaccttctttttatagatgttgaagaatatcctacttttgaagtgtagtctaagatctaacttttttccctctatgggctgttccctgattatatagtaaaaatttgcttaatacctgctttatattccattcatataatttataaatgcctttgtgtaccttttttccggagtttaaaattccttaaataagggactatcttaaacagtgaatatccctcagtacttttacacatagaaagcactctcagtctatccattggatgaattaatggttaataatgtattcctcacatcccttgttttgcatttatgcatgtgtctcaccagaaattggaaagtctctttggtagaaaatgaccataaactgggattctagctccttctcaggttgctaatcctgtactcatttgtgtgtgcaaacttttgctttactaaggcttccattacagaaaaggaagaatatataaaaatttagcttattcgtagtttatcattttcagaacttaataaattcatgctttggcttcagcatgaattactatctaaacagataacactagaagcagcatcgtatactacaaagagattaagctgtgagcccagacagattcaactttaaaataccatttcacctaataatcttgatcaagttaacttttttattgctaacattctatgacttacgggtttcgcattataaaaatggcaaatgtatgggtgcagcaaaccaacatggcacatgtatacatatgtaacaaacctgcacgttgtggacatgtaccctagaacttaaagtataatttaaaaaaaaaaggcaaatgtagtttacattaagtccataactaaaatgtttacaaaactaagggataaatcctttttttaaatcgtttttaggtacgaatgtgaagaatcttttacgaccctaaacgtagacattagaaatcaccaaaatcttcttgattctttggaacagtatgtcaaaggagatttactagaaggtgcaaatgcatatcattgtgaaaaatgcaataaaaaggtacgggctgtccagttttgtttaattttgattacatttaatggatttagaagaaattggtttttttggttcatcctcacaagtcaccctatttttattttctcctactttggtatagtggtagcagagaagtagtcaatatgataactaatagaaggtttggcaaggaaggaaaaaaagtagtgccaaaggggctaggtaaataagataaaaataggtaaataagagtgaataattttaaaagtcataacgtgatagcacattctcttatataagttacacagacactttccatctctaccgagaaacaaattgccattgaacccctcaaagatacagagctgatagaggaaaacatttctcctgtcatgtccaggattacttgtcaagaccaaaacatttgctgaaaccattaattactttattgaaccacataagatttcttttagactagtcaagtggcccataagatttcttttatcacctatgttataaaaccatttattttggaaacttattagcagttctttgagagagatgattcacacgcattatagtaatgaataaggtgtatctttgggagctcccaaaccctttcaccctcaagtcacttgtgttgttttggccttatgcaccacttagagaagtcctgaagtttaaagattgagattgtgggctgtaaagccatactgcctgccacctgcagctcctgagacctgaggcaagttacttgacctctctgtgattactagttttcatcttttaaggttcagtagtacacacttgagaaggttgtaaggattcggtatgtttttacttgtgcggcacttagtatatattacctggcatctgaattacccaacaaatattagctactcttattgttattgtagttctttggtttgtgcataggaaaccaccttcgtgggaacaacagtaaacatcaaacaggtaataatggctagataacaatgacagaaaccagtcaacaatttaccatttgcatattattaatttcagcatttaaatcagctgataggattatcttgattatgctcattgtcatgtatttgtttatacttaaaaattcagataagtcttaatatcatttaaaagtttgcttggggtttttttttttttcctgtggattttaatagaacatctggtaactttgtcttgtttattttaggttgataccgtaaagcgcttgctgattaaaaaattacctcctgttcttgctatacaactaaagcgatttgactatgactgggaaagagaatgtgcaatcaagttcaatgattattttgaatttcctcgagagctggacatggaaccttacacagttgcaggtgtcgcaaagctggaaggggataatgtaaacccagagagtcagttgatacaacagagtgagcagtctgaaagtgagacagcaggaagcacaaaatacagacttgtgggtgtgctcgtacacagtggtcaagcgagtggggggcattattattcttacatcatccaaaggaatggtggagatggtgagagaaatcgctggtataaatttgatgatggtgatgtaacagaatgtaaaatggatgatgacgaagaaatgaaaaaccagtgttttggtggagagtacatgggagaagtgtttgatcacatgatgaagcgtatgtcatacaggcgccagaaaaggtggtggaatgcttatatacttttttatgaacgaatggacacaatagaccaagatgatgagttgataagatatatatcagagcttgctatcaccaccagacctcatcagattattatgccatcagccattgagagaagtgtacggaaacagaacgtacaattcatgcataaccgaatgcagtacagtatggagtattttcagtttatgaaaaaactgcttacatgtaatggcgtttacttaaaccctcctcccggtgagtatcaagagagtttagcttcttagtaataaagaataatttatagtaggcgtcaacatgtttaagttcataaaattaatgttttcactttaaatgagtctaatttgctgggtgtggtggttcacgcctgtaatcccagcactttgggaggccgaggtaggtggatcacctgaggtcaagagttcaataccagcctgaccaacatggtgaaaccccatctctactaaaaatataaaaattagccaggcatggtggcatgcacctgtagtcccagctactccctgtagtcccagctactccggaggctgaggcaggagaatcgcttgaacctgggaggtggaggttgcagtgacccaaattgatggccactgcactccagcctgggtgacagtgagtctccatctcaaaaaaataaaataaaaaaataaatgggtctaaattaaagtagcctgagaagggttcttaacaaatttaggacttctcaaaattaatggaaacacagacttgtttgaaaatggggttggaaaataaaaatgtgtttttatatctgcattttatttatagggcaagatcacctgttgcctgaagcagaagaaatcactatgatcagtattcaacttgctgctaggttcctctttactacaggatttcacacaaagaaagtagtccgtggctctgccagtgattggtacattgctttggattttcattcctattatactaatgtttggtttgcttctttaatagattgctttatgtttttctaaaccaagagaattttgtttgaagtttggaatatagaataaaaactctgggtcacaatagagaaatcatattaaaatagttacttagtctaaacatggccttttgttattcagaagctgacttctgcttctattaccttgtatcatatctttgacatccctgcaccaaagactacaagctgagactgggggacagtgactcacacctgtaatgccagcactttgggaagccagggtgggaggattgcttgagctcgggagttcaggaccagcctaggcaacatagtgagacccccatctcttcaaagaagattttaaaaattacccaagtatggtggcgcacacctgtaatcccagctactcggaaggctgaggtgggaggatcgctggagcctgggaggttgaagctgcagtgagccatgactgtgccactgcactccagcctgggcagcagagcaagaccctgtctcaaacaaaaccaaagattacaagatgagactgaaaagtgtaagctacttatgaaatttattaggttttagcttacctagattgaattctgacaccgattaaaagggtaaaaaattaaaatggttttcttaagtttctaattgtgaaagtatagaggccattatgatacattgatttaataatttttacttactcatttcaggaatatgtcaagataagggggtggtattttgtcattgaatctaggaagagtttgttaatggatttttagaggacaagctttcacctgtttggtaactctgagagaatagaccaagtcatagtatttatctattgttttaatattagaagcaacctttgctggttctctccagcagtagaggaagatctttgtcttttttttttggttcaatgagactcatccttttactatagagaacaagttattgacttaatagtcataggtttttttgttttattttaggtatgatgcattgtgtattctccttcgtcacagcaagaatgtacgtttttggtttgctcataacgtcctttttaatgtttcaaatcgcttctccgaataccttctggagtgccctagtgcagaagtgaggggtgcgtttgcaaaacttatagtctttattgcacatttttccttgcaagatgggccatgtccttcaccttttgcctctcctggaccttctagtcaggtaattgcacagctttctttctaaatgatgagatgtttacaaataaattgtgtttcctggaagtcgaagtcacaagcatatgtgcatccacttgatatgtttacctaacagaaacacacaatatgatgtcagtgagttccatttaatattactgcatggcaatgaatagtaattattggctctttaaaaatgtaagagaattttctctgttcggttacatgcagtagcttaattataagtttactgttaagtagattttttcctattttgaaggttttttaaatagtcttagatttttttaaaaaattacaagtgtaaaaaattataatgaaatccgcctctgatcttcattccctttcccaagaagcaaaatagtttagtttgtgtgatcagtccttccataaatgtatgcctgtatcagcatatgtgcatgtcctttttatgcaagtagaagtatacatataccttgttgctgtaaaacaggtaatgttttatcctttacaggcttatgacaacttaagcttgagtgatcacttactaagagcagtactaaatctcttgagaagggaagtttcagagcatgggcgtcatttacagcagtatttcaacctgtttgtaatgtatgccaatttaggtaagaatttaagtttttcagaattctgttttgatgtatcatattaaattgtgaagtcatttaggtcaagtgatgaaatataatctgatctgaagtagaaacaatttcccataaaacctgttgtgaattttatctgaacatggcactttcaccttttactttgtttatgcatgtgtctttgtggtagacacaggtcagaatctgtgttttgatttttttttttttttaatctcctaatgcagtggtgccaaatctggctgcttttggaaaatactggtttctaggcctcttctcacactgattgaatcagcatccccaaagctaatgtcagggaatccatgttttcaaaggggtccccaaatggttgtgatactcaccaaatttagatagcagacttggtctgtacataagtttttgtttaagtaaactacaattatggataatataaatactcgcttaaaatattaatttaggggccgggcacaatggcttatgcctgtactcccagcactttgggaggccaaggcaagaggattgcttgagcccaggagactaacctaggcaccatagggagaccctatctctacaaaataaaattttaaaattagctggatgtagtggcatatgcctgtagtcctagctacttgggaggctgaggtgggagaatcacttgagctaaggaggttgaggctgcagtgacccgtgattgcaccactgcactccagcctgggcaacagaatgagaccctgtctccaaaaagcaaacaaaccaaaaagtcatatatccaaaatgaagttctatatccaggcgtacctgtcgtttcaggttttttttctgtgatcttacttaatcaccattggatccatggcccttttaacataagggagattgtacttttcatttgtctatttagtttgtcttcttttcccttgtcttttccgtaattgcagatatttgggtatttgtagatgagaaagagaatatttattacacagacaagcataagtggaatctgtatttcaaacttaaaaatgccaaatttagacattcagaagaatcctattctgttcaactcttttagatattgcctgttcacaaagcacacatcattgttccataatgtaacctacttgtaaaattttcctgctgaaaacaaatactgtagggcctgtaaaccttaatatgaagtccttaagatcagatatgcattgggattgagaattgtttggatttaagaaaagcaaggcagtgcatataccaacatctctatagcagggtctgagacaacaacttacaattgaacacattaatatttctacagtaaaatatgaatatttatactgaagggagaaataaagactataagtagcctttagtcagtttgggctaggttatcccaccaaccacattttgacagcaacttaatgaaaaactttgttgggctgggcgaggtggctcatgcctgtaatcccagcactttgggaggccgaggcaggcggatcacctgaggtatggagttcaagaccagcctggcaaacatggcgaaaccccatctctacttaaaaatacaaaaattagcagggcgtggtggcgggcatctgtagtcccagctattcgggaggctgaggcttgaatctgggaggcagaggttgcaatgagccaagatcgcgccactgcactccagcctgggcaacagggcaagactccgtctcaaaaaaaaaaaaaaaacttgttataataatagcttttgggccaggcgcggtggctcacgtctgtaatcccagcactttgggaggccgaggcaggcagatcacaaggtcaggagttcaagaccagcctgaccaacatggtgaaaccccgtctctactaaatatacaaaaattagccgggcgtggtggcacatgcgtgtaatcccagctactcaggaggctgaggcagaagaatcgcttgaacccagaaggcggaggttgcagtgagctgagatcacaccactgcactccagcctgggagacaaagcgagactccatcttaaaaaaaattaaaaattaaaatagcttttggaatcttaggatttcagataagaggttgtggacctgtttttattatgtttttgggaatatggcaataaataagattgtctaatgggatatagaagcaaataatgtagttgccataaaatatgttaatagctataatagggaaaatgcaaagtgcatcacggggggcatggtacctgaagggatttggggagtgcagaagacttaatggggaatgtaacgtgggaattggttagttgagctttccatctagagtgtgaacagcagatgcaaagacttgataaacttggcgtggcttattggatgggatgaaaattgtccagtctgactagaattgatgtaagatgggaatggcaggagtttctgatcatgcagttctaataggccttgtgagagagactgaggcattggatgagccattgtagggttttgaacagataataccatctagaaagagcactgtggccacagtgtggaatgtattgcagtggagtaagatcccagagagtgttaaaatgatctatagacataagatcattgtgacctgtactggagaactggcagtgagggagatacaagtggacagatagatatatggtgctttttataagaagtggaatcagtggatttggtgatgggatattcagagaaggaggggacagggaagagatgtgaagaatgatgcccaaaattctaacatgaacaactgtgagtggatagtggtaccatttactgaggggaaacacaggaggagaaacatgtatgtatgggaagaaaggggtgagttcagtttgggtagattgagtttgagcctgtgtgacacccaaatggagatatacagtagaacagtaagtaatttgtcttgaaatgtttttgaatcatctgaatgaagatatctagaacattaaagccgtgagcgtgggctagatcatccagggaaatcagtgtgagaagatagcctggcatgggaacttggagaaacatcagtttttaagagacaaggaggagtcgcaaataagaacaaaaagaggtagaaagaaaatcaggaatccagggaggaagaagtggttatggtttgagaactgctccttagcttattactgtgaagaggggccaaaaccaaattggcatgagttgaggaatagaaaatgagaaagtagagagaccaaatgtaggtatctttttcaagaagtttggctgtagaggaaagaagagaggcaggcaatttataaaagagtttttgcttctcatttaatgtagttattttgttgttttcatcctccttacaaatgagggttgcagtgttggttagtccctttagactctccaggctgtagaaagtgttcgtcttctggtcgggcgtggtggctcataatcccagcactgtggaaggccaaggcgggcagatcatgaggtcaagatatcgagaccacccaggccaacatggtgaaaccccgtctctactaaaaatacaaaaattagctgggcatggtacgtgcctgtagtccagctactggggaggctcaggcaggagaattgcttgaacccgggaggcagaggttgcagtgagctgagatcatgctactgcactccatcctggcgagagagcgagactgtctcaaaaaagaaagaaagtgttcatcttccttacagtgagccggtgtgattggaatgtcatagtcatagtcactgttgaacaatgttaatacttatactcaatgggtgagttttcttttctagtaaaataattctctgaatgctaagtaaaagtgataaaattacaaatcaaaatttttctgatcataaaaattatagacaagatattttgtataactacttgttttattcatgaagcccttgccatcttaattttttcctcatatttttctccctctctttcttctccccttcactcctttttgttgtaggtgtggcagagaagacacagcttctgaaattgagtgtacctgctacttttatgcttgtgtctttagatgaaggtccaggtcctccaatcaaataccagtatgctgaattaggcaaattatactcagtagtgtcacagctgatccgctgttgcaatgtctcttcaagaatgcagtcttcaatcaatggtaaatttgaatgctccattctttacactagttttgtttgtttgtttgttttgagacagagttttgctgttgttgcccaggctggagtgcaatggcgtgatctcggctcactgtaacctccgcctccctggtttaagccattctcctgcctcagcctcccaagtagctgggattacaggtgcccaccaccacgcccggctaattttgtatttttagcagagacggggtttcgccatgttggtcatgctggtctcgaactcctgacctcaggtgatctgccgtcctcggcctcccaaagtgctgggattacaggtgtgagccaccatgcccagccctctttacggtagtttttaaatgctgctgggcatatatagtactaagagtctggaggaagatttttgctttggaatattttagccctgtaccttttttacgtgtttaatgggggtcttttttctgtctccttgtgactgaggttgataccatgtttatgaaatagtttaagaattaactttttaggctgggctcagtggctcatgcctgtaatccctatgctttgggggaggccaaggcaggagaatcacttgagctgaagagtttgagcctgggcaacatagcgagacttcatctctactaaaaattaacaacaaaaaagttggctgggtgtggtggtgtgcacctgttgtcccagctactcaggagactgaagtgggagaatcacttcagcccaggagatcaaggctgcagtgagctgtggtcatgccactgcactccagcctaggtgacacagtgagaccctgtgtccaaaaaaaaaattaactttttatatttagattttgtatttttatatcttggtatatctatctgatcattataatgcataatgttactttcttcgttgtgcttaggtaacttgatttaaaatgttatttctctaaaataaaacatttggccagacatagtggctcatgcctgtaatcctagcattttgggaggccgaggtgggtgggtcacttgaggtcaagagttcaagaccagcctggcaaacatggcaaaaccccgtctctacaaaaatacaaaaaaattagccaggcgtggtgacgtgcacctgtagtcccagctactcggaaggctgaggcaggagaatcacttgaacctgggaggtggcggttgcagtgagctgagatcgccccattgcactccagcctgggcgacagagcgagactccatcttaaaaaaaataaaaaaaaattataggctattttctatcgtgaaagttgtgtattattattgtgaagaagcttattagttttttattggtgacaaatctgtattctaggtaatcctcctcttcccaatccttttggtgatcctaatttatcacaacctataatgccaattcagcagaatgtggcagacattttatttgtgagaacaagttatgtgaagaaaatcattgaagactgcagtaattcagaggaaaccgtcaaattgcttcgtttttgctgctgggagaatcctcagttctcatctactgtcctcagtgaacttctctggcaggtaaaaggaaaataacatttgtatgtttataatttgatttgttattcctttcattaagttactcaccatgtcttacttgtttttaggttgcatattcctatacctatgaactgcggccctatttggatctgcttttgcaaatcttactgattgaggactcctggcaaactcacaggtggatactctttttgtgactggaaacaattaggcttgcccaggtgttagagttaactgaaattgacagtcaccacattttttttaacctattggagttctagtgaatgttttatcttaaacctaggacaagggtaaataacaggttctccccttttcctcagaattttatttccttttttattcttttttctcactgcctaagtttcatacttaataagcctgtttctttagaatgacttttttaattaaggaggagctagcttgggcatttggtaaatatttgaatttcattaatgatgcccgaggattattttatgattatattacatttgttttagaattagtcacttgaagcaacttagtcattagtcacatgaagtataatagtatatgtaaaaagtcttcaggtaagtacggtttccatttttcatggtacttatattctgtaaagtcaccacagacactgagttagcaaatactgaaccattactcctaggaggaaatacagaattaggtttctataagcctctgtttacatttttatcaaccagtcaatacataaccttgttgtatgtgtgtttctacttaaagtcatttaatatattttgttgactcataaagttcacagccaacagctctgtaacttaagcctgaacttaagcttctcaatgcattctgcataaggcacatcacagccttcttgtggttaggaacattagatagcacttcaacattatatacttgggtcattttaaacataaaaataaccagcaaaagcacaaatatgtggaaaatgtggcactaaatacaccatgaagaaggacacttgtttacagtttaagctgaaacaagagagaatgacactcttctggacttcagctaggaacgtttgtgttggacaacttgatatttttgctgctctgtatatgtccacagatgacgaagaaagcaccttgatgattgattttgcagttataaataaagtttaggaagtaagcgaattcacaaatgtggaattcatgaataatgaggggatcaattataattagtttttatgagaacttttagaatgttaacttttttcccccgtaaaaactaaggttatccagcttaactggccctcaaactttcactagaatttttctatttgtttttgggggtttttttgtagtaaaagttgaatatattatctttaatcccaagagttatataatagatgataaattatggtattagttgacagcactgccaggttttagaacttcccttcccacatggaagatagtataatagtttgtttgggaaaacaattcaaagtctatgtcgcagtttgcctcccatctgccaaggtaataaaacaaacttaaaaacaagttctgtaacaacaaaatgcttaaagagaagtaacaatctggagttttagtggggattgcgaaagccagaatttgcaacttagtattttcaaattatctccaaatttaccataatagatttcaaacaaatactgtaaaaatagcattaaaccaaaaatcaattttcgtgagacacaaaagatagtagctcagaattatagtcgtttattcaggcagtattcagtgcccttctaaatatgttcataggatttgaaagcttccttcagagtagattttaatgaaatctaacttttactattttcttttttaaaaatgctgtatttctgggcacagtggcttacccctgtaataagcactttgggaggccaaggcaggagaattgcttgagaccaggagttcaaggccagcttgaccaacatagcaagatcttgcctctatttttttaaaaaagaaagtactgtaagcacttacagttttaaaccagttaatcacatcttagctcttgtttgattagagcaagtgataatggcaaagacatacgtgctagattaaatgtgggaattacacttttgtgtaatgagattagtaagatactgttaaatgaatcactggcccaaacgtgaaaataattttctcataatgagcttttagttcattcagtaaacaatgttcaaatatttatagagtgtctaccatgtgcccagcactgcttggcatcaggtaataaggcaagtgaagatagtattaataaaaatggcatttgagagcagttgatgctaatggggagaaaatatgatatggcagaaataatgatttagcacttcattgttacttgaaaaaactgaaggtaaaagcaatttatatgtagtgtttcagatgaaacagcaagagggcctgaacatggttgatttgtctgaaatgattaagctttgcaaaattgttgaagtaatctgttttgtttggaaatcatgaatgcatttgatggaggaaaaaaatcttactttgactttaaacatactgttaagtaaaatacatagtgtatattagaatctttaaattctcagtgtccaggttatgttttctaattgaggtaaaatttacataacaaaactcaccatttcaaagtatacaattcagtgacttttagtacattcacaatgttgtatagccattaccactatctgattccagaacttttttttttttgagagggagtctcactctgtcacccaggctggagtgcagtggcgcgatctcggctcactgcaagctccgcctcccgggtttacgccattctcctgtctcagcctcccgagtagctgggactacaggtgcccgccaccatgcctggctaattatttgtatttttagtagagacggggtttcaccgtgttagtcaggatggtctcgatctcctgacctcgtgatccgcccacctcggcctcccgaagtgctgggattacagatgtgagccaccgtgcccatcccagaacatttttttttattaccccaaaaggaaacccctacccaattaagcagtcactcaccattccttctaaccctggcaaccactaatctgttctctgtctctgtggatttgcctcttccagacatttggtaaaaacgaaatcatgcaatttgtgtgtctgacttctttcacttagcttaatgttttcagagtccatccatgttatagcatgtatcattactttatagctgaataatattttgttttatggatatatatacaccacattttatttactggcacataatctttttaacacaaaagaaacaaggcatgtttgtgcccctacaatcatgttttaagttagttagttcagggaaagacaggactagttggctttgtattattactctgttgtagtttgggagaaactgaaatgaaatcctgtgttattggcaaatcagccaaattgtactattgcctgtcaaaatgctttgcctgccatgtattctcattattagaattcaaatactgtacctccaaattatgtcactgaatcctaacttgccttcagagatgcagttttataaaaggtattgatgtgtagcaaattaccctcaactacagcagtcataaacttagttataacttttttaaagtttgcattactctcgagtgtcctgaattcacttcaggtaatgtgtttaaattacatatatggcagaattattttggactggtaataagttagtaagagcacagactctggagtcacactgctccgcagctatatgacctcggcaagctgtgtaactctgtgccaattttctcacctgttaaaagttttaataataaggccaggcgcagtggctcatgcctgtaatcccagcactttgggaggccgaggcaggcggatcacgaggtcaggagattgagaccatcctggctaacacggtgaaaccccgtctctactaaaaatacaaaaaattagctgggcgtggtggcacgtgcctgtagttgggctgaggcaggagagaggcgtgaacctgggaggcaggacttgaagtaagccgagatggcgccactgcactccagcccaggccgtctcaaaaaaaataaataaataaaaaataaaggtttaataatagtacctattgtctaatgttagattaaatgactaaaagacattattgagtggcacatagtaggcactcagtatatattagctattagattttagatgtttttattttatatctggttctctttcagaattcataatgcactgaaaggaattccagatgaccgagatgggctgtttgacacaatccagcgctctaagaatcactatcaaaaaagagcataccagtgtataaaatgtatggtagctctatttagtaactgtcctgttgcttaccaaatcctgcaggtgaggatttttttcttataattttgtagaaatcttaatcagaattaaggattctgttttaaaagaagagaatcatgagaacttggggttgtcattttaagttaactttgaagtattccaaatcctcttatctatatggttttattttcttttgcagggcaatggagatcttaaaagaaagtggacctgggcagtggaatggcttggagatgaacttgaaagaagaccatatactggcaatcctcagtacacttacaacaattggtctcccccagtgcaaagcaatgaaacgtccaatggttatttcttggagagatcacatagtgctaggatgacacttgcaaaagcttgtgaactctgtccagaggaggtaaaaaaagccaccagtgtgcagcagatagaaatggaagagagcaaagtaattctttattttataggccagtgtttatgtattaatgatattattaaaagattatgttgaagttttgggttttgaaaaatgtttattcggctgggcatggtggctcacgcctgtaatcccaacactttgggaggccgaggcaggcggatcacctgaggtcaggagttcaagaccagcctggccaacaaggtgaaatcccatctccactaaaaatagaaaaattagtcgggcgtggtggcaggcgcctgtaatctcagctacttgggaggctgaggctggagaatgacttgaacccaggaggcacagattgcagtgagcggagatcgtgccagtgggctccagcttgggtgacaagagtgaaactccatctcaaaaaaagaaaagaaaagaatgtttattctatgtcattttaagctaatgaagggagctttcttttggagaaatttctgtgaaattgcctgaaatgtagtagttctgagagaatgcaaatcaggttttttgttttgtttttttttttttgttttttccccaagttctttatctgcagtaaaagaaaagttgctaatgggtcagttttgtagatttttaaaatttatttcaaatagaaaaagttaaaagtaaacttgagtttgcctacgtaattttttatcttgaaatattcaaaattaggagccagatgaccaagatgctccagatgaacatgagtcgcctccacctgaagatgccccattgtacccccattcacctggatctcagtatcaacaggtaaacaggagtcagtttatgcttttatcccctagaactgggttttatgcttaattttagaggatggctcaattgtttgttgtgactacaaagtaagaagtaggattatctagactagctttgggagcatgatccagaagagggatggtttggagtgggggtcatggtgtaacatgtttgaacttaaccactgtagggttttccttgtcaagaaggtgtccttcttgtgctagtagttaataaaactgtatgagaatttatatcaacataaaatgatcattgtttagtgcaaaggattgtggtgacatttccggtgaggtaaaatcttcacctggattccaaaaacattattaagatatggcaatgaagtaagaagtccttggttacttagccacaggtttcagtgatggtaaaaatcactggaaaaaaaaggatttgggtagatttccataggtgattaaagtaaataaactagtaaatagcaaaagaaatgagatgaagaaacattctaaatgataactttttctttctgaaaccaaaatgtgactaaatcagctcttgtgaggcagtggtactcaaacttgcacaggcgtgagtctccctggaagggttgctccagcagagagctagatgctaccctaaagtgtcttatttcataggtcttcaaggggctggaaaatgtacatttctagcaagttcccaagtgatgctgctggtggtccaggaaccatacttggagaaacatttcaggcattctttcttacatttcactgtgtacatagaagcaaactgaatagttaggaagtacacattcagcgtacttattttcatctatagaaagtaaagcctggccaggcgcggtagctcatgcctgtaatcccaacactttggaaggctgaggcaggtggatcacctgaggtcaggagtttgagaccagcctgaccaacatggagaagccctgtctctactaaaaatacaaaattagccgggtatggtggtggcgcatgcctgtaatcccagctactcaggaggctgaggcaagagaatctcttgaacccaggaggcagaggtggtggtgagtcgagatagcaccattgcactccagcctgggcaacaagagcgaaactcccatctcaaaaaaaaaaaaaaaaaagttaagcctaaaatcttggcttggctgatggagcatgtacagaaaaatgagagcactgtagggttcagacattttaaaaggttaaggaaccaaatccacaaggaaggttaacttcctttgaccctgagaaagctcttatgttaatcatgcctggttactttatcatcttgaacattgttctgtttttaatcagcattattgtgagttcagggttactgctcctatatatcttacatcatggttagtcaatcggatttagcatgtggaagagtcaatagatgctcatagatcattctctgaaaattttttaccaagagcaacagtgggttaatcctttatttgccagacttgagtctaaataatttttggcactaaaaatcactttggccaaagatttatgtggacctacacaatcactgctcttattcagggttttggggtttgcatttacactacgtttttcaagcctttttttgtttttgtttttgtttttgtttttgttttgcactatagtagtccaagggtatttacagagtaagtcccaagaataagagtatacatttccagagacttcagaccatgattttgaagttgttttactatgtgaaaagttttaacatacagatcttttctcctttcccagaataaccatgtgcatggacagccatatacaggcccagcagcacatcacatgaacaaccctcagagaactggccaacgagcacaagaaaattatgaaggcagtgaagaagtatccccacctcaaaccaaggatcaatgaaatgcacataattaactggttccatcaagactgtgcacccaggccttacagtccaacctttttctgtgtctggctaatatttaaaactagaaaaactattcctaatcaacatggagtggagagtttattcactgtcttatctgcagaaatttgctgtcaatatataacccgcctgcagtggaaagtgtatagtgttttgtaataaatggcctgatgctaatgtgtaaatggcaaaggtgtatatagtatattaatgttgactgttaattcttaagcaagaaacttttttcttgatgagactcacagatctacacaaactacaaaagttaattttcttgttacacccactgcactctgcaaccagtgttgcctgcctcatggcagttggatcagctcctttacaaaaaagaaaaaaaaaaaaccaacagcaacaaaacagagcccatccatgtcagccacaccaatagtttcatgttaattctttgccactggagtcaattttgctatgagcaatgtaaggctggtaacctttaaattatttggttgatgtggaaaattggtgatgtaacactgtttctagatttttttcattgcctttttattctgatattaggttaatcactttgaagctatagttatgctgtaacatttagcatggcttcacaccaagttagtgtagccaatgaggaaaaagttaccataatgacagcagttgtccgagaagtgacagctgtattactcagagcttttacttcttacacctagaatattaaaatataaaacaaggggagaaatgtgacagtctattttcagttgcacatatgttccttatatataatgtttgacagttcaatctctgggtggaataaagaacacttacgtatcagtaatgggaatttttaaagatttaaaacaaatatgcaaaaatttgctatgccaagatgctggagcataatataagactgtatttggtgtgcttgttttgtttctttggtagagtttattaggtgaatcttctaaaactttccttctgttggatcccagtgacgtggaagtcatcagaaccccacggtacttggagtacctctctgcaccaagatagctggctgattttctgctcagtcacaattttacttgaaagcaagaattgtcctagctccttttccattattccaaaacgtttaacgttcaaagcagggtctcattaaaaaagaaactactggttgatataattgagatattacaatttcagaataaacatttgattaaaaataaggaaatcctcagttcatactgtatttaaaagagaattggtaacttgaatgtgtgtaattttttggaacctgtctaaaaaccaaatacccctgcaaacagatacagcccaccctattctatttaaatattttgctgttttattttatagaaattattttgctgaattcacaaatagaatttgatttaagaagaactttttgtcctgtggtgtgtttttggttttttttttggttactttttttgtcctttttttttttttttaaaagaggactgcatattaaaattcattctgtgcatagcatgcctaggcatgacactgattcaggatttcagtcacatcaagtttttgtgcacagaaagatttgacctttggccctctactgaagattttgagaaatcaggatgttgacactgtaaaagtttcctaacataatcttgtactttttgtatgttttttatatacatgtatatttaatgagcacaagcttggttgtattttttacaattcagttaatagggaaatgttttgtcaaaaggctacacttggaactgaacaaagcagaaacaaaattgagcattgcattattttgtgattaaaaggggcaggtatttaagataa

SEQ ID NO: 3251 - DNA, 32177 bp, Homo sapiens
ttttaatgtgcaccagatgttgcatgggacaccggcctctacttttcttcattactctactctttactgttttgggggtgagactttttaaaatatgcttatcaatgtgattcattctttaagcaagaaacattcagaaatttgtggttttagcttgcattaaagttaggacagtctatatttaataaatgaagtactactttatttcccgcactgtggtagtcatcttctctagttaactctgggtttttaaaaaagtggattttgaggatggacgtgtaaattgatattattctactctgtttccagagcacagcaagagagagagctaaacactcaggcgactactttactcttttaagacaccttcttaattacgcttacaatagtaatattaatgtacccaatgctgaagttcttctcaataatgaaattgattggcttaaaagaattagggtaagttttagttaatactccatttatatgtcattattagtaaatagaatgttttattgatgatttatattttttgagcattttggttaaatggaaaactccaaagattgataaaagggaccaaagaatgtactctgcatcagtggacgttagtaatctgtgattcacaaaatgcatatctagtttagtaaaatgaattgcttacttgacacttgaaatactgatgttcagcttcttttattttagcattttgggcctttttgcaaattctaatttttaaaaaaagtattcttgaattgtttatgtcaaaaatgagtctgatagagcagaactttctaccataacatctgatactttttacttaggcaaaatgatacaagaatttatttctgaagagatttgtagtttttaaccttcaaattagcatttcttctagtagttcataaagccaatttctagaaagttctgaagaaaacaaagttgtttgaatggaaagacttaaggaaattatctcatatccctccagctctgtctcgttctggctcctctctccctctttacctccctttcataagctagacatttgatttcttcccccccccaccccaccccccgcctttggcaggatgatgttaaaagaacaggagaaacgggtattgaagagacgatcttagagggccaccttggagtgacaaaggagttactggcctttcaaacttctgagaaaaaatttcatattggttgtgaaaaaggaggtgctaatctcattaaagtaagttctgtgttcttggttgtaagctacatatcataaccttctaaatgtttataatcaaatttaattaatttatagtagtatcatgtctttgtactttcttgatcttttctcttttttaagaatctttatcaaatttacagtaatttaagaaatacagttatgccttactttattcaagagacatttctaaatttgtatttaaataagatttcatggctggacttgctggcctcatgcctgtaatcccagtactttgggaggccgagtccagtggatggcttgagcccaagagttgaagaccagcctgggcaacatggtgaaaccccttctctacaaaagaaaaaaaaaaaattgccaggtgtggtggcgcacacccatggtccccagctacttgagaggctgagatggaaggatcacctgagcccaggaggtggaggttgcagtgagctgagatcgcaccactgcactccagcctgaaggaacagagcaaggccctgtctcaaaataaatagataaataaataagatactttataaagtaattgttgtttagtttttctctttggaaaatctgaattgttaatttcatttaatgaggcaaacctctgttttgtaagaatgcatcttgtatatctttaatgagttttttcatacatgtagtaacacaaggaaacaaagtttcatttttgtacattttatttctattcaaaatgggtttaatttgctatacacttgattaaaggagcaaacatttaaaataaaaattttgataagtactatattcagttctttcttaatatttacaaatttatttaacctgcgaaattaggtatgttagtgatagtaaatagtgttttgaaggaagatctttttattagaaaatctgagttttctgagatgtaatgagatcttaaattccaatgagtaattttaaaatgatttacttacaagagaactttttttttctaaaaatatatagcattgctaatatgtaatccctttttcaactttttaggaattaattgatgatttcatatttcctgcatccaatgtttacctacagtatatgagaaatggagagcttccagctgaacaggctattccggtctgtggttcaccacctacaattaatgctggttttgaattacttgtagcattagctgttggctgtgtgaggaatctcaaacaaatagtagattctttgactgaaatgtattacattggcacagcaataactagtaagtatttttaatagaatgtgataattgatcatttcaatgtttcaaagttgttttcctgtttttctttcagaaaatatttccaacttacgtatttctttcagtaactagtttaacatttttagtgagtgaatgaacagttaagaccattataggccgggcacggtggctcaggcctgtaatcccagcactttgggaggccaaggtgggtggatcacctgaggtcaggagtttgagaccagcctgaccatggtgaaaccctgtctctacaaaaaatacaaaaattagctgggcattgtggtgcacacctgtaatcccagctactcaggaggctgagacaggagaattgcttgaacccaggaggtggaggttgcagtgagccgagatcgcgccactgcactccatcctgggtgacagagcaagactccatctcagaaaaaaaagaaaagaaaagaaaagaaaaaagaaaaataagaccattataagcagaccaccttgtatagaaaaaaattcaaacatttgttaagtggcatcctataagtggtgtcgccatttggcaagataaatttcatctcatgaaacctgtcataaaattcaaactccagattaaaaggtagccaaagtaaatgccgtagagtatagacgtaaaactttattttatttatttatttttttgagacggagtttcactcttgttgcccaggctggagtgcagtggcgcgatctcggctcactgcaacctctcgggttcaagtgattctcctgcctcagcctcccaagtagctgggcttacaggcgcctgccaccatgcctggctaattttgtattgccaccatgcctggctaatattgtatttttagtagagatagggtttcaccatgttggccaggctagtcttgaactcctggcctcaggtgatccacctgcctcggcctcccaaagtgctggaattacaggtgtgagccaccgcacctggcccagacttaaaactttaagttgcatgtattggaaaacctttcaggtcttcacttagaagttccgtaacgttatgagttcgaagaaaatctggctttgaagattagaacgtgagaagttaccattttggtgcaccttatttatgttctcatttaatgcccacaccaggcgcatgaataggctgcagatttcagaccttacagataaggaattgaagctcaaaagggcaagggcaatataaaatattaataacagaaaaagcagaaataagcataattgatgctgttttaagagaaaatcgctatttagaacacttaagaatataattgattatagtaaatctttaagaacatgtcaaattactttttgatgtgtttcagaatgtttggaagttttaaataacatctcaggaatttctgaataaattgattgcttaaaaggttagacctttagctgtcctatcaaatctatgtattgtgagaattcttgtattttttttttaacttaatgggggttaattttttaatcacagattggagtatagtacaacgttgtttgcatccttccctatctgccattgttccctgtcaacacagaaatatttacctaattccatttttggccatgcagtttggtatgatataattaactggccccctagacaatgatacttaatgttgtttccaggtttatactaggtggagggagataggaagatgtacagtgatttacaattatcacaaatctgctgtcttgcttgctcctcaaaatagcattatagatatcaggaaagcaagtgttacttttattattacatttactaggaagaaacagaaagttacctaaaggtgggggaaaaaaagtggtaagcatcagaaccaggatgtgagcccatgtggttttaggattatttaaaactgagaaaattataatgtgttgatatatttagataacatttcattccttgccaaatttgaaggcaaaagtatcaaatattaagaaagtgaataatggctaaaaataaagatgcaagtaaagttagcatgtagacattagaattatactatcttgtacttttgagactgccatagaagcaacatcatatgaaacgggtttgcgggtgattggataagaagctgcacagtggtgcctgttgctgtatattttagattgttggaagatgaagtgcaaactcagaacactgcttcaggttgctgtagggttagtcgaattatgggtggtagaattattgccagggttgctttgtcagcataatagagtttgaaaggacagaatggccgtgttcatgctacaagaatctttccttctctcagcttgtgaagcacttactgagtgggaatatctgccacctgttggaccccgcccacccaaaggattcgtggggctgaaaaatgccggtgctacttgttacatgaattctgtgattcagcaactctacatgattccttccattaggaacggtattcttgccattgaaggcacaggtagtgatgtagatgatgatatgtctggggatgagaagcaggacaatgaggtaaatttgagttaccatttctgttttctgtgtttcaagttatgataccagatactattctctcttaagagagtgttatactttcatcaaacgtattaaagtatatttgaaagttagggatgggccgagcacacacctgtggtctcagctactcaggaaactgaggcaggaggattgcttgagcctgggagctggaggctgcagtgagccatgatcatgccactgcactccagcctgggttacagagtgagaccctgtctcagaagaaaaagaaaaagtaagtagggatggacttctcccagccagcatgaactgctacctcttaacatagtatagttctcactacctaccagaatttaaactgcagataatttttagaatggtttgtacatttctaaagcaacagttggctgggcatggtagctcacacctataatctcagcactttgggaagctgaggcaggtggatcacctgaggtcaggagttcaagaccagcctggccaacatagtgaaaccccatgtctactaaaaatacaaaaattagctgggtgtggtggcacatgcctgtagtcctagctactcggaaggctgaggcaggagaatcacttgaacccggaaggtggaggttgcgatgagctgagatggcaccagtgcactccagcctaggtgacagagcgagactccgtctcaaaaaaaaaaagcaacagttaatgtactcgtgtttttttgtgtagagtgtttagtataatttggggtttgtttgatggtaagaaccttcatttttgataatagttttaaatttttacttttctatttctaaattttaattttctattttatgccaagttatacagtatctgccaatttcactgtgtgtgcttacttttaggttattctttgaatttcccttagatcatagctcttcttgattaggaaacaaactttccctactttaaatagtctcacgtagtcttgtggcaaaatttaggctgcctactgagtatccagtgcagtataaagcagtgaagaagttgagttgtagtggcgaatcagaattgacataactgtaagatagctctttaaagaagagcatatggcaagaagacttaagttgtggtcatgtttgtgcttaccatgtaatatttccttggttttacttttcctgtttatagtgatagtgggaactgaagagagaagccagagtatattctaattgtagtaaatggttcttttcattccctcccttcagttgccagaactgattttgctctgaagaagtagtttatcaattggagcttctgaaacatctacttgcctcaactcttccctagacctgctgtgccagatggtctagggattgggttctgagcactttcactttataaaaaaaagcttcataaaggacacttatacccatacctgattaaaaaccactgctctgggaaaaaaatgtaattcaaattccagttctggagcccatcatatacctgggatattgagttaaacacaagtagatataggtaattgtactggcaagaagtaaatgaggcatagaaaatataacacaatttcaaataaggtgtaccacttttactctcatggtatcctctgctccatgttgtctctgcaccccagtgtactgtgggagtttttgtggggttttttgggttttggtttttttggcttatgtttttgtttccatccctagagtataagtttctcatgggcagggactggttgttgtctatttctatatcagagttatcagatacaactcagagaatactgaaagatagttaaatgtaaaaacacattcttctttgtagctgccatatgattatgacctttaggaattctgtcttcatgttacatcttacaccactacttctgttgttttttaaaattgtggtaaaatacatataacatgaaacttaccatctgtttttaaatgtgcagttgtcctattaaatacatttacattgttgtacaccatcaccaccacccatctccaaaactcttcatattgcaaaactcaaactgtagtcattaagctactccccattctccctccccacagcctctggcaactactattctttttgtctctatgattgactactctacatacctcatataagtgattatataagtgaaatcatacagtgtttgcctttgcatagctggcttatttcattttaaagtctaagtaatattccattatatgtatataccacattttccttatccattcatttgtcgatggacatttgggttgcttccccatttgagctattgtgaataaggctgccatgaacatggatatacaaatagctgtttgaggtcctgctttcaatatttccaggcatatgctcagaagtggaagtactagatcatttggtgatgctatttttattttattatttattatttttttcagacagagtctcactctgtcacacaggctggagtgcagtggtgctatctcagctcactgcaacctctgcctcctgggttcaagcgattctcctgcctcagcctcccgagtagctgggactacaggcacgcaccaccataccccgctaatttttgtatttttagtagagatgggatttcaccatattggccaggctggtctcgaactcctgatttcaggtgatccacccaccttggcctcccaaagtgctgggattataggcatgagccaccatatgcggccaaattttttgaggaactgttttctagagtgactgcaccattttacattcctaccagcattgcacaagagctccaatttctccatatccttgccaacacttgttatactcactcgttctggtagttgacaccctaattgagtgtgaggtagtatctcatggttttgatttgcatttaccaaatggttaacgattttgagcatctttagctgtgcttattattggccacttgttgatcttctttgtctatttttaaattgagttgtgttgttgagttttaagagttctctgtatgttctagatattaactccatatcagatatgtgatttgcagatactttcttttgttgcctgtacctctgatgtcatatccaagaaatcactgccaaatccagtgtcttgaagcttttgccctatgttttttttttttttttaacagttctgtggttttagctcttacatttaggattttgatccattttgagttaatttttgtatgtagtgtttcataagggctcaactttattcttttgcatgtggattatccagtttacccagcaccatttgtggaagagtactagtcatgcaccacataacaacgtttcagacaattacagaccatatatatgacagtagtccaatgagattataatgtcgtatttttactgtaccttttctatttttagatgcacagattcaccgttggtttgcagttgtctacagtatgtagtacagtaacatgctgtacaagtttacaacctaggagcaattggctataccatctaggtttataggtacactatgatgttcacatgacaaaatacctaatgatgcatttctcagaatttatccctgtcattaagcaaagaatgactatactgatataggtatattttattgacagatctgagcattttatatacaacagctacacaaaggatatattacccccattcacacataaagaaacttgaagcctagaaagtttaagtagtttttacttgctcaaagttacttggtttataagtggtagagcctgcatttatgtctagttcagtctaaattactatgctaatgctacactatattatctatctttcttacacatggtcagggttatttggttatgataactaatatgtgaaatggtggggataaacactaaataactaaaaatttataaattgaaaagtgctttggaaatgagcataataggaatacaaatcatttgttcaataactgcttggcatttgtctcaacgtattttattatactttagctcattggtgacattttttggtttctagagcaatgttgatcccagggatgatgtatttggatatcctcaacaatttgaagataaaccagcattaagtaaaactgaagatagaaaagagtacaacattggtgtcctaagacaccttcaggtcatctttggtcatttagctgcttctcgactgcaatactatgtgcccagaggattttggaaacagttcaggtaaactatggatggacagtaatagagatacttcttaaaatgaacatctcaatacactaacattaaacctctaaaagacatgttggaaggcatctttttttaagcactggtaatattcaaactgtccttaattgggtgggtttttttttttttttttaggtccccttaggaagaagtagaaactgccatagtaagtaagggcaacatcctttagtctcttaaccatattattaactttttattaggaaaacatctaataaatacagaagtagaaaaaatagtatgaacccctgtatacttgtcacccaacttcagtagtagtcaacttgtggccagcctcatttaatctatattcttaacctattttttttttctttttttctttttctttttctttttttcttttttttttttgagatggagttttgctcttgttgcccaggctggagtgcagtggtgtgatcttggctcactgcaacatccgcctcccagattcaagtgattctcctgcctcagcctcccaagtagctgggattacaggcacccaccaccacgcctagctgattttttgtatttttagtggagacggggttttaccatgttggcccagactggtctcgaactcctgacctcaggtgattcccatctcagcctcccaaagtgctgggattacaggcgtgagccactgtgcccggcccctacctatttctttctagattgttttgaagcaaatcttagttccatctgtaaatacttaagtatgtgtctgtagtgtctgtctcaaaacatgatcatgataccattatgtttttttaaaattgcttaatatcaaatatctctgtcagtgtttgaatttaccgagttatctcataactggtttttactgatattttttaaaaataagattcagttgaggtccatttaccacaaatggttggtaatgatcttgattattcatctgtttcttttttccctttacaattatgggggaatcggaggacaaatagtttagcatgtaaattttcccacagtctgaattttgttgatggaatccctgtggtcgtttattattttctgtttttcttggtcacctgcatcttctataaacaccttatgagatctagaggcttgatcagattgtggtattatttttctttttgtggaatggataggcaacgctacttcataggggataatgtttatctccatgaggagtgacattataatgtctgtcttcttatgatgttaacagcaattttttattattattattatatatatacaatttttttttttcccctgagatggagtctttgctctgtcgcccaggctagagtacagtggcgtgatctcagctcactgcaacctccgcctcctgggttcaagcaattctgcctcagcctcctgagtagctagggttaacaggggttacaggcgtgggccaaccatgcccggccaagttttgtatttttagtagagacggggtttcaccatgttggccagtctggtctcgaactcctgacctcaggtgatctgcctgcctcccaaagtgctggattataggcatgagctactgctccctggccttttttttttttttttttttttttttggagatagagtcttgctctgttgcccaggctgaagtgcaatggctcgatctcagctcactgcaacctctgcctcccaggttcaagcaattcttcagcctcagcctctcaagtagctaggacgacaggcccaccacaccccgctaattttttgtagttttagtagagatagggtttcgccgtgttggccaggctggtctcaaattcctgacgtcaggtgatccacccgcctcggcctcccaaagtgctgggattacaggcgtgagccactgcacctggccaattatcattatcttaatacagtatttcttcagggttataaaataacaatattttattttttcatttaatagctagaaaagatctataaagggaaaattgccctcaccattttctttttaagttagaaaactcagattacatttttatcttgtttcctttgactttaagtcagtactacgtcatgcactgtgctaaaataactacagtacaaccacgtaactcttactgtgtatgaaaaggggtataattctttatagcagtgaggtttggtttgttttgttttgtaagtaatcctccttggaatcccttcaaggtgcttcccggccagctgagaggagcggggaacgaagggtcacctgatactctgatccgccttcccttcttctgacaaagcagtataaatttcttttcctcccctaactaggccctctacttactctgtactagtgtcttgcgtggaccaccctccctcccatctctcattttgcttttagtcccgtcacccagcataccattctccctcctctctgactatttcagttctgtcttctttccctaggttattccaattccatctctgccttaaggctattttagcatttctgtttatgctcttccaaactgaagaacacaaacagaggcttatactgggttttttttttttttgagacagagtctcactctgtggcccaggctagagtgcagtggtgtgatctcggctcacggtaacctctgcccgctgggttcaagcaattctcctgtcttggtagctgggattacaggcgcctgccaccatgcccagctaatttttgtatttttagtagagactgggtttcaccatattcatcaggctggtcttgaactcctgacttcaggtgatccacccgcctcagcctcccaaagtgctgggattacaggcgagagccactgcgcccagctgaggcttacactttttaaactttcgtcttgtcattcagttacaattttttctcttgtaatgcctttgcttttttgacttttcagttactcgctgtgctagtggagctcggtttgtatagactagcactttggattatccacactttagacacataatctactcttgacacaagcgggttagttaactacacttcctcaccccactcttttattttgaaaagtttcaaacctacagaaaagatgaagaagaggtataattatcacctttatgttatattctttatgcggttttactaattaacattttgccatatttgcttatcttgccatatgtgtgcttggtttttggtttattttttttttaagttttgtttgtttgtttgtttgttttttgtttttttgagatggagtctcgctctgtcgcccaggctggagtgcagtggcgtgatctcggctcactgcaagctccccttcctgggttcacaccattctcctgcctcagcctcccgagtagctgggactacaggcgcctgccaccaatgcccagctaattttttgtatttttagtagagacagagtttcattgtgttagccagggtggtctcgaactcctgacctcgtgatccacccggctcggcctcccaaaatgctaggattacaggcgtgagccaccgcgcccggccttttttcttaagttgatagtgaagttgcaaacaggacgcttcaccccttcatacttcaacatatatcttataagagatcatatatcagaataaggcaattttcctacttatgtatgatacagttatatccaagtaatataataacgatttttaatctctaatattcatcagtatatattccgatttcccaaaagtggtctttataacttatctctctatcccaatctgatactcatgaaggaatcacaaggatttggctgttagctctttagttgccttttatgtaaaataatctccctaacttgtgacttgtatcgcactgaaatttttaaagaatccaggccagttgtcttgcagaatgtgttttttgatttgtgtgattgtttcctgatgattagctttatgttaaatgttgagggggtgggggcaataaaactacataattgatgttttgtgtttctcactgcactgtattgggaggcatgtgttatccacttaattattaagtgatattaattttgatttcttggtgtcttaacagatctctcctttataaagggtaccttttcccttttgaaattagttgattacatgtttgaaagtttgaggagttgaatatggtttgaaagtaaatagaacggactggtgtaatttccagtaatgaaacaagctgatttttaacaaataatatatttgattttaaacttactgtatacaaatttttacttgtgtaaaatataatagagatcagattatttgctatgtagaaaaggtttttacaaaagtataaacagacagttcttgcatactttaaaatgtcatttcttgcttagaacaaatacacttaaattctctatatacattattctgtatatacaaaatcaggtattattgatagtttccagcagtgcctgagttttagcagtatgagttctcatttttgtggtatgtagtgatggtgtcttttcttagattactcaagagattaactctagaacaagttaaacctttctctcttcacttgggaaaaaaataaatttaagagtaactagatctgatctttttactatttataatccaaaatttaagcaaaatgaaagaaataaaatagtgattgtaacatccacataagagtgagatccaccacctcatcttaatagtatctttaattggattcaaaatgcatgcatgtgtcataccacctgaagcaaccatccttcctggagccgtactatccatcaattacaccactagttttgtggcagttctttgccgctagagtactagttttactatgaggctcactctcttaccccactacattctacagggaaagcacattctttttttcctactttttccatgtaattgaggaataaaatctcggttttatatactgttgtttgtggtcttgttgcttttttttcccctgaaaaatatagttgtacatattgttctgtgaatgttacatgttacatgttttatttcattcatttcttaggctttggggtgagcctgttaatctgcgtgaacaacacgatgctttagaattttttaattcattggtggatagtttagatgaagctttaaaagctttaggacatccagctatgctaagtaaagtcttaggaggttcctttgctgatcagaagatctgccaaggctgcccacataggtaagtactaattacacattgaaagtatatgttgtaccatgtatatactaacagaaataaaatttttactagtacttacatacaaaagtggagtatatcactgattactaaatacctgaaacagaatgatttatatactttgcataccttactgctgtggggcttttttttgtttttgtcagttaacttttagttccttctactctgcctgatctcttagccattttattatattatactcttacagtctctttcttcctttcctttcctttcctttctcctttttcttttcctttctctttttttttctttctttcttttttgaaagagacaaggtttctctttgttgcctaggctggagttcagtggcatggtcgtaactcatagtaactttgaacttgtgggctcaagcaatcctgctgcctcagcctctcaaatagctgggactacaggcatgtgccaccacacctggctaatttgtaaatttttttagagatcgaatctcttgttgcccaagctggtctcaaaactgctgacctcaaaatcagtcgtcacacctcaacttcccaaagtgttgagatgacaggcgtgagccactgcgcctggcctactcttacattcttttacagaagattattcctgaggaaataaaatggcattttgcatatagctacaggtgttatttataaatttgccctttatcttagaacttgagtgattataatagtgtaaatacagtaagtttagaagatgacaaagctatggtagtatttcctatacaaatgaaataatgacttttaaaatagcattgattattgtcattatctttaaggtatatttgtatacaaaacatatcaaacctattgtaaaaaaagattttacccccgtccgggaggtgaggggtgcctctgcccggctgcccctactgggaagtgaggagcccctctgcccggccagccgccccgtccgggaaggaggtgatggggtcagccccccacccggccagccgccccgtccgggagggaggtaggggggtcagccccccgcccagccagctgccccatccgggaggtgaggggtgcctctgcccggccgcccctactgggaagtgaggagcccctctgcccggacagccgccccgtccgggagggaggtgggggggtcagccccccgcccggccagccgccccatccgggaggtgaggggtgcctctgcccggccgcccctactgggaagtgaggagcccctctgcccggccaccaccccgtctgggaggtgtactcaacagctcattgagaacaggccatgatgacaatggcggttttgtggaatagaaaggggggaaaggtggggaaaagattgagaaatcggatggttgccgtgtctgtgtagaaagaggtagacatgggagacttttcattttgttctgtactaagaaaaattcttctgccttaggatcctgttgatctgtgaccttacccccaaccctgtgctctctgaaacatgtgctgtgtccactcagggttgaatggattaagggtggtgcaagatgtgctttgttaaacagatgcttgaaggcagcatgctcgttaagagtcatcgccactccctaatctcaagtacccagggacacaaacactgcggaaggccgcagggtcctctgcctaggaaaaccagagacctttgttcacttgtttatctgctgaccttccctccactattgtcctatgaccctgccaaatccccctctgcaagaaacacccaagaatgatcaattaaaaaaaaaaaaaaaagcctaaaaaaataaaaataaaaaaagattttacaagaaaaacattgacaaaacaaattgtttgacttgaaaattgattaagggcttctattagaaatagttaatgagttcattactgataaatatacatgcctgtcatatggaagttttactttgggacttgttataatatggattaatgttgatttgcaatcgtttttcaccaaaatgtcacagtaagatagtattttctacaatccaaactgtattaaatatagtcatgggttgagtacacatgtggtttgtgggggtgttttgtttttgattaccaggaaatgattgggtgagaggtaatactatataaatgagaaatttctagcaagttatagtcttaccactcattcataattagggaatatacttattcacttagcctaggcaacttttagtccttttgaaaggccttttatattaggtgaacaataaaataaaattttaaccttgtttttaattagtgataaaaacagccaactttggggtcatttgttcatgttactcctccttagttttagacaattttctaaattatttggaaatcactggttttctttggcaagtgaaatgtcaaaagattatggtcttgaaatcagatccttatacctgatcaacagctaaactagtcttatttttttaactagctgggcatgggggtggactcctgtagtcccagctgcttgggaggctgagtcaggaggatcgcttgagcccaggagttagaagttccagtgaactgtgatcatgccactacattccagcctgggtgacagagtgagacctcacctcattaaaaacaaaaaagaaagaaactctactttgagtgcccatacaaccattctgtttttcactctcagtacagtattcattgaattacatgaatctttgtgttacaagattttgcccaactgtaggctaatataagtgttctgaacacatttagggtaagctaggctaaagctatgatgtttggtaggttgggtgtattaaatgcattttcagcttatgatattttcaatttatgatgggtttattgggctgtagccatttcataagcaaagagcgtccgtacttgctgcagagaccatatgcttcacaaagcctaagataaatttactatctggccctttacagaaagactttgctgtcctctaatgttagaacaccttctttttatagatgttgaagaatatcctacttttgaagtgtagtctaagatctaacttttttccctctatgggctgttccctgattatatagtaaaaatttgcttaatacctgctttatattccattcatataatttataaatgcctttgtgtaccttttttccggagtttaaaattccttaaataagggactatcttaaacagtgaatatccctcagtacttttacacatagaaagcactctcagtctatccattggatgaattaatggttaataatgtattcctcacatcccttgttttgcatttatgcatgtgtctcaccagaaattggaaagtctctttggtagaaaatgaccataaactgggattctagctccttctcaggttgctaatcctgtactcatttgtgtgtgcaaacttttgctttactaaggcttccattacagaaaaggaagaatatataaaaatttagcttattcgtagtttatcattttcagaacttaataaattcatgctttggcttcagcatgaattactatctaaacagataacactagaagcagcatcgtatactacaaagagattaagctgtgagcccagacagattcaactttaaaataccatttcacctaataatcttgatcaagttaacttttttattgctaacattctatgacttacgggtttcgcattataaaaatggcaaatgtatgggtgcagcaaaccaacatggcacatgtatacatatgtaacaaacctgcacgttgtggacatgtaccctagaacttaaagtataatttaaaaaaaaaaggcaaatgtagtttacattaagtccataactaaaatgtttacaaaactaagggataaatcctttttttaaatcgtttttaggtacgaatgtgaagaatcttttacgaccctaaacgtagacattagaaatcaccaaaatcttcttgattctttggaacagtatgtcaaaggagatttactagaaggtgcaaatgcatatcattgtgaaaaatgcaataaaaaggtacgggctgtccagttttgtttaattttgattacatttaatggatttagaagaaattggtttttttggttcatcctcacaagtcaccctatttttattttctcctactttggtatagtggtagcagagaagtagtcaatatgataactaatagaaggtttggcaaggaaggaaaaaaagtagtgccaaaggggctaggtaaataagataaaaataggtaaataagagtgaataattttaaaagtcataacgtgatagcacattctcttatataagttacacagacactttccatctctaccgagaaacaaattgccattgaacccctcaaagatacagagctgatagaggaaaacatttctcctgtcatgtccaggattacttgtcaagaccaaaacatttgctgaaaccattaattactttattgaaccacataagatttcttttagactagtcaagtggcccataagatttcttttatcacctatgttataaaaccatttattttggaaacttattagcagttctttgagagagatgattcacacgcattatagtaatgaataaggtgtatctttgggagctcccaaaccctttcaccctcaagtcacttgtgttgttttggccttatgcaccacttagagaagtcctgaagtttaaagattgagattgtgggctgtaaagccatactgcctgccacctgcagctcctgagacctgaggcaagttacttgacctctctgtgattactagttttcatcttttaaggttcagtagtacacacttgagaaggttgtaaggattcggtatgtttttacttgtgcggcacttagtatatattacctggcatctgaattacccaacaaatattagctactcttattgttattgtagttctttggtttgtgcataggaaaccaccttcgtgggaacaacagtaaacatcaaacaggtaataatggctagataacaatgacagaaaccagtcaacaatttaccatttgcatattattaatttcagcatttaaatcagctgataggattatcttgattatgctcattgtcatgtatttgtttatacttaaaaattcagataagtcttaatatcatttaaaagtttgcttggggtttttttttttttcctgtggattttaatagaacatctggtaactttgtcttgtttattttaggttgataccgtaaagcgcttgctgattaaaaaattacctcctgttcttgctatacaactaaagcgatttgactatgactgggaaagagaatgtgcaatcaagttcaatgattattttgaatttcctcgagagctggacatggaaccttacacagttgcaggtgtcgcaaagctggaaggggataatgtaaacccagagagtcagttgatacaacagagtgagcagtctgaaagtgagacagcaggaagcacaaaatacagacttgtgggtgtgctcgtacacagtggtcaagcgagtggggggcattattattcttacatcatccaaaggaatggtggagatggtgagagaaatcgctggtataaatttgatgatggtgatgtaacagaatgtaaaatggatgatgacgaagaaatgaaaaaccagtgttttggtggagagtacatgggagaagtgtttgatcacatgatgaagcgtatgtcatacaggcgccagaaaaggtggtggaatgcttatatacttttttatgaacgaatggacacaatagaccaagatgatgagttgataagatatatatcagagcttgctatcaccaccagacctcatcagattattatgccatcagccattgagagaagtgtacggaaacagaacgtacaattcatgcataaccgaatgcagtacagtatggagtattttcagtttatgaaaaaactgcttacatgtaatggcgtttacttaaaccctcctcccggtgagtatcaagagagtttagcttcttagtaataaagaataatttatagtaggcgtcaacatgtttaagttcataaaattaatgttttcactttaaatgagtctaatttgctgggtgtggtggttcacgcctgtaatcccagcactttgggaggccgaggtaggtggatcacctgaggtcaagagttcaataccagcctgaccaacatggtgaaaccccatctctactaaaaatataaaaattagccaggcatggtggcatgcacctgtagtcccagctactccctgtagtcccagctactccggaggctgaggcaggagaatcgcttgaacctgggaggtggaggttgcagtgacccaaattgatggccactgcactccagcctgggtgacagtgagtctccatctcaaaaaaataaaataaaaaaataaatgggtctaaattaaagtagcctgagaagggttcttaacaaatttaggacttctcaaaattaatggaaacacagacttgtttgaaaatggggttggaaaataaaaatgtgtttttatatctgcattttatttatagggcaagatcacctgttgcctgaagcagaagaaatcactatgatcagtattcaacttgctgctaggttcctctttactacaggatttcacacaaagaaagtagtccgtggctctgccagtgattggtacattgctttggattttcattcctattatactaatgtttggtttgcttctttaatagattgctttatgtttttctaaaccaagagaattttgtttgaagtttggaatatagaataaaaactctgggtcacaatagagaaatcatattaaaatagttacttagtctaaacatggccttttgttattcagaagctgacttctgcttctattaccttgtatcatatctttgacatccctgcaccaaagactacaagctgagactgggggacagtgactcacacctgtaatgccagcactttgggaagccagggtgggaggattgcttgagctcgggagttcaggaccagcctaggcaacatagtgagacccccatctcttcaaagaagattttaaaaattacccaagtatggtggcgcacacctgtaatcccagctactcggaaggctgaggtgggaggatcgctggagcctgggaggttgaagctgcagtgagccatgactgtgccactgcactccagcctgggcagcagagcaagaccctgtctcaaacaaaaccaaagattacaagatgagactgaaaagtgtaagctacttatgaaatttattaggttttagcttacctagattgaattctgacaccgattaaaagggtaaaaaattaaaatggttttcttaagtttctaattgtgaaagtatagaggccattatgatacattgatttaataatttttacttactcatttcaggaatatgtcaagataagggggtggtattttgtcattgaatctaggaagagtttgttaatggatttttagaggacaagctttcacctgtttggtaactctgagagaatagaccaagtcatagtatttatctattgttttaatattagaagcaacctttgctggttctctccagcagtagaggaagatctttgtcttttttttttggttcaatgagactcatccttttactatagagaacaagttattgacttaatagtcataggtttttttgttttattttaggtatgatgcattgtgtattctccttcgtcacagcaagaatgtacgtttttggtttgctcataacgtcctttttaatgtttcaaatcgcttctccgaataccttctggagtgccctagtgcagaagtgaggggtgcgtttgcaaaacttatagtctttattgcacatttttccttgcaagatgggccatgtccttcaccttttgcctctcctggaccttctagtcaggtaattgcacagctttctttctaaatgatgagatgtttacaaataaattgtgtttcctggaagtcgaagtcacaagcatatgtgcatccacttgatatgtttacctaacagaaacacacaatatgatgtcagtgagttccatttaatattactgcatggcaatgaatagtaattattggctctttaaaaatgtaagagaattttctctgttcggttacatgcagtagcttaattataagtttactgttaagtagattttttcctattttgaaggttttttaaatagtcttagatttttttaaaaaattacaagtgtaaaaaattataatgaaatccgcctctgatcttcattccctttcccaagaagcaaaatagtttagtttgtgtgatcagtccttccataaatgtatgcctgtatcagcatatgtgcatgtcctttttatgcaagtagaagtatacatataccttgttgctgtaaaacaggtaatgttttatcctttacaggcttatgacaacttaagcttgagtgatcacttactaagagcagtactaaatctcttgagaagggaagtttcagagcatgggcgtcatttacagcagtatttcaacctgtttgtaatgtatgccaatttaggtaagaatttaagtttttcagaattctgttttgatgtatcatattaaattgtgaagtcatttaggtcaagtgatgaaatataatctgatctgaagtagaaacaatttcccataaaacctgttgtgaattttatctgaacatggcactttcaccttttactttgtttatgcatgtgtctttgtggtagacacaggtcagaatctgtgttttgatttttttttttttttaatctcctaatgcagtggtgccaaatctggctgcttttggaaaatactggtttctaggcctcttctcacactgattgaatcagcatccccaaagctaatgtcagggaatccatgttttcaaaggggtccccaaatggttgtgatactcaccaaatttagatagcagacttggtctgtacataagtttttgtttaagtaaactacaattatggataatataaatactcgcttaaaatattaatttaggggccgggcacaatggcttatgcctgtactcccagcactttgggaggccaaggcaagaggattgcttgagcccaggagactaacctaggcaccatagggagaccctatctctacaaaataaaattttaaaattagctggatgtagtggcatatgcctgtagtcctagctacttgggaggctgaggtgggagaatcacttgagctaaggaggttgaggctgcagtgacccgtgattgcaccactgcactccagcctgggcaacagaatgagaccctgtctccaaaaagcaaacaaaccaaaaagtcatatatccaaaatgaagttctatatccaggcgtacctgtcgtttcaggttttttttctgtgatcttacttaatcaccattggatccatggcccttttaacataagggagattgtacttttcatttgtctatttagtttgtcttcttttcccttgtcttttccgtaattgcagatatttgggtatttgtagatgagaaagagaatatttattacacagacaagcataagtggaatctgtatttcaaacttaaaaatgccaaatttagacattcagaagaatcctattctgttcaactcttttagatattgcctgttcacaaagcacacatcattgttccataatgtaacctacttgtaaaattttcctgctgaaaacaaatactgtagggcctgtaaaccttaatatgaagtccttaagatcagatatgcattgggattgagaattgtttggatttaagaaaagcaaggcagtgcatataccaacatctctatagcagggtctgagacaacaacttacaattgaacacattaatatttctacagtaaaatatgaatatttatactgaagggagaaataaagactataagtagcctttagtcagtttgggctaggttatcccaccaaccacattttgacagcaacttaatgaaaaactttgttgggctgggcgaggtggctcatgcctgtaatcccagcactttgggaggccgaggcaggcggatcacctgaggtatggagttcaagaccagcctggcaaacatggcgaaaccccatctctacttaaaaatacaaaaattagcagggcgtggtggcgggcatctgtagtcccagctattcgggaggctgaggcttgaatctgggaggcagaggttgcaatgagccaagatcgcgccactgcactccagcctgggcaacagggcaagactccgtctcaaaaaaaaaaaaaaaacttgttataataatagcttttgggccaggcgcggtggctcacgtctgtaatcccagcactttgggaggccgaggcaggcagatcacaaggtcaggagttcaagaccagcctgaccaacatggtgaaaccccgtctctactaaatatacaaaaattagccgggcgtggtggcacatgcgtgtaatcccagctactcaggaggctgaggcagaagaatcgcttgaacccagaaggcggaggttgcagtgagctgagatcacaccactgcactccagcctgggagacaaagcgagactccatcttaaaaaaaattaaaaattaaaatagcttttggaatcttaggatttcagataagaggttgtggacctgtttttattatgtttttgggaatatggcaataaataagattgtctaatgggatatagaagcaaataatgtagttgccataaaatatgttaatagctataatagggaaaatgcaaagtgcatcacggggggcatggtacctgaagggatttggggagtgcagaagacttaatggggaatgtaacgtgggaattggttagttgagctttccatctagagtgtgaacagcagatgcaaagacttgataaacttggcgtggcttattggatgggatgaaaattgtccagtctgactagaattgatgtaagatgggaatggcaggagtttctgatcatgcagttctaataggccttgtgagagagactgaggcattggatgagccattgtagggttttgaacagataataccatctagaaagagcactgtggccacagtgtggaatgtattgcagtggagtaagatcccagagagtgttaaaatgatctatagacataagatcattgtgacctgtactggagaactggcagtgagggagatacaagtggacagatagatatatggtgctttttataagaagtggaatcagtggatttggtgatgggatattcagagaaggaggggacagggaagagatgtgaagaatgatgcccaaaattctaacatgaacaactgtgagtggatagtggtaccatttactgaggggaaacacaggaggagaaacatgtatgtatgggaagaaaggggtgagttcagtttgggtagattgagtttgagcctgtgtgacacccaaatggagatatacagtagaacagtaagtaatttgtcttgaaatgtttttgaatcatctgaatgaagatatctagaacattaaagccgtgagcgtgggctagatcatccagggaaatcagtgtgagaagatagcctggcatgggaacttggagaaacatcagtttttaagagacaaggaggagtcgcaaataagaacaaaaagaggtagaaagaaaatcaggaatccagggaggaagaagtggttatggtttgagaactgctccttagcttattactgtgaagaggggccaaaaccaaattggcatgagttgaggaatagaaaatgagaaagtagagagaccaaatgtaggtatctttttcaagaagtttggctgtagaggaaagaagagaggcaggcaatttataaaagagtttttgcttctcatttaatgtagttattttgttgttttcatcctccttacaaatgagggttgcagtgttggttagtccctttagactctccaggctgtagaaagtgttcgtcttctggtcgggcgtggtggctcataatcccagcactgtggaaggccaaggcgggcagatcatgaggtcaagatatcgagaccacccaggccaacatggtgaaaccccgtctctactaaaaatacaaaaattagctgggcatggtacgtgcctgtagtccagctactggggaggctcaggcaggagaattgcttgaacccgggaggcagaggttgcagtgagctgagatcatgctactgcactccatcctggcgagagagcgagactgtctcaaaaaagaaagaaagtgttcatcttccttacagtgagccggtgtgattggaatgtcatagtcatagtcactgttgaacaatgttaatacttatactcaatgggtgagttttcttttctagtaaaataattctctgaatgctaagtaaaagtgataaaattacaaatcaaaatttttctgatcataaaaattatagacaagatattttgtataactacttgttttattcatgaagcccttgccatcttaattttttcctcatatttttctccctctctttcttctccccttcactcctttttgttgtaggtgtggcagagaagacacagcttctgaaattgagtgtacctgctacttttatgcttgtgtctttagatgaaggtccaggtcctccaatcaaataccagtatgctgaattaggcaaattatactcagtagtgtcacagctgatccgctgttgcaatgtctcttcaagaatgcagtcttcaatcaatggtaaatttgaatgctccattctttacactagttttgtttgtttgtttgttttgagacagagttttgctgttgttgcccaggctggagtgcaatggcgtgatctcggctcactgtaacctccgcctccctggtttaagccattctcctgcctcagcctcccaagtagctgggattacaggtgcccaccaccacgcccggctaattttgtatttttagcagagacggggtttcgccatgttggtcatgctggtctcgaactcctgacctcaggtgatctgccgtcctcggcctcccaaagtgctgggattacaggtgtgagccaccatgcccagccctctttacggtagtttttaaatgctgctgggcatatatagtactaagagtctggaggaagatttttgctttggaatattttagccctgtaccttttttacgtgtttaatgggggtcttttttctgtctccttgtgactgaggttgataccatgtttatgaaatagtttaagaattaactttttaggctgggctcagtggctcatgcctgtaatccctatgctttgggggaggccaaggcaggagaatcacttgagctgaagagtttgagcctgggcaacatagcgagacttcatctctactaaaaattaacaacaaaaaagttggctgggtgtggtggtgtgcacctgttgtcccagctactcaggagactgaagtgggagaatcacttcagcccaggagatcaaggctgcagtgagctgtggtcatgccactgcactccagcctaggtgacacagtgagaccctgtgtccaaaaaaaaaattaactttttatatttagattttgtatttttatatcttggtatatctatctgatcattataatgcataatgttactttcttcgttgtgcttaggtaacttgatttaaaatgttatttctctaaaataaaacatttggccagacatagtggctcatgcctgtaatcctagcattttgggaggccgaggtgggtgggtcacttgaggtcaagagttcaagaccagcctggcaaacatggcaaaaccccgtctctacaaaaatacaaaaaaattagccaggcgtggtgacgtgcacctgtagtcccagctactcggaaggctgaggcaggagaatcacttgaacctgggaggtggcggttgcagtgagctgagatcgccccattgcactccagcctgggcgacagagcgagactccatcttaaaaaaaataaaaaaaaattataggctattttctatcgtgaaagttgtgtattattattgtgaagaagcttattagttttttattggtgacaaatctgtattctaggtaatcctcctcttcccaatccttttggtgatcctaatttatcacaacctataatgccaattcagcagaatgtggcagacattttatttgtgagaacaagttatgtgaagaaaatcattgaagactgcagtaattcagaggaaaccgtcaaattgcttcgtttttgctgctgggagaatcctcagttctcatctactgtcctcagtgaacttctctggcaggtaaaaggaaaataacatttgtatgtttataatttgatttgttattcctttcattaagttactcaccatgtcttacttgtttttaggttgcatattcctatacctatgaactgcggccctatttggatctgcttttgcaaatcttactgattgaggactcctggcaaactcacaggtggatactctttttgtgactggaaacaattaggcttgcccaggtgttagagttaactgaaattgacagtcaccacattttttttaacctattggagttctagtgaatgttttatcttaaacctaggacaagggtaaataacaggttctccccttttcctcagaattttatttccttttttattcttttttctcactgcctaagtttcatacttaataagcctgtttctttagaatgacttttttaattaaggaggagctagcttgggcatttggtaaatatttgaatttcattaatgatgcccgaggattattttatgattatattacatttgttttagaattagtcacttgaagcaacttagtcattagtcacatgaagtataatagtatatgtaaaaagtcttcaggtaagtacggtttccatttttcatggtacttatattctgtaaagtcaccacagacactgagttagcaaatactgaaccattactcctaggaggaaatacagaattaggtttctataagcctctgtttacatttttatcaaccagtcaatacataaccttgttgtatgtgtgtttctacttaaagtcatttaatatattttgttgactcataaagttcacagccaacagctctgtaacttaagcctgaacttaagcttctcaatgcattctgcataaggcacatcacagccttcttgtggttaggaacattagatagcacttcaacattatatacttgggtcattttaaacataaaaataaccagcaaaagcacaaatatgtggaaaatgtggcactaaatacaccatgaagaaggacacttgtttacagtttaagctgaaacaagagagaatgacactcttctggacttcagctaggaacgtttgtgttggacaacttgatatttttgctgctctgtatatgtccacagatgacgaagaaagcaccttgatgattgattttgcagttataaataaagtttaggaagtaagcgaattcacaaatgtggaattcatgaataatgaggggatcaattataattagtttttatgagaacttttagaatgttaacttttttcccccgtaaaaactaaggttatccagcttaactggccctcaaactttcactagaatttttctatttgtttttgggggtttttttgtagtaaaagttgaatatattatctttaatcccaagagttatataatagatgataaattatggtattagttgacagcactgccaggttttagaacttcccttcccacatggaagatagtataatagtttgtttgggaaaacaattcaaagtctatgtcgcagtttgcctcccatctgccaaggtaataaaacaaacttaaaaacaagttctgtaacaacaaaatgcttaaagagaagtaacaatctggagttttagtggggattgcgaaagccagaatttgcaacttagtattttcaaattatctccaaatttaccataatagatttcaaacaaatactgtaaaaatagcattaaaccaaaaatcaattttcgtgagacacaaaagatagtagctcagaattatagtcgtttattcaggcagtattcagtgcccttctaaatatgttcataggatttgaaagcttccttcagagtagattttaatgaaatctaacttttactattttcttttttaaaaatgctgtatttctgggcacagtggcttacccctgtaataagcactttgggaggccaaggcaggagaattgcttgagaccaggagttcaaggccagcttgaccaacatagcaagatcttgcctctatttttttaaaaaagaaagtactgtaagcacttacagttttaaaccagttaatcacatcttagctcttgtttgattagagcaagtgataatggcaaagacatacgtgctagattaaatgtgggaattacacttttgtgtaatgagattagtaagatactgttaaatgaatcactggcccaaacgtgaaaataattttctcataatgagcttttagttcattcagtaaacaatgttcaaatatttatagagtgtctaccatgtgcccagcactgcttggcatcaggtaataaggcaagtgaagatagtattaataaaaatggcatttgagagcagttgatgctaatggggagaaaatatgatatggcagaaataatgatttagcacttcattgttacttgaaaaaactgaaggtaaaagcaatttatatgtagtgtttcagatgaaacagcaagagggcctgaacatggttgatttgtctgaaatgattaagctttgcaaaattgttgaagtaatctgttttgtttggaaatcatgaatgcatttgatggaggaaaaaaatcttactttgactttaaacatactgttaagtaaaatacatagtgtatattagaatctttaaattctcagtgtccaggttatgttttctaattgaggtaaaatttacataacaaaactcaccatttcaaagtatacaattcagtgacttttagtacattcacaatgttgtatagccattaccactatctgattccagaacttttttttttttgagagggagtctcactctgtcacccaggctggagtgcagtggcgcgatctcggctcactgcaagctccgcctcccgggtttacgccattctcctgtctcagcctcccgagtagctgggactacaggtgcccgccaccatgcctggctaattatttgtatttttagtagagacggggtttcaccgtgttagtcaggatggtctcgatctcctgacctcgtgatccgcccacctcggcctcccgaagtgctgggattacagatgtgagccaccgtgcccatcccagaacatttttttttattaccccaaaaggaaacccctacccaattaagcagtcactcaccattccttctaaccctggcaaccactaatctgttctctgtctctgtggatttgcctcttccagacatttggtaaaaacgaaatcatgcaatttgtgtgtctgacttctttcacttagcttaatgttttcagagtccatccatgttatagcatgtatcattactttatagctgaataatattttgttttatggatatatatacaccacattttatttactggcacataatctttttaacacaaaagaaacaaggcatgtttgtgcccctacaatcatgttttaagttagttagttcagggaaagacaggactagttggctttgtattattactctgttgtagtttgggagaaactgaaatgaaatcctgtgttattggcaaatcagccaaattgtactatt

SEQ ID NO: 3252 - DNA, 108 bp, Homo sapiens
ctgtcaccaggctggagtgcagtggcgtgatctcagctcactgcaacctccgccttccgggttcaagcaattgtcctgcctcagcctcccaagtagctgggattacag

SEQ ID NO: 3253 - DNA, 112 bp, Homo sapiens
ccaccaccacgcccagctaatttttgtatttttgtagagacagggtttcaccacgttggccaggctggtcttgaactcctgacctcaggtgatctggccgcctcggcctccc

SEQ ID NO: 3254 - DNA, 203 bp, Homo sapiens
ttacaggtgttagccactgtgccaggccagatgtctgactttttagcccttggtccattgctttattcttcacaccataccacttccttagaagtgcacctgggaatgcctgggaattgaattttatctttccacatgatggcagatatgctatggaaccttcagggatgtcggtgaaacctgaaaagggaagttgaatctca

SEQ ID NO: 3255 - DNA, 203 bp, Homo sapiens; identical to SEQ ID NO: 3254

SEQ ID NO: 3256 - DNA, 490 bp, Homo sapiens
ctggggtgtgccactaccacccggctaatttttttgtatttttagtagagacgtggtttcaccatgttggccaggctggttttgaactgctgacctcaaatgatccacctgcctcagcctcccagagtgctgggattacaggtgttagccactgtgccaggccagatgtctgactttttagcccttggtccattgctttattcttcacaccataccacttccttagaagtgcacctgggaatgcctgggaattgaattttatctttccacatgatggcagatatgctatggaaccttcagggatgtcggtgaaacctgaaaagggaagttgaatctcagcctgctctgagtaggtgaaaattctgccttggatcccccaaagtctgcagataaagatgtgacatttctcgtgttctgctgtgcttgaaggaaagagggtaataatcttaacagtgccaagctgtaagcatgttgcatatattaacttgtt

SEQ ID NO: 3257 - DNA, 204 bp, Homo sapiens
ttacaggtgttagccactgtgccaggccagatgtctgactttttagcccttggtccattgctttattcttcacaccataccacttccttagaagtgcacctggaaatgcctgggaattgaattttatctttccacatgatggcagatatgctatggaacccttcagggatgtcggtgaaacctgaaaagggaagttgaatctca

SEQ ID NO: 3258 - DNA, 446 bp, Homo sapiens
  SITE (224): n equals a,t,g, or c
  SITE (374): n equals a,t,g, or c
tcctaccagtgtgagttaacacttctctgtactctccccggttcctcattttgttcctgctgagttcagagctatgttcctcatagcctggcttacctgtggatgttctcagcctcattttcttttgctagatcatatatcttcattaggtgggtgattttggtttctgttactttttccttaatattagtatattgctgatttggatcaggggccaggctgtnagattttcagcatggtgaggtgataatacatgttggtcccccatgcagaatgctgcctctagcactttagccaaaggagctctacagtctgtccagaagtactgggggacactggtaataacctgagaacacttacagagccttccaganaagtgccctttcacatcatataaacagatcatgggaagctgagggaatgcaaagtcaaggcctcattggaga

SEQ ID NO: 3259 - DNA, 444 bp, Homo sapiens
tcctaccagtgtgagttaacacttctctgtactctccccggttcctcattttgttcctgctgagttcagagctatgttcctcatagcctggcttacctgtggatgttctcagcctcattttcttttgctagatcatatatcttcattaggtgggtgattttggtttctgttactttttccttaatattagtatattgctgatttggatcaggggccaggctgtagattttcagcatggtgaggtgataatacatgttggtcccccatgcagaatgctgcctctagcactttagccaaaggagctctacagtctgtccagaagtactgggggacactggtaataacctgagaacacttacagagccttccagaaagtgccctttcacatcatataaacagatcatgggaagctgagggaatgcaaagtcaaggcctcattggaga

SEQ ID NO: 3260 - DNA, 2160 bp, Homo sapiens
attctaatataaattattttggccactgtgagtgggagggaaagaatcagttcacagggataaatttgcatgttgagaagataatatataatagtttgcaaaacacttctatgtacattgtatcttttatagagacaaggccatgtttttatttgtggagactgagacagagaccccatgagatctaatgcagagtcacatgactccatagccaggtcttctatctgctctttggtatataactggatcattattctattgacagaattaaggaatcttcttatttttcaaaggcacccttttgcccttggaaggtatatttagaaatcctttaccagactagaaagaagacagttatattttcctgccttttgataaaaaacagtgtgttttttctaaatcttgttgtgtttgactagagtctgattaaggtaccttttgggaaattaaggttctatagaaattactgggctcaatctagtgatacaaatatgtgttgtttgatttatcaacacattacaaaccttaactttggagttttaatatctggttatctttaatatctggttatcttctttctgaagtgtatgtacacaaaattgatgctaaataaggtcttgttgttttggcaaatagtgaaatgcaaggtattggtagatcagtactgttataactttggtgcaaagttgctgcatgcagattggctgtgggaccttgttcattttttgagaactaatgtagagtttgaaaaaacaccgtaagcctgcattccagaagttctggtatggatagtgtgagcccagggaatgtgcttagataaaagatcacttaacaaataggttttgcatttttttagcaatcaggctttgtgctgaatattagagtggttgtttcagagagtttgcagcaattaggctttattggtgcactaaggagaagcagagaggagaagcaattcttggtaacttccttggaagttgcagctaactctgaaaagtctgggttgaactaggtaagtaactaattcctagaatcaataaactttgcaggagtccgtttgattgtacatgtagctccctggaattgctattggtccctaaatcatcagtttgtaatgctggttttcaaacttgagtgcacatcaagttttggaggacttgttagaatacagattgctgggctcacccccagagtttctgatctggtaggtctggagcgggacctggtagattgcatttctaaaaagcgtccaggtaatactgctgctgtttgggaaagtacactttgagagtcactggcttacagcaatctcaaggtgtttggatttttgggcaggggtgctgtgcaggcgttgctgggatctcttcacagcacctccactgcatagaggtgagcctccagatgttttcattcattcaacaaatatatgtacctattgtgtgctgggcactgcttaagttgcgaggggatattgtgaagaaagtaagcaaaacccctttgtttgtagaatttcagtgagcatagtcctgggttaacctgacaacagtcctactgtttattgatgcttataggtgagcctatttctctttctagctttcttccacttaatttactttcttttggaattcttgaatttaataataataatattgatgttattagtcatcactataactttttattgagtatgtattttatgtcagacacagtgtggctaagtgctttacatacattatctcatctaatccttagaaaaaaccctggtgtattagtcttaatttaaaagatgtactttggaaaggttagtagtttacccaagattatgcagctagttaaaagtggtgctggggctgggcttggtggctcacacctgtaatcgcagtgctttgggagtctgaggcaggaggatcgcttgacaccaggagtttgagactaacctgggaaacatagcaagaccccatctttacaaaaaataaaaaaattagccaggagtgggggtgcacacctgtggtcccagctacttgggaggctgaggcaggaggattgcttgagccccagaggttgaggctgcagtgagccatgattatgccactgcacatctgtctgggtgacagagcaagatcctgtctccaaaaaaaaaaaaaaaaaaaaaaaaaaaaa

SEQ ID NO: 3261 - DNA, 444 bp, Homo sapiens
tcctaccagtgtgagttaacacttctctgtactctccccggttcctcattttgttcctgctgagttcagagctatgttcctcatagcctggcttacctgtggatgttctcagcctcgttttcttttgctagatcatatatcttcattaggtgggtgattttggtttctgttactttttccttaatattagtatattgctgatttggatcaggggccaggctgtagattttcagcatggtgaggtgatgatacatgttggtcccccatgcagaatgctgcctctagcactttagccaaaggagctctacagtctgtccagaagtactgggggacactggtaataacctgagaacacttacagagccttccagaaagtgccctttcacatcatataaacagatcatgggaagctgagggaatgcaaagtcaaggcctcattggaga

SEQ ID NO: 3262 - DNA, 133 bp, Homo sapiens
tcaggcctgtaatcccagcactttgggaggccgaggcaggtggatcacgagatcaggagttcaagaccagcctggccaagatggtgaaaccccatctctactaaaaatacaaaaattagccaggcgtggtggc

SEQ ID NO: 3263 - DNA, 385 bp, Homo sapiens
cttgagtgttgtgacaggtcaatggtacccttccatagtttctagtaccaattctggggttaaaccattcttgaatttcaataggaagatgttaattgaggttttagacagctgtgttcatgctgccatcctaaccaggaaatgctctttggattgtgctatatatagtattgatagcagtgtgatgattatagcagcagtgtgatgactatagcagcaatgtgaataacagacaagagggatgtccagatctaagacagaggacctatttatggggatataaaaaatattctaggagaaaaaaagaaaatgagggtacaaactaaacctacttcatcaaaatggagaacagagggtaaatttgaaaattatttaattggtatta

SEQ ID NO: 3264 - DNA, 488 bp, Homo sapiens
attccagtcagctcagccgggagcaacgggcattgcaggtgagcccccccacctgaatttcagttactttaccagttgtcagttttttaatgtgtaaacaggattgggggagtatggtagggcagggcaccaggcagatttggtgaatgaagcttgtggtaatttgaatatatgcaatgtggccagtaagagaacgtgagtggtagcactgaggcgtgtctggatgctttaagttattctgtagattataagggaactccactcaattgctgataaccgatgttttaattattgtgaagggtatctaaagactgcatgacgtttacctatcaattgctttgatttctctgcctgtaagatagcaaatatacctagaagtgctgcttagaatgccttacttgatacctggtagagatgtgtagcagccgcatgtctgtgggattcatgcaaatttttcaccaaaaagaaaggccaacaaaaagaaaaaa

SEQ ID NO: 3265 - DNA, 339 bp, Homo sapiens
aagagacccaatctctcactaggcaaaaaagatttttaagaaagaaactggtagtttttccccttgtttcctcttgataccaaagttatttctgttctttcacaaaagtgcccagtagagagattttgtgtgctgctcagattacccttgtaccttgttaacacataaaaatattagttcaaatcttgatcttcattataacatgagaggcgaatataatttatcttggataagtctcaagaattggaagcagttaagggatctaactcacagcatgagcttggcagagttccccataccctctttctgtcatttggctacctgtgaagtacatatgat

SEQ ID NO: 3266 - DNA, 339 bp, Homo sapiens
aagaaaccaaatctctcactaggcaaaaaagatttttaagaaagaaactggtagtttttccccttgtttcctcttgataccaaagttatttctgttctttcacaaaagtgcccagtagagagattttgtgtgctgctcagattacccttgtaccttgttaacacataaaaatattagttcaaatcttgatcttcattataacatgagaggcgaatataatttatcttggataagtctcaagaattggaagcagttaagggatctaactcacagcatgagcttggcagagttccccataccctctttctgtcatttggctacctgtgaagtacatatgat

SEQ ID NO: 3267 - DNA, 339 bp, Homo sapiens; identical to SEQ ID NO: 3266

SEQ ID NO: 3268 - DNA, 784 bp, Homo sapiens
gctctccaccaccaagtaatccttttgccgattgcactctggctgagaattcggtcacccagctacagggaattctatctgttctattccttcagtgtaaaaagagttgccatcccgtctcatttcccctttgaagttctatttaaatgcatggcaaattctagcaatatcttaagattgatttgggtctggatgggagatggtgggtgttgagactcagaaaccctgactgaacacttctcttttcactctttctgggtaagtactgtattttctgtgcccttctgcatctggaaaaagcaactctttaggtaactttaattttcattttgcttagaatcaaaaagcctgcatttttgtgcaggcatgcacatattctgtcaaagtaaagaagctctttttttaagcacttagtgatcaattactttggagttggaggggataaaaaataaatagaacttaaacaaactgctttcatgtaaatgctatgtccatacattgaatttattaatgtaattcattaggatgtcatctaagcatggaagaaaaatggaaagatatgtgaaaatactttaaaaataaatgaaactgaaaaacctaagatcactttgtaaaattgccttaacagtttgttgacaattcacctgcaaatagttcacatttttattgtgcttgccaagctgttttctctgtatatttcattttttcttactagacttttaagatttattatatattcctaaaatctggagtaaaggaataaatattagacagtatcattatt

SEQ ID NO: 3269 - DNA, 889 bp, Homo sapiens
aaagagcaaatccaaagactgagttatgtttaatgacttttggccgaatcactggaaatatctgtggtgagattgctgagtcaggtgatgtgatatcataagctttcttggaacgggggaaagaaaatgaaactttttggtgtgaatattttttatgctgatgtgaattattttgttaggtagtgtgattatagcactactactgtcagattttaaattgtatgtgtacttgcatctaagactgtggtagagaagtaaagagaagtcaattccttcttcctcacctctcagcctccagatcccttcctgcccatcccttccctacaatgcccactccagacgcaaagatacacttttttcctttggactgtgaacatggaagcctcagcctgaatgtgagtggcaagtggcttatctggagccacctgcccaagtcttactaaaatgcagctgttgttagacaactgttgaaaactccagaaatacatcacccaaggtggcagttctcagtatttggcagaacaattgcaattgcactgggtatattatatatatatatgtatgcatatatatcatattttttacaaggaacattttatgatgaaagaagaaacccttctctgccttctctcccacgaattctgtccctgtatcctctggatgtaaaaagcaaggagagaccccaactgtctccatggagaagaactaggaatcaccacaaggggaagaaatgtacatgaagtctccattacctcgaatttttttctcagtctcactggttgtgatttggtcactttagtgttgggacaggggaaagggtctgtgcgtgggcaaagctgaaggtgatgaggaagaagagacgaacattaaagatgtctatttactatga

SEQ ID NO: 3270 - DNA, 889 bp, Homo sapiens; identical to SEQ ID NO: 3269

SEQ ID NO: 3271 - DNA, 2411 bp, Homo sapiens
gtaagttttctttttcctttttcaatgaattgattcttcaaattaaaagttcttgagagaaggagaggaagatacagcagacataggactgagccaaggaagagtctgcctgagagagacgcttggcctgtgctttgctgccatccgtgcggccttggccacatccctattaacagaggcagctccacttcagacagggacaaggcttcctgctgtgcctttctggcagggttttgtggggtcacatgggaagcaatgtgttacgcaagcagtctccatgtgtgtgtaaactgctgtcctggtgacttgtccctcttcttagtggaaatgcatttgagatggtgacagggctggatgaacgtgtgaccctgggagatccgggctggactgtggaccccgatgggccagtgtccttgtggcccacagcatagcactggggacagagcgctctatgcaggtgaggcgtatgagaacagcatggtaaataattgatgaagtcacatttgttcaacttaaaggattgttctttattctgaagttattttcttccttatttggatgataaaatttccttttatgtaatgaaggtaaaagtagagggcaatatttttgctttttgaaatgctcttggttgcaaaacaaaatgttggttgctgtttgtcagccccagaatttcttcttaagttcgcctgtctctgaaatcccaaagtcacggaaccgcagtctagctgtggtgcatgtttacgtattggtgagaaattcctcttgggttcttgaacagcctgtacgctggcaggcagcactgcagcatttctgctgctcatggccaagaacgagtctggagatcgctgcgtgcggttttaggaagtgccaacacccgtggtgatgggcctctggccacccctggatccatgggacacactcacaggaagctgatgtggccttctcggtgaggactgcaccttaacctgggcactgggagcctgtggcccccctgtatgttggtgatgacactagtgtgggtcttctggctctggggctacagcttctgcctcctcacctggccgtcggtactcggcaagcaggcctggcctcccggggcctggatccctaccggctgggattggcctcctggaagtacctgtttgggccatgtgacctcctttctcacttatgcctcactcccctcctcccgctccaaacccgaacctctcagtgtggaatgaacgctccaaacccgaacctctcagtgtggaatgaaacagtttagatgtgtacatgatgcacgtgggtgggattcacatcccaggagaattccacggagaggaatgtgcagattttgaagtgtacagtgatgtgtggaataaatactagaaattctcagcagacagtgggatggagaagtgagtgggggcaggagggggatttctgttgccttgacatgtcgttgctcagtgcctggattgcaggcgagtctctcttttttatgttgctttgatttcaagatctcttagatatactaggtagtgtatgaatgtgcataaatccagtttgagaatggtgtttatgaagaagctgtttcgtgtgtacagttgctgctgtaatttagccagcagtgccctgccctgccctgcagtgtctgctcagctcccactgcttctctttgctgttgggcatgtgaggcatgacttggaggggggcctggtgcctggggacctgctgaagagaatgctcaccaccagctctctgtttccctttctgctttggtaatcaacacgtgtttgcctgcagtggccgggaccgtgactgtttctgcccttgtgcctagttaagagccttcaaaagcataatgaacacttttgatatgatattgtaactttagtaaatgctttacttccctctaattgcccccaaatgccttaattttgtggactgtttatttcaacaggtggaagtgttggtcgtgcgaaatcttggtattcgcatttcaagaagggagttcttttttctttcttctttctatggaacgtttcaagtgattggatagaaagaagggctctgaagcagttttcacctgctctgagggaacttggggctccagggacgtaccccaaatgttgcccaggttgaaactccctgacagcctgttctacgtagtggctcgtggtttccagtttgaagagagttgtgcccctaaaagtgtttgaaacctgtggctttcaagcaaggtaccgttgtccccacagtgttccgtggggtagggggtgatggagactgtgggcaagcctgttgtttttggccccctgttgttacatgggacctgttttgacggtgggagggtgagatgtgaagatgtgggatgaacctggaatgaacgaattaaataaagacatgcatccatctgtcagcga

SEQ ID NO: 3272 - DNA, 2448 bp, Homo sapiens
gtaagttttctttttcctttttcaatgaattgattcttcaaattaaaagttcttgagagaaggagaggaagatacagcagacataggactgagccaaggaagagtctgcctgagagagacgcttggcctgtgctttgctgccatccgtgcggccttggccacatccctattaacagaggcagctccacttcagacagggacaaggcttcctgctgtgcctttctggcagggttttgtggggtcacatgggaagcaatgtgttacgcaagcagtctccatgtgtgtgtaaactgctgtcctggtgacttgtccctcttcttagtggaaatgcatttgagatggtgacagggctggatgaacgtgtgaccctgggagatccgggctggactgtggaccccgatgggccagagtccttgtggcccacagcatagcactggggacagagcgctctatgcaggtgaggcgtatgagaacagcatggtaaataattgatgaagtcacatttgttcaacttaaaggattgttctttattctgaagttattttcttccttatttggatgataaaatttccttttatgtaatgaaggtaaaagtagagggcaatatttttgctttttgaaatgctcttggttgcaaaacaaaatgttggttgctgtttgtcagccccagaatttcttcttaagttcgcctgtctctgaaatcccaaagtcacggaaccgcagtctagctgtggtgcatgtttacgtattggtgagaaattcctcttgggttcttgaacagcctgtacgctggcaggcagcactgcagcatttctgctgctcatggccaagaacgagtctggagatcgctgcgtgcggttttaggaagtgccaacacccgtggtgatgggcctctggccacccctggatccatgggacacactcacaggaagctgatgtggccttctcggtgaggactgcaccttaacctgggcactgggagcctgtggcccccctgtatgttggtgatgacactagtgtgggtcttctggctctggggctacagcttctgcctcctcacctggccgtcggtactcggcaagcaggcctggcctcccggggcctggatccctaccggctgggattggcctcctggaagtacctgtttgggccatgtgacctcctttctcacttatgcctcactcccctcctcccgctccaaacccgaacctctcagtgtggaatgaacgctccaaacccgaacctctcagtgtggaatgaacgctccaaacccgaacctctcagtgtggaatgaaacagtttagatgtgtacatgatgcacgtgggtgggattcacatcccaggagaattccacggagaggaatgtgcagattttgaagtgtacagtgatgtgtggaataaatactagaaattctcagcagacagtgggatggagaagtgagtgggggcaggagggggatttctgttgccttgacatgtcgttgctcagtgcctggattgcaggcgagtctctcttttttatgttgctttgatttcaagatctcttagatatactaggtagtgtatgaatgtgcataaatccagtttgagaatggtgtttatgaagaagctgtttcgtgtgtacagttgctgctgtaatttagccagcagtgccctgccctgccctgcagtgtctgctcagctcccactgcttctctttgctgttgggcatgtgaggcatgacttggaggggggcctggtgcctggggacctgctgaagagaatgctcaccaccagctctctgtttccctttctgctttggtaatcaacacgtgtttgcctgcagtggccgggaccgtgactgtttctgcccttgtgcctagttaagagccttcaaaagcataatgaacacttttgatatgatattgtaactttagtaaatgctttacttccctctaattgcccccaaatgccttaattttgtggactgtttatttcaacaggtggaagtgttggtcgtgcgaaatcttggtattcgcatttcaagaagggagttcttttttctttcttctttctatggaacgtttcaagtgattggatagaaagaagggctctgaagcaggagttttcacctgctctgagggaacttggggctccagggacgtaccccaaatgttgcccaggttgaaactccctgacagcctgttctacgtagtggctcgtggtttccagtttgaagagagttgtgcccctaaaagtgtttgaaacctgtggctttcaagcaaggtaccgttgtccccacagtgttccgtggggtagggggtgatggagactgtgggcaagcctgttgtttttggccccctgttgttacatgggacctgttttgacggtgggagggtgagatgtgaagatgtgggatgaacctggaatgaacgaattaaataaagacatgcatccatctgtcagcga

SEQ ID NO: 3273 - DNA, 1242 bp, Homo sapiens
ttgtagacacatgatacgctctgcgtctgctctactgagtactttctgcaggggcctgttaaggacgaggcctccccagccctgcccggtgcaggaggtggctcagttattgaaccttttgggaagcagcacctgggaatgctgcctcgtgggagtcccatgcgtgagtgtggtggtgtgaccttcaggctgcacagaggcaaggacccagatgtggcagcatgggcgtcatgctcctttgcacagcccagggcctgttttggagggaccaggtcactgcccctggtctctctaggaggagtggactgaatggatcgttgcagagaagactcacccagacctggccagggaatgatgtatctggggagagaatgagctggaggagggggcctctcatggcccttccctggcctgtggcccagcctggctggcctgcaggtgtctagggtctcagcttttcatttgcagaggacatgttcaacttcctctctgttcaagccagcctttgccaattttttcagaatccaaacaatttggaggtttggtatcttgtttcatagctgccaaatatgaatctgaaaacagggtgggtagctaaggtcattcctcctgggttttagtggcattgccttccttcactaaagctcccttttttttctgttggcaaggacaggttacagaataggaagagtagcactttccgcctaagcactttaggaaatcacctttctaagccctggggcgcccaagtcccatgggacagggaaacgtggtcctcagtgaggctgctgcctggctggcccggagtcctccctaggagaggggctcgatgggctgggggaaggagcctgaaggttgcccctggttgcatcccagaagcatctgactgtcaccactgccagtggctgtggaacagtcctgggccctgggccttggctgctgtcaacagatgggctgggctgggctgtggtggggtgggggacaacgttggtaactctgagaattcagctttggagtcccgggtgaggggttttagataaacccatcaatatcacccacattctgtgactctttgcatcactcgtgttatttatttatttatttatattctgccttgttccagaaaagtgtttaaggcaacaacgcttgttttttggtgttttcttttgacatttgaaaatttagtacattgttaaaatgtacttgttaaacaggtaattttaaagagaaggaacaattgtt

SEQ ID NO: 3274 - DNA, 777 bp, Homo sapiens
cagaggacatgttcaacttcctctctgttcaagccagcctttgccaattttttcagaatccaacaatttggaggtttggtatcttgtttcatagctgccaaatatgaatctgaaaacagggtgggtagctaaggtcattcctcctgggttttagtggcattgccttccttcactaaagctcccttttttttctgttggcaaggacaggttacagaataggaagagtagcactttccgcctaagcactttaggaaatcacctttctaaagccctggggcgcccaagtcccatgggacagggaaacgtggtcctcagtgaagctgctgcctggctggcccggagtcctccctaggagaggggctcgatgggctgggggaaggagcctgaaggttgcccctggttgcatcccagaagcatctgactgtcaccactgccagtggctgtggaacagtcctgggccctgggccttggctgctgtcaacagatgggctgggctgggctgtggtggggtgggggacaacgttggtaactctgagaattcagctttggagtcccgggtgaggggttttagataaacccatcaatatcacccacattctgtgactctttgcatcactcgtgttatttatttatttatttatattctgccttgttccagaaaagtgtttaaggcaacaatgcttgttttttggtgttttcttttgacatttgaaaatttagtacattgttaaaatgtacttgttaaacaggtaattttaaagagaaggaacaattgtt

SEQ ID NO: 3275 - DNA, 2851 bp, Homo sapiens
agatcaggagagaaggcaccgcccccaccccgcctccaaagctaaccctcgggcttgaggggaagaggctgactgtacgttccttctactctggcaccactctccaggctgccatggggcccagcacccctctcctcatcttgttccttttgtcatggtcgggacccctccaaggacagcagcaccaccttgtggagtacatggaacgccgactagctgctttagaggtgagggacccctttctcttctagccccgcctagaaggattccagggctattggttcaaccagtttgttagggatctggggataacaagaaagggctctgttagagtctacagaaaattctctcttaataagaggaccttcggaatgacaagccctcctcttaccccacatagaacaattccaaagcaaatcgacttttgcgttttacctctgggattagatagaataagggggcagagtggaaacgagagccaaaattgtggggctgcatctccagagaaggtgatgattctgttgaagttggaggttcccggggaatctataacttcctgtctttttaacaggttgagatccgtagcattttagtgtccgagaggataattgctaagggagcagagacctcttcacaccttcatgcgcttagacctgcctagaggctcagatggctcagtggcactgctcacagagaacacaggctggaggacatggagtcggggtaggggcctaggtgaatctcagctaggctctttgcacatttagcacctctgcacatctggtttccttttctgcaggagtggaaggggatattgaagcctggctgagtttgctctttttttcccattcctgactcccgagttgggcctctccctgcctgggagttgtaaccctgcagcctccctcctgatcccccatcccttcaggaacggctggcccagtgccaggaccagagtagtcggcatgctgctgagctgcgggacttcaagaacaagatgctgccactgctggaggtggcagagaaggagcgggaggcactcagaactgaggccgacaccatctccgggagagtggatcgtctggagcgggaggtagactatctggagacccagaacccagctctgccctgtgtagagtttgatgagaaggtgactggaggccctgggaccaaaggcaagggaagaaggaatgagaagtacgatatggtgacaggtaaataatctgaaagcaggcccctaactcttctcagaaccgatattcttccttccttgcttcttactctttttttcgctttgtcccagtccattgtggctctgtcttctggaatctgttttagggaaacctctgtaatgccaggtctattaaggagaggttctggggatccaggccgctgtggtacccgctctttctcaattctccctaagattggaggcaaccactgggcaaatgctcactattctccagatcacccaccctgggggagttcctgctggaggcatctaattcttgcctctatttccttttcctgtgcttttctcatcagactgtggctacacaatctctcaagtgagatcaatgaagattctgaagcgatttggtggcccagctggtctatggaccaaggatccactggggcaaacagagaagatctacgtgttagatgggacacagaatgacacagcctttgtcttcccaaggctgcgtgacttcacccttgccatggctgcccggaaagcttcccgagtccgggtgcccttcccctgggtaggcacagggcagctggtatatggtggctttctttattttgctcggaggcctcctggaagacctggtggaggtggtgagatggagaacactttgcagctaatcaaattccacctggcaaaccgaacagtggtggacagctcagtattcccagcagaggggctgatccccccctacggcttgacagcagacacctacatcgacctggcagctgatgaggaaggtctttgggctgtctatgccacccgggaggatgacaggcacttgtgtctggccaagttagatccacagacactggacacagagcagcagtgggacacaccatgtcccagagagaatgctgaggctgcctttgtcatctgtgggaccctctatgtcgtctataacacccgtcctgccagtcgggcccgcatccagtgctcctttgatgccagcggcaccctgacccctgaacgggcagcactcccttattttccccgcagatatggtgcccatgccagcctccgctataacccccgagaacgccagctctatgcctgggatgatggctaccagattgtctataagctggagatgaggaagaaagaggaggaggtttgaggagctagccttgttttttgcatctttctcactcccatacatttatattatatccccactaaatttcttgttcctcattcttcaaatgtgggccagttgtggctcaaatcctctatatttttagccaatggcaatcaaattctttcagctcctttgtttcatacagaactccagatcctgagtaatccttttagagcccgaagagtcaaaaccctcaatgttccctcctgctctcctgccccatgtcaacaaatttcaggctaaggatgacccagacccagggctctaaccttgtatgcgggcaggcccagggagcaggcagcagtgtttttcccctcagagtgacttggggagggagaaataggaggagacgtccagctctgtcctctcttcctcactcctcccttcagtgtcctgaggaacaggactttctccacattgttttgtattgcaacattttgcattaaaaggaaaatccactgctc

SEQ ID NO: 3276 - DNA, 503 bp, Homo sapiens
cattatatgtaatgttagtatttctgctttgaatccttgatattgcaatggaattcctactttattaaatgtatttgatatgctagttattgtgtgcgatttaaactttttttgctttctccctttttttggttgtgcgctttcttttacaacaagcctctagaaacagatagtttctgagaattactgagctatgtttgtaatgcagatgtacttagggagtatgtaaaataatcattttaacaaaagaaatagatatttaaaatttaatactaactatgggaaaagggtccattgtgtaaaacatagtttatctttggattcaatgtttgtctttggttttacaaagtagcttgtattttcagtattttctacataatatggtaaaatgtagagcaattgcaatgcatcaataaaatgggtaaattttctgacttatgtggctgtttttgacttctgttataggatataaaggggatcaataaatgacatctttgaaagtg

SEQ ID NO: 3277 - DNA, 925 bp, Homo sapiens
ccatatcttgttcatgtaggctctttcatgactgtttttttcttgtgtgttttattatttcaacaataggttcatctttagtaacagtgattttctctagtattcctacatagggtctttaaggcaaccttatgcagtcatctatattttctttgctgggcctttcatggatgctgggccatttttaagttaattcctcactccatggaggaatatctttgggaccccactcttacaagcttcatgtttctttttgtttcttgtccccaggccagtgagcagagatactctgagcctgttttcaagatatgtgtcttctgggctgctggttttatgcagggagctctgtgagagtttccttgaccagggcctgtggccatagtggctactctctcaaggccttgtcacagtggttctcaggacaggctgtacactggaatcaaatggaagctccagtgccctgatacctggaccccactcccagatatatattttttaaagctcctaggtgattttaaatgtgcagcccaggttgaaaattattgccttatagacacgtgcccagtttccctgtgttttttttttcttaaaaaaaaaaacaaaccctttttgttatatcacatttactattctctcttttttcttttctttttctcttttttggggggcagggttgggggaagattgtctatatacctgtatcatttccggttaccatactgaccagaagaaatgagaagtaccaaattctaaccagcatgcttagataaaaggattcaaatggaaggtttctacatgccttcttgggttattgaatacttcctgtgatttttaatttctctgtaaaagataactctttttttggcatcctccctccccacttcatttctttcagcatgggtgcttatcaaatatctttaattaa

SEQ ID NO: 3278 - DNA, 925 bp, Homo sapiens
ccatatcttgttcatgtaggctctttcatgactgtttttttcttgtgtgttttattatttcaacaataggttcatctttagtaacagtgattttctctagtattcctacatagggtctttaaggcaaccttatgcagtcatctatattttctttgctgggcctttcatggatgctgggccatttttaagttaattcctcactccatggaggaatatctttgggaccccactcttacaagcttcatgtttctttttgtttcttgtccccaggccagtgagcagagatactctgagcctgttttcaagatatgtgtcttctgggctgctggttttatgcagggagctctgtgagagtttccttgaccagggcctgtggccatagtggctactctctcaaggccttgtcacagtggttctcaggacaggctgtacactggaatcaaatggaagctccagtgccctgatacctggaccccactcccagatatatattttttaaagctcctaggtgattttaaatgtgcagcccaggttgaaaattattgccttatagacacgtgcccagtttccctgtgttttttttttcttaaaaaaaaaaccaaaccctttttgttatatcacatttactattctctcttttttcttttctttttctcttttttggggggcagggttgggggaagattgtctatatacctgtatcatttccggttaccatactgaccagaagaaatgagaagtaccaaattctaaccagcatgcttagataaaaggattcaaatggaaggtttctacatgccttcttgggttattgaatacttcctgtgatttttaatttctctgtaaaagataactctttttttggcatcctccctccccacttcatttctttcagcatgggtgcttatcaaatatctttaattaa

SEQ ID NO: 3279 - DNA, 339 bp, Homo sapiens
taactcatcagtcatcattaatgttagtgtattttatgtgtggtgcaatacagttgttcagtgtggcccagggaagccaaaagcttggacacccctgctgtagatggtgactgtttttcacatgggtccaggccagcagttctgaaatgtatgtacacacgaggattgaccacacaggtaaatctaatctgcatcggacagtgagagccagagggaggccaaggaaagcccttggtgttgggttggctccaaggtatctgtgtaaacccatggtttttaccatgtatatatgcaggtagatacaggaataaatgcagaagcctgcctatgcttgggcta

SEQ ID NO: 3280 - DNA, 287 bp, Homo sapiens
gcaaaactcctgtcttgaaaaaaaaaattcttagtagaagcaggagacttccagtcatgggcccacttggactcctcagctacgatggctgcattcccagtgtcgcccacacccctgcctccctggccgcctccagcagggctctgggtcaagcgagaagagaggtccacttgtgcgaggaaggtccgtctttctgtctacaggcctgaagatggacctgggagagcacgacctcgccacaacatcaccatcctgatcagaggcgagaggggacaaggtcataggtg

SEQ ID NO: 3281 - DNA, 1050 bp, Homo sapiens
agcagaggggcccgggtggagaaggtgctgccggccagcgggagggagggcagcgggggtgcagcagaagcccaggtggggacttggggtggtcgaggggacccttgggctgcagggactggggaggggagcaaggggtatggcttaggcaggtgccaggggacggttggtgccctttattctgaagggggatgtgctgcccagggcagcgggacctggaattacattttgagatttccaggaaagtttcaggtggaggcagaggctgggcgcagaggaaaatgtggcagtggcagagtgtggggtgagagccacgaagagaggaggtcactgaggtggacagtgggacagagagagggacggggagaggaacaggagtttcagaaacgtcctggacacattgggcagccgtcagcattgctttccattcatggacaaagcgtgggtgcccagaagaggccagaagccagtgcagaagcccaggcctccctgccatcacccggtgctggctgagctgcaaatggctgtgcagagcctcctccatgcctcaccctggtctggaccggaccacagggccctttggatcctttcccaggtcccacgtctgacccacacccagaagcagcgcttggtggagtctgccctgaagatgcacgtccaacaatatgcaaacacccaaaaggttataggctgtgcattgtgtcacaagggagcactgtgcagccgtgacagatgagtgacaatgtagggtggttcccacgacccgctgctgagcacgaagcaggtgcagatgtgtatctgcagcgtgtgctcttcaggtaagggagatggggagagaagcagttactcgggtgctctggaggaaggaaagataaaccaggacctaaagagagttgttgcctgcaggggcggatgggagtggggcagaaagaagggaacgggaatggagtagcagggatggggcggagcaacatttttctaaggagactttctgtgaagcgccccattcttagaatcacagtgatgtttcatagccccccaaaataatga

SEQ ID NO: 3282 - DNA, 616 bp, Homo sapiens
ccaactccaaagtcatcttcttaaacactagtgctaacttcttccatgaagcttcttgtgattacaccagcccaacatgcgatatggtcacagcatgggatggtggtcaggaccctttgatggttgaggagatgaagacccagaaaggcaaggggtttggcctagggagcctggcaagtgagtgacagagcctggtctaaagtccaggatatctctgttgttgctgttttccttttttcgttaattgcaaaagaatttacatgttcatagttaaaaacagagaagtgtatcaagtagaaaacagtagcaaactctcacccttattctgacactccagagttgcattcactctcaggcatccagatcctttccccatatacaaacatccatccatccatatatctatccatctctctatctaaacacacatgcattcattcgttcactcattgaatcgtgcattgagaacccattatgtgccaagccattgctagaattaaggatgcaatagttaaataaagcagatgtggttccttctcagggaggttctcatatatcatgaagaaaacagactgggtgcaatgaatgacagggtccttcttagagtggcagatct

SEQ ID NO: 3283 - DNA, 523 bp, Homo sapiens
aatttcaacatgagtcttaaagcacccatgtcatctaggaagaagaaactgtatttgcagcaacactgtgaggtaggaaagggagtcctatgttgtaggaactggaagcagcccactgtggtgaggggcaagtaggaagaggtgaggctgggcaggtgggcagggccagggcagatggggctctgtaggctatggaggagctgcgatcttatcacaaggaaagtgaacagccctatgattaactattgaaggcagtgatataatttatgcttttatattaatagcaattattctggctgttgtatagagtatagattggagaacagaattgggtgggggaactagagaaggtgaacagactggtgaagaggcttttatagttatccaggcaagagatgatggtgacttggaagaccaggaagagaagcaggggtagagagaaatggagatagtgaagatatagcagacatatttgaggagtccttcagttacagataatagaaaactagctcaagcacattta

SEQ ID NO: 3284 - DNA, 593 bp, Homo sapiens
gggtaaagaaattaccaggaaagaaaaaatggaaatagtaatttgggaagatgggccaagactgggcatgaggtttctgggtacccagcatggctccagcaagagagggagcggggggtgctggagactgtggacagagcaatccggcctttgagtcagcaaagtcctgggtggggagggctagagagcctgatgtggctaaaaacaagcttctgccaacaggtgaaatgggcactaaaggagaaataaatttcagttattgaatatcaaaagggttccagttattgtccacacagatttgaggtccgaaatacaaaactcctacgtgatggtaaccgttctttttagaacctccttctctccattactgccccagataaaactccccctagacatgagcttccagggccatggagagaaggcagtagggttgggaaggacgcaggttgtggaacattccatgaggatgttctttccatatttatttttactgcttggccttctagacccaaattctctaattttatcttgtcagtctctgtgagtaaaaaattccacctcttctctctctgctctccccagagagaagtttc

SEQ ID NO: 3285 - DNA, 593 bp, Homo sapiens; identical to SEQ ID NO: 3284

SEQ ID NO: 3286 - DNA, 2978 bp, Homo sapiens
ggggaggtaccgtttcctcggttatcttttttatttttttgagacggagtctcactctgtcacccaggctggagtacagtggcacgatctcggttcaccgcaacctctgtctcccaggttcaaacagttctcctgcctcagcctcccaagtagctgggactacagatgtgtgccaccacacctggctaatttttgtatttttagtagagatggggtttcaccatgttggccaggctggtctcgaactacggacgtcaagtggtccacccgcttcggcctcccaaagtgctaggattacaggtgcgagccactgtacccggcctgtttattcagttgtctggagttgacaggacagtcctgagtccagcaggctgtggctgtggcccctggggtgagtaggcagaatgaggtaggtggtaggaggggcagcctcactgtctcctgagaggccctggggtctccgctccagccccggccttgaggcttcggggtctacctgaaggtgtgttcctggggggacggttcggtccacggaggatccagaggccacccgcaggctgatgcagggccgccgtaccatcactgtccacacctcctcctgcctggtgtagcatccggtggtgcctgtcctcctgcgctcagcctggttctggtcagctggggaggaggggctcaagctccgaggcggcggtgctgcgcctgtacaccaggaactggatggagatctgggggtgccgccgttaaggccaagctgagcagagactgggttggacctgcccctgggggccttcgactcctgggagctgcctccctctcccctccctcccacccccacgctgcaggtgggaagggccagccataacctcccagccgctaccttagctgtgccctccactcagaacttctgcccggctcctcaagccctagccaagctccatctgtctccaagcctagcactgacttctccttcccgtgggcagcctcccttgaccctggcccaggatcttcgcttgctctcagctgtggcgtcctggaggcttccaggtggctgggccgttttggggcacaagagcctaaactttcacccctccctgcgcccggcagggacttaacaaatattaaaacaaaggccatgtttacttgctccgaaatgagacccaggtaacgctctttacagccattcagcaaacactttctgagccctcactgaaaacggggtcctgtggggagtgtttccagatacctcatcttacacaacatcctgacgagacagtggctgttaactgaggtgaagacacggcagcacagagaggttgactgtgtgccctgcgtcacacagctaggaagcaggggaggagccaggatttgaacccaggtttgtctgaccaagtcatgtgtctctccacactccagctctcgtctgcacagcctagaacattcctctcctgccttcgcctgacttctcctactctgtcaagtcacaggttcaatgagacttataggggcctttgctgcccctctaaccaggacggtccctggctagacgctcttgtttttctctgcagcacttggtgccactgcaatgaagtaattctttgatgatagcgttgtgtcctctctgcgccccgctgggctgtaagcttctggggcactcatggctgttcttgctcactcacggctccagggtccagctgggtgcctggcacacaggaggtgtgcacgactgggtgaacagatggagggagggagggagggagggagggagggagggagggatggatggatggacggatggatgaagggaggaagagacggatgagtgctgacgctgtgtgcaggcagaagcttccttgcccacaccccgccacctgccccacacgccctgaaggatacgatggtgtcgagcagcagcacgcccaggctgcccacaagccagggcaggtggtgcagcaggtagctgccctcgctctggccctcctcggggtttttgagcagcacgctcagcccatacagcgtgttccccagcatcaccagcgcgaacagagagtaggagatcccctgggtggacttccggaggaactggggcaggaggaggtcaggtcagagacctcgaacaggcctcttgtcactctggattgtaactgtccacatgtccacctgccccaccacagtgcacctgctctgagccaatctttccctgggtgcccagggatatgggcccgacacacagaagagcctcctcccacccacagacaagcccccccaggcccctgcccaggtccacgggagaccgtggctgtgccaggcctgtggccccacaccaccctgcattccaccccacacaggctctagctgcccagcaagcctcccctccccgactccccagcttctcctctcccctcaggcctccaagctcagcccctcaccttcccctgacctcccactcccccaagacacacatgggcctcttgtagcctggctggcaggccacgccacgcccattttccagaagcagaaatggaggctcggagattggattaacttgcccaagccaacagcgggagtagaccagactttctgaaccaaggctcctatgctgtgctactccttagcccagagggcccgggtggccaggccagctctcctctactcggccccacccagcccctgctggaggctcacgttggtgcggatctgaggcagccgggaaagcaggtacaacacgctggagatggagccgatgacgaagccaatgacttcctgccgggtgaagggctgtggggcagaagggggcacttggtgtctcgtaggagccagaggtgatcccccaccccatttagcacccatgaggctgtgcaggggagagccctggggatgagccagcctccatcccttcgaccgccacgcccacgcctcaccttgctgcccgactccacggacaggagcgcccgcccccggaaggcttccctaggggcagc

SEQ ID NO: 3287 - DNA, 2978 bp, Homo sapiens; identical to SEQ ID NO: 3286

SEQ ID NO: 3288 - DNA, 2969 bp, Homo sapiens
ggggaggtaccgtttcctcggttatcttttttatttttttgagacggagtctcactctgtcacccaggctggagtacagtggcacgatctcggttcaccgcaacctctgtctcccaggttcaaacagttctcctgcctcagcctcccaagtagctgggactacagatgtgtgccaccacacctggctaatttttgtatttttagtagagatggggtttcaccatgttggccaggctggtctcgaactacggacgtcaagtggtccacccgcttcggcctcccaaagtgctaggattacaggtgcgagccactgtacccggcctgtttattcagttgtctggagttgacaggacagtcctgagtccagcaggctgtggctgtggcccctggggtgagtaggcagaatgaggtaggtggtaggaggggcagcctcactgtctcctgagaggccctggggtctccgctccagccccggccttgaggcttcggggtctacctgaaggtgtgttcctggggggacggttcggtccacggaggatccagaggccacccgcaggctgatgcagggccgccgtaccatcactgtccacacctcctcctgcctggtgtggcatccggtggtgcctgtcctcctgcgctcagcctggttctggtcagctggggaggaggggctcaagctccgaggcggcggtgctgcgcctgtacaccaggaactggatggagatctgggggtgccgccgttaaggccaagctgagcagagactgggttggacctgcccctgggggccttcgactcctgggagctgcctccctctcccctccctcccacccccacgctgcaggtgggaagggccagccataacctcccagccgctaccttagctgtgccctccactcagaacttctgcccggctcctcaagccctagccaagctccatctgtctccaagcctagcactgacttctccttcccgtgggcagcctcccttgaccctggcccaggatcttcgcttgctctcagctgtggcgtcctggaggcttccaggtggctgggccgttttggggcacaagagcctaaactttcacccctccctgcgcccggcagggacttaacaaatattaaaacaaaggccatgtttacttgctccgaaatgagacccaggtaacgctctttacagccattcagcaaacactttctgagccctcactgaaaacggggtcctgtggggagtgtttccagatacctcatcttacacaacatcctgacgagacagtggctgttaactgaggtgaagacacggcagcacagagaggttgactgtgtgccctgcgtcacacagctaggaagcaggggaggagccaggatttgaacccaggtttgtctgaccaagtcatgtgtctctccacactccagctctcgtctgcacagcctagaacattcctctcctgccttcgcctgacttctcctactctgtcaagtcacaggttcaatgagacttataggggcctttgctgcccctctaaccaggacggtccctggctagacgctcttgttgtttttctctgcagcacttggtgccactgcaatgaagtaattctttgatgatagcgttgtgtcctctctgcgccccgctgggctgtaagcttctggggcactcatggctgttcttgctcactcacggctccagggtccagctgggtgcctggcacacaggaggtgtgcacgactgggtgaacagatggagggagggagggagggagggagggatggatggatggacggatggatgaagggaggaagagacggatgagtgctgacgctgtgtgcaggcagaagcttccttgcccacaccccgccacctgccccacacgccctgaaggatacgatggtgtcgagcagcagcacgcccaggctgcccacaagccagggcaggtggtgcagcaggtagctgccctcgctctggccctcctcggggtttttgagcagcacgctcagcccatacagcgtgttccccagcatcaccagcgcgaacagagagtaggagatcccctgggtggacttccggaggaactggggcaggaggaggtcaggtcagagacctcgaacaggcctcttgtcactctggattgtaactgtccacatgtccacctgccccaccacagtgcacctgctctgagccaatctttccctgggtgcccagggatatgggcccgacacacagaagagcctcctcccacccacagacaagcccccccaggcccctgcccaggtccacgggagaccgtggctgtgccaggcctgtggccccacaccaccctgcattccaccccacacaggctctagctgcccagcaagcctcccctccccgactccccagcttctcctctcccctcaggcctccaagctcagcccctcaccttcccctgacctcccactcccccaagacacacatgggcctcttgtagcctggctggcaggccacgccacgcccattttccagaagcagaaatggaggctcggagattggattaacttgcccaagccaacagcgggagtagaccagactttctgaaccaaggctcctatgctgtgctactccttagcccagagggcccgggtggccaggccagctctcctctactcggccccacccagcccctgctggaggctcacgttggtgcggatctgaggcagccgggaaagcaggtacaacacgctggagatggagccgatgacgaagccaatgacttcctgccgggtgaagggctgtggggcagaagggggcacttggtgtctcgtaggagccagaggtgatcccccaccccatttagcacccatgaggctgtgcaggggagagccctggggatgagccagcctccatcccttcgaccgccacgcccacgcctcaccttgctgcccgactccacggacaggagcgcccgcccccggaaggcttccctaggggcagc

SEQ ID NO: 3289 - DNA, 142 bp, Homo sapiens
tccattttttttttttttttttttgagacggagtctcgctctgtcgcccaggctggagtgcagtggcgggatctcggctcactgcaagctccgcctcccgggttcacgccattctcctgcctcagcctcctgagtagctggg

SEQ ID NO: 3290 - DNA, 127 bp, Homo sapiens
cttttttttttttttttttttttttttgagatggagtctcattctgtcgcccaggctggagtgcagtggcgtgatcttggctcactgcaacctctgcctcccgggttcaagcgattctcctgcctca

SEQ ID NO: 3291 - DNA, 32189 bp, Homo sapiens
gcagacggcggagagcagagagggagcgcgccttggctcgctggccttggcggcggctcctcaggagagctggggcgcccacgagaggatccctcacccggtgagtggttggccatccttgccgcaaaggatgtgcaaaaggaagacggcatccgcttctgggatgggctctgtcctcctggacatgccgagagcctgcctgatcctgggtcctgctgctggaggcggccacttcgcctggtccccgagcgtccgcaacaaaatttgtcagaaagaaaatcttgaggcacatttccctggggggaagtcagggctcctctctggagggtccagtccttaagggtgggctgggtggtagggacttcagttcagaggagcgggaggaatcagatggaactcctcttggattcgggtatacggcagtcactggggggcgaaccccggatttcctgtattagaagccgcctctagaatcgcgttaatagtgggagatatggcggcgatgccttctgcgtgccccatgaattagggggggaagcacccgaatagaagggtctcccgggcatatttgcctcgccagctgttggccaggtttttggtggatcgtgggcgggaggagtggaggttcctcttcgcgaggttttccgaatccaaatacacaggtttagtgcagtgtggaccccaggcaaaatgtggagtaaaatttctacccgatatcatctggttctgccctgatcagccactttcacagtggagagagatggcgcccaagtgcaaacctgccagtagccccctaggatcagtccttgccgaaggggggtcgtgggattgggggcactgggagaatagatgcagggggtgggttggggaggagagaaggccgtgtccttgggtctgggaagagggaggagagaaatgcagaaaaaggggtgtgttgctggggtctggacgctgggagctggggatggggtgccacgggggtcttcagagcgttgcgtggaggtcgctcgaaaatcctgacatgttgcagtcttggacttttggtcaaatcgccttttgccatttcctttgtcagagtcaagcccccccaggccgccccctcccaccctgggccggcgggcctggtgggggcgcaggcgggtggctacgtggcaggtttctggaaggtttcctggctggccgcgagagggcgctggcggcactgcggaattttggggggcggggtggggaggggaggtggcctttgttctcctgatggagggggtcgggcgcgggatctactggaggatcctggattcgtttacccaagagggaacagttttgagaccccccggattcactgcggagtggccgcagaggccggggtcggcctttgcgccgtggcttcgggtgttgtggaggcgcacagaggcacgttagttgatttccagtggtttttggtttcgggggtcttaggaaggtgtggctcatttgagcaggatggagagagaggctgtgacaaggtcagtgaggggccatcgtgcgggggctagaaattgttgttgtggcgaaggagggaggcacgactttggaggcgtgatgttgatgcctgggggcgaaggcggggagcggcgtggtggccccctttgcgttactttccagcgatgtcacaggttctgtctctcgttccgagaccacccacatgcgtgacagcggtgcctggaggactgggtctttctgactttagtgaacgtgtgtttaattggattgacgaaggtgggagtcgggatttctgcttttccctgtagcaggcggagcggcgctccagaggggcctggcgcaggtccgctgggtggcccaccttcctctggggctggggcccggtggctgggggcgcaggaggcgcctggtgcgggcgggaggcgctgcgccgcagccacaggtgggctctggctggtggtggctggagaggcgtccagggggcgtacgacctggcgcggtggcctggggtgggctgtggagcccttcctagcctgagacctgttgggcaccccctgtccatccaggcccgccgggcgcgggccgggggcgccgcaggtggctgctgcactcctgggttacgggtgcgggccgcgcgccccctagcggtgtgtgccagccccgctaccttgggttttgagttgcgcacacgcacacagctaacacttgtgacctgtcagtcaaatcatccttaccccctcccactcctctcctccacctcccatttctcctctccctccaccctttctcatttcctcgtccctcctccccctcctatttttcttctccctcctccctctttcctcttccctcctccctcttcccccctcattttcctcatctctcttttcccctccccttctctcctcccctctccctgcccccctccttcctccctccatacccctccctcttccctcccagcccctccctactgccttcctcagtcctcccctttgccactcctccctgcctttccctctgcctgcccccttttgctctctgctgttccggtgctggccgttagaggtcacgaagatggtttctaacctgcccccctcccatgccatagggtctctcctcagggatgacatcatccgtccacctccttgtcttcaaggaccacctcctctccatgctgagctgctgccaaggggcctgctgcccatctacacctcacggtacttcaaccctcctgctatcatttcataaccaacgtggcgggcagaatctcccaaccccaccaccatccttgcaccacccccagacccactagcaattaaaagacaattttaaattttaactaatcagctttaattgtaattaatgaacttaaactgtaattatgatctaggcttgggcttttaagcaggttctctaacctttgatcaattgcagagggcactaggagcacggtttcctggatcccaccaacatacaaagcagccactcactgacccccaggaccaggatggcaaaggatgaagaggaccggaactgaccagccagctgtccctcttacctaaagacttaaaccaatgccctagtgagggggcattgggcattaagccctgacctttgctatgctcatactttgactctatgagtactttcctataagtctttgcttgtgttcacctgctagcaaactggagtgtttccctccccaagggggtgtcagtctttgtcgactgactctgtcatcacccttatgatgtcctgaatggaaggatccctttgggaaattctcaggagggggacctgggccaagggcttggccagcatcctgctggcaactccaaggccctgggtgggcttctggaatgagcatgctactgaatcaccaaaggcacgcccgacctctctgaagatcttcctatccttttctgggggaatggggtcgatgagagcaacctcctagggttgttgtgagaattaaatgagataaaagaggcctcaggcaggatctggcatagaggaggtgatcagcaaatgtttgttgaaaaggtttgacaggtcagtcccttcccacccctcttgcttgtcttacttgtcttatttattctccaacagcactccaggcagcccttgtccacgggctctccttgcatcaggtaggggctttgcagagaccatcgacgggctgacttgagtaagaacacgaattatgcatgtggccatttccagagcactttctatgtgatatgaacatgtgatttttatgtaatatgtgtatgtaaacgaggcagcctcatttccaggtgaggatgcatttggtagtgttgatttttgtaatttaaagaagctgaaagggagagaggacccgtgaggactgaactctctgtcccatggggtagggcttacatttacattaaagaaacagaaacttgctgggaggtgtaagtatttggtcacattgctggcaacagaaggggttggagttggacccagggtgccacgctagctgccctcaccccttcttcccctctggcccagagttatactaagagtccttttatttcaaaccaaatgtttgacaatgggacagtctgtttgaaatcccagctgcctggggtggtcttgggggtctgggtggccccagtgctggtaccatgtgctggcttcaccttttaataacagtgtgaccttaaacaagtcgcttaactactctaagtttcagtttctttcatggtctaaatggagattaaaacacacacacacacacacacacacacacacacacacacaccccctcgtgtatctaccccacagggcgcttttgaagaccaaatgctgttactactatgaaagtgctttgtaaattgctgtggaaagtgtgagctactcaagcacccgaggctgtccctccttgctcacatgtccagcccaattctcccttagtgagaacagcactcagtaggtgctgtgtgtgtttgtgttcaattaagaaattccagaataaataaaaatgaattaattcaacaaacattttctggggcaccgacaatctgcccagtgcaccaggctaggtatctgatacaaagataatgaaaacagtctcttggaacctaattggggtcctcatttgaccaggaatttctttcgtcccgttttaagccaaccagttttgtccggacaagacaaaaacaacttgggctgctttagagaagcccagctcagtgtagacaatagctgcccagcctctgaaaggggctgattggattatgtggcaaatggaggtgcaaggatgacttggacggtgacaaatgaagtgggcggagacctgctttgagttaatccaggctattaggaggggaccttttgtcttccagagactggcaggagcttttaccagtggtttttacatccttaatgttcaggacgaataatttatggtcagtgaaaatccaggccccagtgagattcgagtgggctgtaaaatcgagagtcctgctcccagtgagtaatggtagtgaatgtttctgtcactttttgcaaccgtccattcatttgatcctcacaactccctgtcctgagccaggaccggccactgccactcccagggaaacagaggctgtcaagaggctccacagattgggccccactggatcattgaacccctgttccctgagttctagaggaagaattgtacctgtctcagtcccggccacctccagaaggcctccctctgcatttctgactttgctgtgccggcagcctggagcctcccaggtccctgctgtcatcttttctagccactacagtctctgtctttcctttcacagccaagcttcttgaaaggcctgtctacacttgctgtcttccttcctcacctccaatttcctcttcaacccactgcttcctgactcgctctactccgtggaagcacgctcacaaaggtaaagacttttctgtggcttaatccttgtcatgttttcggctcatggacacaaggacacattttcatgccttctctcacagggctctgcgtctccggttcacttctgtgtctttacactcccttcacagagacacttgctcccccttctctcgttcttagcatcccctaggaacttgcacacccaggtctctcgacttctggacctgcttcttaccatgccgtcttaagcagtcaggagtcgctgcctgggttcgagtcctagttaaattacttagtgctgagaccttggggtaggtaaacttttccaagccaggtttatctcagtttcaaaatagggttaatcgtctttatctggcaggtcaggtgggatgtctcacaggtaagcaccagatgccatttgaaaggcttgaagcaaagtcaataaagcattcatgggaaaatacaactggaggcaccactagattttcgtatacattaggttcccacggggaggaccgaagagagaagaaagaagtggaaagggaggagcgtgcaggagagacaggagaagagaataactaaacaaagacattaaagacaaaaaaaaagtaggaaagggagacttagaaaatattaaaagccaccaaaaacacatccaaagacggtttccccttacgttagttgggctaaaagaaagcaaatgggaagaaggttttaaattgattatcccagtgacaaatcccaggaagctttcacatcaaatcaccctattctgggtttttaactccttccatcgagtttaacctctttacctcccacatcctggtaaaccctgccccctccctaccgccccctttgctggtgattaaatcctgaaggtacacgaagtatttcagtgaatgaatggctaacagaaaagggcctcccctcccccttaccctggcggtgtttttcagttttattccactttccgcccttttcccttaatgaacacagggctaatctcgggccttgtcgaaggaagaggctgcagacgttaatgaggttagctgctggattccagtattcgtcgcataaggatccttctttgtctgcgaaggaaaaacacactgattatcataatgaggtgaactggccaccgccgggccggggcgatgtggcttcttaagccacacttctaattttggtgatggagccgacatttctttggcttctcatttaagtctttgcctctgtcccagtgcgaagtccattcagcggggttgaaagttgcaggcagctttgggaaggggggcgtcggacagggttgcattgtagaaagtggctttgttcgatccttcgcacagatgcaaatggccagagcattcattccctttcttcaagagctgaggactgggggggccactggtgatcagttcccaactctagctctcctctgactcatctcaggacccattgaggacatccaaaactcactcaagatcaccaagtggtaggaaagtactaactcctgggcatagccctaggggagtgactacaatgtgaatactcatggaatgcctagccaggtgaagaagtgaatgcatgttggcatcccagagggaccccccttaagagggcatagtttggggttcagatttgactccagcatactgttgaaattgggcacagggggctagtgattagtcaggatcaatcagtggagaggagattaaaactcacatctgggagtccggaatcagaacttgtagttcttttttttgaaatggagtctcgctctgtcgcccaggctggagtgcagtggcgtgatctcggctcactgcaacctctgccttccgggttcaagcaattctcccacctcagcctcctgagtagctgggattacaggcgcccaccaccacagccggctactttttgtatttttaggagagacggggtttcaccatgttggtcaggctggtcttgaactcctgacctcatgatccacctgccttagcctcccaaagtgctgggattacaggcgtgagccaccatgcccagccctatagtagttcttcttttgccccttaatatcttcacccacatgtcctgtaccctgcctgaaccctcctcctctttttgttctgatctttgagctccctagagcccataattctttagagcaggtatgtcccgagtctgaaacatgcccttatttgtcccaagctctggacatttctcaccccaaggcggatcaatcatgattaaatcactccaattaaactttaggctccagtcagaccttcagccaaatggaaaaaaaaactaggggataagggaggtagttggagcaagaaaatgttattagttgaaaccttacgggaccttcctcccttagtgagtctgttggctaaaggttctctggcttcgtgaattagaatcggatactgtttccaagttagcaaaaccaactctaccccagcaccccacgaggaagaatgtggaaggatctcccattggccggttggggcaaaagcctgaggcaatctttcatccccttttgccaaggcgagactttcccagtgacggtgatgtagttggccactctgactatgggtggactcgggtgtagacctctgaagctgagatcacacgaaaacctggcctccccgccatgtagctgttggagagtagaaaaatagagcacgcctgatgtttctaaatgagaagactttcaatagtaatgaagaatccatggcactctcctcaccctcaaacacatggcagtcattcacatacaggccccaaagccactgttagtgctgcagtagctcctgtggacattggaaagcccggagagggcgtggaagaaatcagctggcccccggcaggttctctggggttttgtgcccaaggctcctggagccctaaaaactttcaaaagttaactccccacgtccccatcctgcttgggtttctggacttttctgaggcaccggcagaggggtctcgttgctcccttgagtgtaggggcagccctttaacctggctccttgagtccctgctttttctgcttctgttgccttcttcctcgtcttcctctctctcaatatctccctctctttgtccctccccagttcctgacctggccatcccggggtgcccttgaccagccccgtgtctcctcagggtgtcccagcaccagcctggcacagagtggggctcagttagagtatgtgggatgttggtttcgccaggtgagtgaatgaaaggactcgaccaccacagctgagccactagctgggccatgcgaagagttctaggtgcaaaggctggagggtggaattcatttttgagaggtgtgtgagcagcttccgacccctgccccatttgaacgggggccttgctggtcgcgtccctgcattcacccgcgcggccatcccgtcatccaacagttgatcctaactgagcacgcccacggccctggtctggcctgggcaccggccaccgtagcccatcccttgatggcctctgtgtccccaggagggcgggccggggggttgcccaggggctggagcagtggactgtggctccatagaggtaggccggagggtgtgagggcagattcaagctatccccagggctctgctctggtcggagccagccccttctccctctctgccttccccgccccattcctgatgctgaactgttctggacccctggccctgagtctctcaggaccaaagtgggcacgggaacagctgtagtgtgtgcccccccgggctttggccacaggtctccctctcgaggtgtggttgtgactgcgacccttcccttgccgtgatgccttcctcccccggggcttggtccagctccttcactctctagcagctgctggggcccacctcccatgccgaggaccagcaggggaaacctccagggagcatctgcaggctctgcttctgcccggctgctggcttgctctccctggtggctctccagcggccagcttcctcacccacccggcactccgctttgctctgtctcctgaggtgggcctgaccaacctccccttctctgcctcagtccctgggctccagggctcagctccacagccctctgcctagcaggctggttctccctgccaagcccatacctgtggtcacctggccctcctgtggtctgagtaccactcccctgccccaggagccactcccactccagctgcctgtttccagcaggttcccagtgcccccgacaagcccctgctggtgtctccatctcctgccaagcatcctccagtgcctcctcctgtgggcctggcctcagggctatggacagactcctgtcccatcccagagacccctcgtgatcgtgccctggtgggtgttgcccccgcctgcctttgcctccgccgtggccctgagagtcctgggctctgccccgcccggtcccttgctccccactcagttctggatttggggctgcccctaacccagcccgttgctgctttgcaccttttcctgtcattgggcatcccccagtagtcaccccactccaccgaaaagtaaactgcaggtgaggccgtgccccgagtctttcttcggtgtgtttggcttttccggggcgcttgccttgccatgattctaactctctgcccttccccaaggcacgtgggccgtggcccggctgggtcggctgaagaactgcggatggaagctgcggaagaggccctgatggggcccaccatcccggacccaagtcttcttcctggcgggcctctcgtctccttcctggtttggggtgagtttcttgctttcttgagacccaggattttattagggtcagctcatgtctctcctctctgatcaacaagagtgtcaacatttaatttggggaggaggcaccctgccaaggtgaattctcttcacatcagccccaggggtctgggggccggagagctgcctggagtggagacccttgctatacccagcaagcatgtgtgggggtccaccctggctgatggcatgctgtgggccggcgacggtaggtggggagtgtccacctccactctagacccccgagagcggctcgggccaggcactcaggagccctcagtacggctttgctgaacacattgcaaaagggatccagggggcacttgccctgcccacacccggcccagggaccccttcggagaggaggaaatgggaatgcttgcctgctcctcagctaggaagacatttctttccaccagccatggtagcgtcaccccctgtgagaaccgtggtttctcacacatgaggctttgataatgtcctttaatcaaatagtggtttttgagcaagttcttctctttcctcctttcctcacccctgaaattgcaatgagacgggaatgtttttgtttgtttaaataaaacagcaatggtagagaagaagaaagcgggattggagccacacaattcactcgaggacccatcatttgtttatttgtgttttactaattcaagatgcagccgggagccgtccagggctcgggcctggggttgttctggggcgcctaaggctgggctttgcactaaggaccagagggtctacttgggtgccgtggagcacccatgcagcaaggtggcttgcacagcagccaggcgaggtgtcgtcgagggcgggggctcagggtggcatgctggacggccatgccaggctgaagtttgggctggcaggaagagaggaggctcagctgaggccactttcctttctgggggtcccagggactgagtctgtggctcactcagggcgatggggtgtttttagagccactgccctgggaggcagtgtcaggatcctggcacccctcatatatgacgcccctggggtggccattgtggtgaatgagtgcagttagacttcccagagaagctgggtgggcgctgagaaaggtctgaaccgtggggtgaggctggctccattcccccagacatttatggaggcttgagggggccctagcactgtccttggcccagatgccaatactcccctctggacgcccacgaatggggtctctgagaaggaagtggatgaacacagctgcacgctgggtggggcccagcctctagtcctcagccatgtgcacgcatcagcccttgtgcaggcctccgccctccgccaccccccacccccggagtgtctctggtttccgacgcagcctcgtaatgctctttaatcaaacagaggatttggagacagctctcctgcagccctgcacttctcccctgaaattgaaatgggatggggatattatttttaaacaaaatctggcagcgtaggcagagggggcagaggcgctctaacctggggctgttgcctttgtctgcttgtttctgctctctggagagccccagagcctggagagacggggaggggagtgtgtgcccagggctaaacccagggagggggcccaggaaggctctgccccgtgacatttactccaaggctagcatttgctgagccacctgcaaacacagtgatgtggagaagaggcccgggaggggaggtttgcacaggggcaggctgctggggtcctggggggatcctgtcccaagcttactagaatgcattcgagtaactggtctgagccagatgccctcagctcttggactggtttctcacggacatctcaggactttcccaaggtggactaagcccagggacaaagtcaaagtgaaggccaggggcacacaggagaggcccagataggaccaagctttggcagcccctggctctcaggggttgaaatggaaccctctttgcactgagttgtatttcaggtactcatgagtgtttcggtctcaggcaaacacatatttggggttttgtgtgtcattaggtataaaataggtaaaatatgccacgttctcaatgaaagaagttgaaacgtgacttactacgtcagccttgctggtgatcttctcgggaactgccgaaaggccactagtaagtgctgaaagacatgatcattttcaggaaaattctattttgatggattggccaatgcctgagccatagcgggtggagatgagaccctgactgactaggcagtgagccacagaggaccctgtcacatcagcggagggcggtgaggggtctctggccatttgtcatcgtgctgattcctagggggctgcctctagtgggactcttctgggtgggtgcaagtgtcagggtaaagacggcggtctggtctggaaactggctctcctctcgcacctgcccgccctgggtggttgggaaaggaaaccaagagggtagctcaggcctgagctcgtggaaaggaagaacatgacccctcattcgctcactcgcccccacattctctcacctgcgagttgctcattgctgctttcagggcccctgacctcatgcctcctgagttgtgattcaaaccccaaatgaatttccaagtacatttctccaaataatgtcaaaacctggcaagacttaagggcaacaggatgcatgtgtttcttattcattcatttacataaaataacttaagtgtgttttttatgagcaatctgacttccaaaaagaatgaaaaggaaaatctacccatctttaatgaacttgctaatgaatttttccttgcaaagaggaagggagcttcctacagaagggggtgtggagggagacagattcaggtcccaaagggttaaagggcagtggacaatgcggaagccagcattgtgagctgcagtggaaaagccctgggtcgctgggagtggcttctttttaggagactggaattaatgagttgtgaagtgtcccaaggactggttccccctccctgctgtttctctgagccctgtcccctcttccaaaggaggaataaggaggtctagcttcgtctcccatccccgatttgagcagatggaagagtctagaaaagaggtgtaccttttgaaacgaggcctcagatgtggggttcctggtctggaaaggggaaggatgaatctggggtaggagagggtctcgtatggagccccattcagacagggcagtcccacacctgggctgcccacaggttcttgggggagtctaaggaaaggggagccacagaacaggcttgcctccttggcatggattgggtcagtgtttcagagccaggaaaggtgggagtgtggggggccctcggggctgatgagggcgtgcagaccctcccctcccacctcctgtcccaggagccctgcagacactgcagcaggagggcactctgccagaagaggggttccagctccagccggatccagcagacatggagagaccccttatctttgccaagacgagctctgcggtgcctgagaggcccgtaggtctggaattctagggccttctgggtttgagtcaggtcctgaggccagggcctgggccctgatcctcaccatggaaaactggtcactttactcaggataaactgtgatgaggacttgggacatatctctgtctgtcctctcagctcgcgtcacccctgagcccttggcgatcgtgggcggcccgtgtacagagcaggtgctgggtcactggggccgccgtgggcctcccaacatgagggactgtgtgtgagagaggagttcattaagggagaggatggtggtgaagggtgtagccatgactttcttaactgctctccaatttctttgagcttaaaaataaatccagatggagagttcttaagtcccctatcctgggagaaaggaaggctgcccaccaccttcggcttgcctcgactctgagcagtgaatagggtctttggcaggggcttaaggaggagactcttagcctgggagctcccagggctgtttcagatggaaacaaaggctcaggccgagaggaatgtgggggagccccccgtggggaacagccacctggggataattgggagggctgagcgcagatgagttttcccaggttctgtgaatgcgccctttcaatggaaggtgcctttttttccagatgaaaagaagaaaacgtcaattaccttcccctgaaacggagtgtgtgtgtgttccctcccaggggttgtgtggggccccttgcccttgtgtgtgtgtcgggagctccaaggctgcacaatgacgcacttaaccagccactgggttcgcgcgaccctgggatgctcacgctcttagattctagggcttgattttgaaagtttcttagcaaaggggaatcagagtgattgagcctgtaaacaaaaatttgatcaacctgggcctgatgcctgaaatatagccaaagagacagaatggggctgcggggagagaggtccaggatggaaagttggggaaggaggacagtcgggggccaaaggctgaccgcatgtctgcgccggcctccgcgctcacagctgggctgctccttctgccaccccagccctttctctgggccttcctggcagtggacatagagtgattccctactcaggaagttggcggtagggggctcagaaatccacagggctgttgtttcacagttagccaggagaggagggggtcatggtggcccgcagggatggtgggcagctgcgagagaggggacgcttcaggttagagcgaagctgtttgcaccaccactgccccagactgccgtaagggtagggccactccagaggcaccagggacaaagtccctgccgtgacaggaggggggcacaggtctcagtcttggctggtcactgactttgctgctgctggcttctgagcctcagagaggtcagcagtcttccagagacctggttagagcctgtgctcagccctgactatgggtgtgaccttggcccctgtctccagccccttaggcctcagttttcccgtctacgaaatgggcgagtgcaggcccatggtcgtccgagtggctcggggtttcttcaggcctccctggaggtcatctgtcgtttgtttgctgggtctttggagttgttgggactttgggggtcactggtccgctgccccctctgctttagaggtggggaaaccagcgatcccagaggcccggagccttgcccgaggttgcacggtgagccggcagcaggccctggaggtgaagcccctgccagttgccagctcctgtgtgacctgtgtggtcggggggggtcacagtcaccggtcattagtgtgggtcagagctcttgcccaaagaaggttccaaggggctgccccatgagctgggatgcagggatcgtgttttatggggcattattccaaacaggcaggctgctggtctggtctggaacacctttttggtctgtagagtgactcttgtttaatgagactggacttgtggcttcagaaccaggagatgttcgttcccccaacccccgtggctcaccttgtgccttttgggtcctgagaccctcgccagcgcctctgttggcacggtggcccagtcggctgagaacttcctgaaaaagccaacaggatgacaacttctggaaaagtgatcatcacccgcctgcactggctgcccatcttagactcagctttgccaacattcccagctatctctgtgtgctgcagtgtgtagtaatgaacagctcacaaaacctccggctgggcctgcacctggttattaccgtggtgggctgcagcttttgttttgtgaccttggttgctacaatacctgcgagctgaaatgaggaatcgaaaaattgccagcttcaattagacgggcagactgctttcccaaggctgcctccgccactccatccattaacggtaaacaggcaccaaataggccctaattctctctaattgcccactcctgaagcaaagaggtgaaattccaggaagaggcgtatgtaaacatcctctgtaacctgaccaagtaaaattagagggctgatgggggcctgcgagagagaggggacatgatttcaaaagatgtcccaattacctctcctattttcataaatgggtctgtaatgtccagggccccggcctcacaaaggtacaggaaattagctctgcaaagagcttgcatttgtcaggggaagttgtaagggggtggtgtttactcaacaggtaggaagtacgagatctgaggcaagactgattatttgtgtaacgacgggctctatttcttgagatcaacattttaataaaagtcatccttttaggtccttttgtgtttgaaacagccataagttgtttataccaaagacatgccagatcagttaggtgctgtttgcctccagaaaagaggaacttttaaaatcctaagatgcagagctagagttttctaatcccattaagctgtggaagatgtttttggagtgttcaccaatgctttctgcgtgggtcatgagctcactgcacgcacttatgaggtcttccatcaaatgcttgtgacaattactcctctggactctataaggaggcctcgtgtttttctttggttccagacagtgactcatctctgcagcttttctgacatttgttaagattctagcccagcactgcgttattaacacatcacagcaagcccagagctggcacacgcagcttttaaaccaaggcacgaatttgctggggcttctctgtagcagagcagcctgcggtctgcacacaagagttaattaaggacggtcagggactctgaggtttcatggggtccctggagcagaagcaggaaaaaacccagatgctccttcctgcttctgatttctccgctcctattaaaaacacaaaaaagaacaaaacaaaaacagccaaacaaagcacccgcctctgattcctgcgggaaatggcagtgcctttggtcgcgctgtgtgttcttggcctgagtctcgttgccaccttaggacgtggcgatggtgagaggccaccccagccacgcacagtctcggagggagggtgggaaacggtctcgagtggtggtcagtagataatgggtggtctggcagcctttaggtaaccgaagtcggcccctcagtcacccatgcactgatcattgcttcactaacacttattttaagacttgttgtttcttggttatcaaattaaccagttatggcagaacagggtttatgaagggcaaggccagggaaggagattttaggaagatttggaggcaagaagtgtccccagtgccctggccgggtcttggacatcctggctggagacatgactaggaatagagaggcagaggcagcaggggtggcccagatggcaggggtgggttggagagatccctgagaggcctgaggacaggcggcagtcttgggagcccctgaagacctgcagtggggcaggcagctggagtcaggtgtctcccgggacctgttttttttttttttttttttttttgagacagagtcttgttctgttgtccaggctggagggtagtggcgcaatcttggctcactgtaatctctgcctcccacgttcaagcgattctcctgtctcagcctcccgagtagctgagaccataggcacataccaccacgctgagctagtttttagtagagacggggtttcatcatgttggtcaggctggtctcgaactcctgacctcaggcgatccacctgcctcagcctcccaaagcgctgggatgacaggcatgagccacccccctggggctggtacctgtggtctgtggcttctgcctgccctggtgcccccacatctctctcatggcctttctgtttcctgggtggctttgtgggggtgtcccatggtctccccctggcttcctgtctccacctgtgcctaatccaggaaacggtccccagagatggtgttttcaaacagaccttggccctgtcctcctggcccagcccctggctgccctatcacctagcttgctgcgttggtgggacctcagctgtcacaggctacctttctatgacgcctcctcaccttaagtagactctgaacagattttaaaagccattcattcaacacattttttaaatgaataaactttttttctgtgtagttttcagtttacagaaacattggtgggaaagtacagagaattcccagatcccgtccccaccatctcccctgtcattcacacgttgcctccgtgtggtgtggtctgtttgttccgatcgatggaacgactctgatacatgattaactagaggccttggttcacatcattagggctcactctttgtggcgcacatcctgtgggtcttgacaaatgtgtcatgatacgtgtctgacattgctgaagtcaccttttcttaaagcttaacattttgggagtattctgaactatgtttggcccagcctgctgcccgatttttataaaaaagaaaaaacaaaacaaaacaaaaaaacaagttaaaacgtaaggcagatcttgacactgaagactcgatgtgcctggccatggtgcttcccggggcctactgcactgtgaacaaaattgccacagtggagttgtctgtccaggcacacaacgtgtgtgccatggttttgggaaacgctgcccattaatagccctgcagccctctgtgggctgccctcccggccacaccccgcttccctggtctcctccagggccagccatcctgctcgccgacctgggcaccttgcttctgccagagcacaggttcatgccctgtcttcagggcctgggccacccccgtttctcatctatgcagggtcctaagcctttgggtcccacagagcacgacttcgctccgtgaacagcaccaacccaagtctgttccatgtctccacacctgccccttccgctccataggcagctggtgggtgagtggagtcaggagagaaatgcgtggcttctccaattccacacttgctggaggttggggagtctctgctccaggccacccctgcccgccccccagagctgttgtcctcatccgccctcctcctcctcgccggcctgagtgaggttctactctgtgacctagtgccttcttgttacagcggaagccatcacctggatgcctacgtgggaagggacctcgaatgtgggaccccagcccctctccagctcgaaatcgtaagtggctggagtgtaaagaacacacatgtggccttgctgctgagggtggggccagctgcccggagcacaccgccaggcggacctcgtggaggggctggcgggcactggccgggggtctgtgcaccgggaggtgggtgcccatcgagtcaagccaagtgcagacctgggggctcctgttttctaagacaggagccccctgcctccttgtgttgtctctgtggcaaaagaattctataggcgggcttcaaatgtcggaccccaaaagaatttcttctttttcactcttctaaatgaatggctctttcattattgagtctccctttggctcttgtgccgcagggcagactaggatggaagtgccctgtgagctggggggcccttcaaagggccaaggagaaaacgcaggccgagggaccagccttccaaatgggcttcaagctccaatgacctccgctcgccccctcgaaatgtctggaaaacataatgggcagattttctgtcttcaaagtttccggctaaacctcttcaagttctttattgtttgggactgagacactcagccatgttaatgggtagtttcttttgtatttgccttgaaaggccaaaatatttttatattgccacagacaaagccacctatttaaaaatgaactccatgtccgtcgtttcccaccaggagactatgtaccatgtgtgtgtctctatgtattctggggtcttgaaacaggtttctcatggggatggtcattcaccacggtccagaggggcagaacaggcggcgcttgccttgcccagggggcctggggaacgtgggccctcatctcagatctgcccccagtatgtttaggacgcgagccccagaaggatctgggagtaaacttaacattcactgtgtctctgctctgcatccgccatttgtgtgtgtttctggactgtgggctgtgtgtaccttggttggtgactcagtgagaagaagcaggaatgccaaagatactgtgaatgttctgagttttgttgctgttgttgttgagaggttgtttcactggtatctattgcattgtataataaatgaccagatgaatgaatgagtgaagcaagagagaatgaataaacaagtaaataggtaaagaagtaagcaagccaggatgagagtgtgtgtacacaagaccatggttcatccgctttgatggctaggcaatcaatatataaatagaaaaaaaccagtgaatcactaagtaatagggcaacacacaaagcgatatcaggtgattatggactaaggggtatgtgtaactcaaatatatgcctctgacatttgacaatgaaaaagaacctaaatgaaagaaagaatggatgtatgagtagtgaagtgcagaatgagacatagattttgaggcccgtcaaaatgaaaagatgcaagttagggaacaagtgatcaaaagggagaagggaaaggttttttttaaaaaaccaaaacaacaaagaaaggttaaaaaaaaaaacagactagaggatgagtaatgagtaactctgtaaggaggaccatgtcagactattgtaagctaagcattaggactgatacaaataatatatgctcctggcatagaaaaataaaccacagagaacgagttcaaagaatagcaaagaaagaaagaggacccagtgggcgaaagatgagagtgtacttttaccaaaagttatctaagcctgagcacttgaagtctgcacataaataaataaatgacaaaagaaagaaaaaaaggccaaaaagtctacattgcgtgtgtggatggatgaatgagcagtgggagtgcagcgccaggtgacaagatgttgtgaggggttttgagtcatccagtcctgggcactgaggtctgttagatgaaaggatatgagaaaggtaatattggtaaataaagaaataggaaacaatgtaacaaatgttaagtacagaaatacattaatgggtggtaaataaagatgtaaaagaaggcaatgcgatcgatggtggcaaaagatcatcacagattaagggctatggctggtccacttctagaaaaccacaggctgtccattaaataatgaacatctaagtgaacaagtcagtgagtacctaaatagacaaggatgaggtgaatgagaagacatggccccatgggtcctcctgatgagggtgttggggtcccccctgggcaccccagctgcatgaaaatgaaggacaggaggtatggaaagctatgacagaagagagaaaggaacggtaaaaagaaataacaaccaaatggataaatgggtagatccacgagaagagttaggctaggacttgtcataagggcacctgactccactaatagaggaataaatgcctaataaaaagagagcaagcaggaaggaaggatgctatgaatgcaggaaggaagtaatgagtgagacgtggaaccgcacggccaaggatggacgtttgcgggtggctttttgatgcgtacagccaagccactccatggcaatgagctccgaagacaaagtgcaagagagaatgagtgagagagtgagagagagagaaacaataaaaaatgggaagaaatgtaaaaaggaagaaaggaagagaggtaatatattaaggaataaatacatgcatgcagatttaagacagagccatgctagaacaggaatgaaaggctgtgtgaaccaagcagaccgcttaattggcaccagtgctgctggtatggtcaatcacctactcaactaaggaacggctcaaagcatacacatgggagggaggagtggggccacagagagagggcccattagttgcagattacgatgtatccagttaggtgcacctgccttcgagaagtgtaaaaataagtatttacatagaaagaaagactgaatggatgcacggtgaatgcatgaatgattgaacgacagaaaagatttgcattgaccgatgaggagggcattgtagacagggatgagggtcattgatcctgggtgcagatctccaaaagaatgacagaaagaaagagggagtggtggaaagaaacaataggatgggaaaaaatgaaaatagaaaaaaggaagtgaaagagataataaataattagatcaaataagttgatgaaaggggactggtttagcacaagccatccacattaattcaaacctgtggctctgaagtttgttttttaaatgaccacaagtgtaagactgaatgaaagaataaatgcgtgcattccataggatgcaagaaaaggagtgaggaatgggaaaattggaagaacgagagagggagagatgtaagaaaagaaaggaaaagtgaagtaggcatatgaaagaaaaggcacttcttggacaagcactgaaatataatgagacagttttacccattaaatataataaacagtaaacgttgaggttcatcaataaaagcacagatacctgaatagaggagtgacctgaatagaattcgttcagccgaacgaatgagaatggatgattttcactatcctgtgcactcaaggcccaaaagagaaagcaagagaggagagaatatggaaacgtatgacaggatgtatataagcaatacaaacatattgaatgaataaataaagacataaatatgtgggagagtggaccacgcaaggacaaaaagaggagagaaggcagcaagaattatgactaattcaaaactgggttcctgagatagttaaataaatcctgcaccaaatccccagggggagaaattaacaaacaaaagacagccccacacggaccagtgtgcagaaggctccaggaaccgcagattatggttaatccaattctgtgcacctgaggtccataaataaaagaataagtattgaaatgaaagaatgacagaaagaatgaatggacacatgaacgactgaattagaaatggaaatgcctggcacagccaggaaggagctgcccatgggattgtcattcatctcactctgggcacctgaggtccataagcgtgaaaagaggcaggaagagaagtgtcagggagtcaaagatagagctaaggaaaggcaaaaatgaaactaaatgaaagcgaaagggaaaataaagaaaaaccaataaaaaagagaacgaatacgtgggtgtatctgtaagagtaggatctgttaggattagtcataagactgtcagtaatcctgaagatggatgagataatccaggcccaggttcccagggggagggaaaatggagaaaatataaaaagatgtgaaaaaggaaaaaggaaaggtaataaacaaacaaccaaagtgataaatggatagttaagggaggttgtctgaacagggattataattagtttacatacatactccttaaacagataaatacattacacctttcaaagaataaatgaaaaatagagagacatacctggctccaaaacaaggctgtatcttctgccactgtaataaaatagatgcaattgaggttcataaataaaagaataaatacttaaacgtgaaaggtgactaaatgcggggaagaaagattgcaaataaatacatgggccaaagatgtttggtttgcccatggagttttaattaaaaaaattaataaggaaaacaaatacccaaaataaggaagactgacaaatgagtgagtggatgagagagtgaatggtgcttgacgtaggagcagtagtgctttagggaccagcatgaaggtggtgaccgggagccctgattcatgggattctgtccacctgactttataagaaccaagaatggctgggaatggtggctcacgcctgtaatcccagcactttgggaggccgaggtgggcggatcatgaggtcaggagtttgagaccagccagtttgagatcagcctggccaacatggtgaaattccatctctactaaaaaaatacaaaaattatgggcgtggtggcacctgtctgtaatcctagctactcgggaggctgagagaggagaattgcttgaacccgggaggtggaggttgtagtgagccaagattgcaccactgcactccagcctgggctacagagcaagacactatcttagatcaaaaaagaaaaaaaaaaaaagaaggagaaagaaccagagaaacataaggaagagtgagaggaagaaagaaagatgcaatttgggaagaaatgaaaaagaaatgaataaagaataaaataatgtaacggtcaataaataggacttgtgaatggaggcctttaggccaaaggctatgattaatttcaagctatgttactgaagtccataaacaaaggactcagatctaaatggatgaacgaatgactggaagaaagggtggtaggaaggtaggaagaaaggaaggagggaaaaagggaagagaggaaggaaccttctttccagtcctgtgttctagacagtggaatgaagtggtccccagggagggtggctgtaggcatgtcatgtgcttgtcacatgcacttgccctggcagggaggagctggctcaggaagaccctggtcttggggtgctgttgccctatcttggctgtgtgggccatttcactgcatctgtctcttcctcagtttccccatctgtaaacctggagtggcaccagctgcctactagagttgatcttatgtgtctctgttgatggtaccccatctatggcctggataggcaggaagggcttggaccctgagccccgcagaaggttgcatgaacgagtggtgtgaagcctgttgggtagcttggccactcccgcggcatgggtcacctgcacaggaggttttgcccaccagggggcagcagagggtcagggagcaataggccctgggtggagcatgggccccgcctgctgtgtgccaccctgggtgtggcacctactcacatccaggggttggtgcagggaaaggccagaaggtggccaggcgcacctgagaagggggacccagaagccccgggacccaggagccctgggcaagccaccagaaaccttgttcttgcaactctctgcagtgtgcccaggccaccctctggcctggtcttccatggggcagggcgcccacccttctcaactcaggtttccctgggcagcaggtgcacctcagcacccctggggttgcagaagtggtccggggaccctggcttccttgacatgccatccccagagcctggttcaaggcctctctgtcttctcggctgtttcacgacgtgttttgtaacttggcgggattgcgtttcgctgtgtcgaggttgtctcttctctgactcgccctccgggggactgccggggtaaatctggagagttgctcgtgctgacagtcctcccccagggcctccccggttctgttgagtctcctttctctgtagtggaggaaatgtgtgtagttttgtgttgtgtgcctgtgtttgtctgtaaaagcaaggaccaaagtctcccttgttgacctctcaattcctatttgggacatataaaaacactggattcttaacaagcgcccggagcagtaggagcacagcttggatggactcaggacttgtggcagggagcacgtgggaggcaggggagtggggtggggccaggccatctggagtgggaggcgtcatgctcagagtgactctgtagacgctgggtgggatggggagtgcgggcgcaggcatggatggggctgttagctagtgtgatgcttgaggtctgagctgatggcagcaaagtggggtgctcaggaatcaaagctatggggttatagacaggatatgaaggagggagggaggcaagaagaagggggtggttcccacgcttctagctccggccgagtggatggcaacagcatttggaaggcggaggacatggaattcatgtgtcaggagccaccttccgagcctccagtaccacgtgtcagggccacatgagctgggcctcgtgggcctgatgtggtgctggggcctcaggggtctgctcttcttctctttcagaatctggggctccaggctatgccttggctggactgaggtctgggggtgcacttattatccctggggacacctgctgaagcttctccctgacaagctgtgtcactgttggatgaggatggggcgggaggggttcagggcagaagaagaccgggagggtctttcaaaagaactcatgtacggctgttaaaaaaagtcagcagaggctcaggaagacttaaagtgtgcagaaggcggggaagggagggcccattgcatgcaccaagaggaaattggaaggaacaagcgacgttggctgctaggagagcctgctcccaacatctaggggctgtcctgacgggtcacagtgggtcgaactgagccaatgagagcagctctggggagacccactggtgccctggaggctgggtgggtttgggttggatgaattctgtgtgtccttttggaaatgtggaggccatgaggggggatcagggctcttagggttttgacccttaagagttttgtatctgtaattcaaaggttctttagttctgggatgctgagattcgggatagggttcctaatggcacaaaagccagagataaaacatccttcacgtgctccctacccggttctttctgtaccagacccacaaggtccgagttgggatcctagtgctcctgtctggtcagggcctatctttatgtgttcgttaaacttttaacaatgagaattaattctgtctcttgacattgtcatttgcatgctccccacacacaaatcctttcctggtgacaccaggagctacaactctccttggcctcctcttgtgactcccaactccctccttgggaagcttggcctcaggacctctgggatagacaggccacgaatcctgctgtgtcccgttgtgttcctaatataaatggtgtggatggcacttgacctagagcagtgggaaatgcatgcaccactcaacattctgacatgtcacccattttacattcttacaggcatactttttttaaaaaaagagtgtctattctttaatgagcatcccttctttaaaaaaacctaattgccattattcaccacatacacttttttttttttgtatcctgcctcttctatttaattttctgtcatcaacattttcccttgttccatgaatcttcataacctcacttgctgcgttgtgccttgttgagtggctatggcatcattcacagaaccattctgttattcttatgtataaccaccttttaaaaatattatgaataatgccacaactaactgcttaaaacaccctttttttcattcttaagaattatgttcttccacccagaaattatcattgcttcactacagatcagtttcccctgctagactgtgagccccataagggcaaggagcttattgaattggcctttgtatctctgatgcccaacatgttgtagactataaataaatgatgaatgagtggatggaagaatggaggaaggagcgagtgagtgagtgtttggctgatggataagagggtggaaggataggcggaaggatggattggtgaatgaatgaatgaatttcctttggttaagtctcttgaaagaaaggctatggatctttgtatggatgttgaataatttcagtaagcttacagcattttacaatgttcagcaatgtatgaccacttaattaagatatggctagtttgtctctgttataaagtacttttgcattactttaacttgcattgctttaattactaatgatgggtgaacactttgacctatgtttgttaacaaattgtattttatcttctgtgaactgtttgtccaagtcctttgggtcatggctttctgaagagactggtcccagatgtccttgggatgtagggagcccatagctcactggaggcattcaaggaaccagccaggcagccctcagagaaagtagtgtttaggagattctcatggtgtggggttggcctaggtggcctttcaggtctgtttgatgttaggatttgcttctccctgggaagtgggtgatggggaaaaagacaccttccattggcaggtgtagacactgcaggctggacctcctgggtgtgcttgtggactccgatcttgcccttgataaaacccctgtgggacaggaatagctctttgaacctccaaggtccagacagccacatcctagcaccctgtacaatcagttagtggccttcccaccagcgcagtcactcattcctattagatcccgatgaagccaggccctggggtttccattttcccacctcttaggggaattgggttccccgcgtcctgtgatatgtcagcaaatgtcctcagccctggcctgcacatgtggcctcagtggtggtctttggggtttaactgacgaatggaacattttggatcaggactgatgggagaatctcctttcatttttcttcacctggggcaattacattctaaggagcggaataaagggcatgttctgcccaaagcatcagggctcacaggtcagtcacagccatttagggagggcatgtcacccaaggagggctcgcccttctttccagagcatcctccgctctcagcagagctgcttctgcccacccatccctctactatagcactgagcactgtttgcccgtgtcagaatccctcacccacatgtttagcttggtatccgagtttgggaggccggcaatgactttcaacatgaattgctccatctacccatccatgcatttggcctacttatcttgaccccgtgcttttggccttttcttctcctgaaagcaaaccctttcattttgggtgggctgtgtagcgccatgggctgtggttatgaagcaaacaccctttcttgtagctgcctcctccggggttactgccctgagcacgtcccagctggatctcgtctgccactgtcacccatagcttcttccccatggtgctttccatgtgtcacacaccacgactgtgacccagggtcggggtcaagagtagcctggggccaagccctcccacccatgagcggagaagtcctccccaggcctcaccttgcctggcgcatggtccctcccatgagctttgctttcagcctttcagcttcctccacagggtggcagtggttgtaactcatccattcatcccttcatcccttcattcattcactcacagccaacagacgtttttaaaaaattagccagtgctatactagagctggctcccaaggacccgctgccgcattgccttttgaaacaaaacaatgaacacgttggtaaaggggccgtgcttgtgtgtcggtgacaaggcgagatccctgagtcaggtcaggcttgtagattcgagttctgttgcgagtttgattgcccctctgactttgtcccctgtacaactaggttgattaggaatcagccaactgtgttccctgggtgctcagaaatcacagcccatatcctcgagaggccaaaatgagagccagggggttccaagatgagtggctgcttctggccgggagcaggttttcaagtcattagaacactctggcctttcctggaggtgatcttggagccattcctgcccctttcaagaggagttaatgcccagctctgtttagagaaaattgggggagatgattgctcatgtgggtgataagaatcacctcccgtgcaggggtctgcatagaacactccataggcaaacctgggtgtccaaggcacgtggcattttgcaaactctgggtgcagctccgagctgtcctgcaggtcccagaccaggtgagaactccctgagttcctgctgcctgggtcgggggtgaggcataggtcttgggggttcaacctggaattctgaatgtcattcattgcattggagaggaaggagagtaggcaaagccaagaccctggaactggacaaactcgtgtggtttaaagtcactgtgagagctggagttgagtctgcctacgggggaggactgcggcacctacctcgcagggctgttgtgaggagcaatgtaaccgtgattttgaactgtgattctggaagggcggtgtgcgtgtccccggggtgtgccaggggagtgaggagaaaaggccagggagacagcctcactcaggcagctgagtgggagagcatttatctctaaacctggaggggtatatggtgggacaggaggaatttgggcaggaactgtcatgctaggggtttgggggactcgctggacaatgcccctggaccccccgggggtacgcgttcacgctcacctctgagaggctggaaacgcctggctgtgctttctgaatgctgtgtgcttcctgcctctgtgcctggcctgtgtgcagcacctacttgtgtccgccttcaaaaggcccttctgggtggcgtccttttccccaaaatattaggcaccagccatcaaagatactgcattgttgcctcccccacccctccccccgactgacaacatttgggctcaaatgcagcaggctgggtgcccaacacagtgcctggcgagtggtagcgcttacgtttcttttctgttgaatggatggatagctaatgaaattgtaaccaatgacaagccttgatgtttataacctttactaagagattattattttgctcttcatggacctgttaacaaccaccatattgtatcttacggacgtttgtatgccacgtttgaagagcaggagccttgtttcggcgtcatgttgatggaacttgagctgtctgatgcgaatctgtgttttatgttagaaagcgcgtagccttaggatctggcagacccaggggccacttaattaaccctttgcctctttgaccctcaatctccttttctctaagccataggtcacctgaaagcctacctcacagggctgttgtgagggccgagggtgggtgtgtttcaacagtgtgcagatgctggctttccctgggaatgggcatatgttgggatttgtcttgaaagcatgagtgatggctttactagtcctaagtgaataaaaagtcagccctgaccttacgctgggattgcatttcccacagtcagtggcatgtgcagaccactggcagagcagcctgcaggtgcttagcgatgtgggcccagagtaaatatttgtttgattgatgagtgatggctttttccttcctcagagtttgccctgccccccattccaacgtgggctgctgcttctccccagcgggttgtagctggcagggccgttgtgctttggggtttgctgtacctgtcgctgccgtgaggggacgatctgtctgcccggaggggtttctgcaaacattcatgtatgcccctgctttcgtttgttagggagaaggagtggggtgacctagagagaggatgaggaaggggttctgggtggcatccttggggtaccaaccctgcttccatcctgcgctctgaatttcctcacagcccttttctgtctctggtagaaggtgcagaaggtaggctttgccaccttccctgggcctggcaccaagctcgggggtcttgtacacactttcccttctctaactggggtgtgggcccatttcctagatgagcttgctgagaatcaggacagctggtatcagagccaggacttcccagtcttgcacaaacaacctgtgcatttttgagtccaccaaataaggcctcctgcctggtccggctcacccctgccagcccccagcaaatgcagcctggtgcgtccccacccctgccaagagcccaggagtgctctggcagagaagtgcagggatgaggaaggaggctgtgccctccaggggactcagctgcgttagaggaggtgc

SEQ ID NO: 3292 - DNA, 4704 bp, Homo sapiens
agagaaaaaagaataaaaagaaacaaagcctccaagaaatatgggactatgtgaaaagaccaaacctacgtctgtttggtgtacctgaaagtgacggggagaatggaaccaagttggaaaacactctgcaggatattatccaggagaacttccccaatctagcaaggcaggccaacattcaaattcaggaaatacagagaacaccacagagataatcctcgagaagagcaactccaagacacataattgccagattcaccaaagttgaaatgaaggaaaaaatgttaagggcagccagagagaaaggtcgggttacccacaaagggaagcacatcagactaacagctgatctcttggcagaaactctacaagccagaagagagtggggggcaatattcaacattcttaaagaaaagaattttcaacccagaatttcatatccagccaaactaagcttcataagtgaaggagaaataaaatactttacagacaagcaaatgctgagagattttgtcaccaccaggcctgtcctaaaagagctcctgaaggaagaagcactaaacatggaaaggaacaaccagtaccagccactgcaaaaacatgccaaattgtaaagaccatcgaggctaggaagaaactgcatcaactaatgagcaaaataaccaactgacataataatgacaggatcaaattcacatataacaatactaactttgaatgtaaataggctaaatgctccaattaaaagacacagactggcaaattggataaagagtcaagacccatcagtgtgctgtattcaggaaacccatctcacgtgcagacacacacataggctcaaaataaagggatggaggaagatctaccaagcaaatggaaaacagaaaaaggcagggattgcaatcctagtctctgataaaacagactttaaaccaacaaagatcaaaagagacaaagaaggccattacataatggtaaagggatcaattcaacaagaaaagcaaactgtcctaaatatatatgcacccaatacaggagcacccagattcataaagcaagtccttagtgaactacaaagagacttagactcctacacaataataatcagagactttaacaccccactgtcaacattagacagatcaacaagacagaaagttaacaaggatacccaggaattgaactcagctctaaaccaagcggaactaatagacatctacagaactctccaccccaaatcaacagaatatacattcttttcagcaccacaccacacctattccaaaattgacatagttggaagtaaagcactcctcagcaaatgtcaaagaacagaaattataacaaactgtctctcagaccacagtgcaatcaaactagaactcaggattaagaaactcactcaaaaccactcaactacatggaaactgaacaacctgctcctgaatgactgctgggtacataacgaaatgaaggcagaaataaaggtgttctttgaaaccaatgagaacaaagacaacataccagaatctctgggacacattcaaagcagtgtgtagagggaaatttatagcactaaatgcccaaaagagaaagcaggaaagatctaaaattgacaccctaacatcacaattaaaagaactagagaagcaagagcaaacacattcaaaagctagcagaaggcaagaaataactaagatcagagaagaactgaaggaaatagagacacaaaaaacccttcaaaaaattaatgaattcaggagctggttttttgaaaagatcaacaaaattgatagacagcaagactaataaagaagaaaagagagaagaatcaaatagacgcaataaaaaatgataaaggggatatcaccaccgatcccacagaaatacaaactaccatcagagaatactataaacacctctatgcaaataaactacaaaatctagaagaaatggataaattccttgacacatacatcctcccaagactaaaccaggaagaagttgaatctctgaatataccaataacaggcactgaaattgaggaaataatcaatagcttaccaaccaaaaaaagtccaggaacagatggattcacagccgaattctaccagaggtacaaggaggagctggtaccattccttctgaaactattccaatcaatagaaaaagagggaatcctccctaactcattttatgtggccagaatcatcctgataccaaagcctggcagagacacaaccaaaaaagagaattttagaccaatatccttgatgaacattgatgcaaaaatcctcaataaaatactggcaaaccaaatacagcagcacatcaaaaagtttatccaccatgatctagtgggcttcctccctgggatgcaaggctggttcaacatacgaaaatcaataaacgtaatccagcatataaacagaaccaaagacaaaaaccacatgattatctcaatggatgcagaaaaagcctttgacaaaattcaacaatgcttcatgctaaaaactctcaataaattaggtattgatgtgatgtatctcaaaataataagagctagctatgacaaacccacagccaatatcatactgaatgggcaaaaactggaagcattccctttgaaaactggcacaagacagggatgccctctctcaccactcctattcaacatagtgtggaagttctggccagggcaatcaagcaggagaaggaaataaagggcattcaattacgaaaagaagaagtcaaattgtccctgtttgcagatgacatgattgtatatctagaaaaccccatcatctcagcccaaaatctccttaagctgataagcaacttcagcaaagtctcaggatacaaaatcaatgtgcaaaaatcacaagcattcttatacaccaataacagacaaacagagagccaaatcatgagtgaactcccattcacaattgcttcaaagagaataaaatacctaggaatccaacttacaagggatgtgaaggacctcttcaaggagaactacaaaccactgctcaatgaaataaaaggggatacaaacaaatggaagaacattccatgctcatgggtaggaagaatcaatatcgtgaaaatggccatactgcccaaggtcatttaaagattcagtgccattcccatcaagctaccaatgactttcttcacagaattggaaaaaactactttaaagttcatatggaaccaaaaaagagcccacattgccaagtcaatcctaagccaaaagaacaaagctggaggcatcacactacctgacttcaaactatactacaaggctatggtaaccaaaacagcatggtactggtaccaaaacagagatatagaccaatggaacagaacagagccctcagaaataatgtcacatatctacaactatctgatctttgacaaacctgacaaaaacaagcaatggggaaaggattccctatttaataaatggtgctgggaaaacctgctagccatatgtagaaagctgaaactggatcccttccttacaccttatacaaaaattaattcaagatggattaaagacttacatgttagacctaaaaccataaaaaccctagaagaaaacctaggcaataccattcaggacataggcatgggtaagaacttcatgtctaaaacaccaaaagcaatggcaacaaaagccaaaattgacaaatgggatctaattaaactgaagagcttctgcacagcaaaagaaaccaccatcagagtgaacaggcaacctacagaatgggagaaagtttttgcaacctactcatctgacaaagggctaatatccagaatctacaatgaactcaaacaaatttacaagaaaaaaacaaacaaccccatcaaaaagtgggcaaaggatatgaacagatacttctcagaagaagacatttatgcagccaaaaaacacatgaaaaaatgctcatcatcactggccatcatcagaaatgcaaatcaaaaccacaatgagataccatctcacaacagttagaatggagatcattaaaaagtcaggaaacaacaggtgctgagaggatgtggagaaataggaacacttttacactgttggtgggactgtaaactagttcaaccattgtggaagtcggtgtggcgattcctcagggatctagaactagaaataccatttgacccagccatcccattactgggtatatacccaaaggattgtaaatcatgctgctataaagacacatgcacatgtatgtttattgcggcactattcacaatagcagagacttggaaccaaccgaaatgtccaacaatgatagactggattaagaaaatgtggcacatatacaccatggaatactatgcagccataaaaaaggatgagttcatgtcctttgtagggacatggatgaagctggaaaccatcattctcagcaaactattgcaaggacaaaaaaccaaacagcacatgttctcactcatagatgagaattgaacaatgagaacacatggacacaggaaggggaacatcacacaccggggactgttgtggggtagggggagtggggagggatagcattaggagatatatctaatgctaaatgacgagttgatgggtgcagcacaccaacatggcacatgtatacatgtgtaacaaacctgcacattgtgcacatgtaccctgaaacttaaagtataataata

SEQ ID NO: 3293 - DNA, 441 bp, Homo sapiens
tgctccctatggggaaggagagaccgactgcttttgctgccacagccaccacggccatcacagctaccacggccgccactgccactgccactaccaccaccatcacaaccatggccgccactgccactgccacctcctccctcttctccttgctctcctcctcctcctcttcttcctcctcttcctccctcttttccttccgtctcctcctccctcctcttcctcctcctcttcctcctcctcttcctcccaccttctcttcttcctcttcctcctcctccttcttcctcctcttccttcctcttcttctttctccttcctccttctccctccccctctttctccctcttcgccttcctttcctgccttcttctcctcttccttttcctccttcctttttcctttccttctccctcctcctcctctttctccctcttcttc

SEQ ID NO: 3294 - DNA, 735 bp, Homo sapiens
agcaaagttttaaatgagtagaagtgtacaatccccattttgcagaagagaaaactgaggtgcacagaggttaagtaacttgccagaggtggcaggtctgataagagatgagattcacatcccttccacccacccccaaattaagcactattttagatttttttttttaaccttactcattcttgagcatatgatcatgaaaaaaggtacaatgtgacataagtagacagctgttgctactagcttctttcctaatctctctctttggaaagtgggggagctgaggatttttattttaatataatttctagcccatttcgagacatagttttacccactagatgtagcatcttttgatgataaggatgatgatgattgtttaaatcaattattgtcacgatggtggcaaagtggcaaggtctaactccatcctacatttattagtctgtattctactcagaaaaactgcactctttccatcatctccattgatgaaagaaaaacttcagctaaattaaatgtaaaggagtttaattgagcaatgaacggttcgccaatcgggcagctcccagaatcacagtggattcacagagactccagcgcagccacgtggtggaagaagatttatagaggaaaaaagggaaatgacttacagaaatcagaagtgaggtacagaacagctggattggttacagcttggcatttgccttacacagtttgaacactcagcaatgt

SEQ ID NO: 3295 - DNA, 189 bp, Homo sapiens
gctttcctggaacaagcattaagttttcagccaaactggattggattcaaatctgacctccacccccttgaacacctgtgactaggaaaatacctggttcatagggtagtagtaagtagtcaatgatcagatgttgcatgtaaagaccttgcacatagtaaagacttcatagatgttctttttcttcct

SEQ ID NO: 3296 - DNA, 377 bp, Homo sapiens
gtcacttgactcacaggccaactgctatggactgaattgtgtcttcccctcattaatatgttgaaaccctatcctccctccaatgtgatggtatttgcagatggggcttttgggaagtaatgaagtttagatgaggcatgagggctggatggatatgatcagatgagtgcccaaagaagagacaccagagagctagcttcttctttctctttccacctttacacactgagaaaaggccaagtgagcacacaccaagaaggcagccatctgcaaacccaaggagagagtcctcactagacaccctgctggtaccttgatcttggacttctagcctccagaactgtgagaaataaattcctgttgttcaagctagtatt

SEQ ID NO: 3297 - DNA, 30013 bp, Homo sapiens
gcgcgcggcggcgcagtaaacagtctccttccacaaaaccatggcgtcgctcaaatgtagcaccgtcgtctgcgtgatctgcttggagaagcccaaataccgctgtccagcctgccgcgtgccctagtgagcggggaggtcgcggggtccaggggcgcgggtgtccggccatggcgggagggcgggaggccgggaggccgggcgggagcgggcgggctgctggaggggccggggaccctcggggctgacgcggcctgtggcctctgttgttacagctgctcggtagtctgcttccggaagcacaaaggtgagccccgtccccgccagccctcgtaccactgcgcacggggcagcccccacgtccagcctccgtcttgggggcgtggacccttggcgtgcgcttcctttcccgcctcgggtctccgcgggttctgcaggaaccttgcttcctctgacttggtccctggtgtctctgtgtgtcggacagttccctctgttgtccctgcctgtaatcgctctcagggttttggtcagtagcctttcttctaccccgcttctccttctgcgtgttactcttttttgcttagaaatagtttccgattgcttttcccaccgaggtctaccctagcagtttcttcctcagtattctgatgtagcccctcaccatttggctgaaactgcgctaactttaacagtattttcactcgtgtaaataatgtcttgttagaaacaaagaggtaagtccatgtacaatacaaggagacgtccttgatttgttaagagaaaaaaagaaccaagtaagttctgtgtatgatgtgaacacacttttgtacagttaaaaagaagtgacctggccgggcgcggtggctcacgcctgtggtcccggcactttgagaggccaaggcgggtggatcacctgagcccaggagttcgagaccagcctggccaacatggtgaaactccgtctctactaaaaatacaaaaattaggcgggcgaggtgcgcgcctgtaatcccagctactcaggaggctgaggcaggagaatcgcttgaacccgggaggcggaggttgtagtgagccgaaatcgcaccactgcactccagcctgggctacagagccagactcagtctggaaaaaaaaagaaaaaaaaaagtttgatgtaggtggggcgcggtgggtcacgcctgtaatcccagcactttgggaggccgaggcgggcggatcatttgagctcaggagtttgagaccagcctgggcaacatagcgaaaccccgtctctataaacaaacaaagccaggcgtggtggcctgtgccagtggtcccagctactcaggaggcagaggtgggaagatcgcttgagcctgggaggaggaggttgcagtgagccaggatcgtaccactgcactccagcctgggagacagcaagactgtctcaaaaaaaaaaaaaaaaaagcttgatgtagattctttcagcttatttccactcttgtaccaatatatagaacttttttttttagcttttagaatctcagcaatgagactgtacccaacatcctcatttgagtttatatattgggcactttttaaaacctagtgcatacaggctgggcgcagtggctcatgcctgtaatcccagcactttgggatgccaaggtgggtggatcacctgaggtcaggagttcgagaccagcctggccaacattatgaaaccacatctctactaaaaatacaaaaataagctgggtgtggaggtgcgcgcctgtaatcccagctacttaggaggctgaggcaggataattgcttgaaccatggagacgcaggttgcagtgagccaagactgcaccactgcactccagcctgggcaacagagtgagactccatctaaaaaaaaattaaaaaaattaaaaataaagactagtgcatacaagttctagctcactgacttaaaggactgtatgttatttcattatatagttggtacgaccattatttatataaagcctcctattggttgatttttctttttaatatttgtttttaattgacacataattgcatacaatttgagttacagtgtgatacttcgatacctgtatacaatgtttaaggatcaaattagggtaattagcatattcgccccaaataatcatttcttcatgttgggaacactcgcaatcctctcttgtagctatttgaaagtataaattgctgccaacatggtcacactaaggtactgtgtaacactagaacttattcctcccatctagctgtaattttgtatccattaagcaacttctccctagccccctacactctactcttcctagcctccagttaccactattctgctctctacttctgtgaaatcaacttgcttagcatccacatgttaacaagaacatcttatggtgcctggcttgtttcacttaacattatgttctttgggctcatccatgttcctgcaagtgacaggatttcatggttttttatggctaatatccagtgtatatatgtaccgcatttctttatccatctgttggtggatccttaggttcattccttatcttggctgttgtgactagcagtaaacgcaggagtgcaggtatctcttcggcagactgatttcatttcctttggatatatatacagtagtgggattgctggatcatatggtagttctattcgtagtttttttttaggaacctctatgctgttttccataatgactatactaatttacattcccaataacagtgcagtgtataagagttcccttttctccacatccttgccaacatgtttttttctttttgataatagccattcttactgtggtgagatgatacctcattgtggtcttgacttgcatgtccctaataattagtgatgttgaacattttttcatgtacttgttggccatttatatgtcttcttttgagaagtgtctgtttggctcatttgcccatttttttttttttttctttttgagacagagtcttgctcttgtcgcccgggctggagtacagtggcgcagtctctgcttactgcaacctccgcttccagggttcaggtgattctcctgcctcagcctccaaagtagctgggattacaggtgcctgctggctgatttttgtatttttagtagagacaaggtttcaccatgttggccaggctggtcttgagctcttgacctcaggtgatccacctgcctcggcctcccaaagggctgggattacaggggtgagccaccatgcccggcccatttgtccacttaatttttttttttttttttttttggctgttgagctccttgtgtattctagatattaatcctttgtcaagtgaatattttgcaaatattttctcccatcctgtgggttgtctcttcattctattgtttcctttgttgtacagaagcttttttgtgtaatagaattccatttgcctatttttgcttttcttgcctgtgtttttgagattttattcataaaatctttgcctagaccaatgtcctgaagcatttcccctgtgttttcttgtagtagtttcaggtcttacatttaggtctttaatccattttgatatttatatatggtgacagataaggatctagtttcattcttctgcatatggttattcttacagttatcctatttttccagtaccatttattgaagagtgcttttttccccagtatatgctcttggtgcctttgtgaaaagtcagttggctgtaaatgtgtgaatttatatctgggttctctattctgttccattgatctatgtgtctatttttatgctagtaccatgctgtttagatattatagctttgtagtatatttcgaggccaagtagtggtgatgcctccagctttgttctgtttgctcaggattgctttggctattgggggtcttttgtggttccatattaattttagaatttttttttgacatttctgtgaacaggatcattggtattttgatagggattgcattgactctagattactttgggtagtatggtcattttaatatttatttttcttattggtggatatttacattaattttgcctttgttgctgctataggcagtgttaaagtggtatttaataaataatttttatcagaaatttctaatagccacatctgttgtacacttttcatttgtcttttttatttttttgcaacaaagtcttgctctgtcacccaggctggagtgcagtggtgctcactatagccttgacttcctgggctcaggcagtcctcctacctcagcctcccaagtagttgggactgcaggcgtgtgccaccatgcctggcttatttatttttaattttaatttttgtggagatgaagtctcactgtattgcctgggctggtcttgaattcctgggctcaagtgatccttccaccttggcctcccaaagcgttgggattacagacgtgagctacccatgctcagcctgtcatctttcttgattcccatgaatatctgctgtgtttggctttttctttcttgatattctttggaggctgggaagataccgctctgtggtattctctcctccctttctcccttcgaagtcctaaccaggcctgaccctgttacagcttctgaggtcagatgagatagggtgcattcagggtggcttagctgtagactctcgttttcttttttttccttttttcgagacagggtcttgctcttttgcccaggatggagtgcagtggtgtgatcacagctcattgcacccttggcctcctgggcccaagtgatcctcccaccttagcctcctgagtaacggagacaaactttatctatttttcgtagagacagggtctcactgtattgtctaggctggtcttggactcctgggcttaagcagtcctcctgcctcaacctcccaaattgctgggattacaggcaggagccactgtgcccagcttctccttccttttgctagatctctctcttgaaatgtggtccttgacttttattcctaggtaggtgatctctctttcactttaaacttttttttttcttgctgacatccaactgtttagctccagcctctttttgagcaccttagacacaaatgtattttggggtcaggtacaacccagaaaattcacctctccttcagtccctcctgctgtgttccttacacatatagcatagccgtaaagttagacccggattccaaatctgcctctgctacttactagctgtggaccccaatggacaagtttattacaagaaaatttaatcctttcatctgtaagtggaattaacagtctccatgtcatgggggcttcgtaaaggttcattgagccactatgtatctcactgtgtacctggcacagtgctcggcacttagtcactggcagctgttgtaactgccacctacatgactagaacctttccgtagcatattgtcaaatctacattttaagtctctacaatctggtcctgcctttatgtcctcagaaccctttcctgtgacttcatgctctgttgatactgtcacccaggctggagtgcagtggcacaatcacagctcactgcagccttgacacactgggcttaagggatcctcctgcctcagcctcccaagtagctgagaccacatgtgtgtaccaccatgcctggatgattttttttattttctgtagagacatagtcttgctaggttgcccaggctggtctcaaactcctgggctcaagtgatcctcccaccttggcctccgaatgttaggattacaggcgtgagccagcacagctggccttctgttgactctgtaagttctttggtggttttgcccctagttttatcccatctggtatctggtttacagcagctatttcaaacacctcagttaattgtggtgagaattttgtaagattcggcagggtagggaggatggggacaggttcttggggtgcatgaatgagtcctgctttctcagcctgctggcggttttccttaatctctctcttgctttgatctctcacttcttccacattcctgggcacccacccacatcccttaccccagacacttgcttcctacctagatgctaccttggtagggaggtgcagccttgtcgctgaaatggaggtaatgtgggcctgggatttgtgtctttttcagaacagtgcaaccctgaaactcgtcctgttgagaaaaaaataagatcagctcttcctaccaaaaccgtaaagcctgtggaaaacaaaggtgggttggttgacttcaaacaaatctacaagggacttcacatagaataagtcgaaggaaaaggggagagtggggctggtcagggaatccagaacaatagcttcattgggaaggaacagcttccttagccttgagcatcaggagtggggccatgtcatcatgggtgatattgaggcaacagcctgaaagcagtattcaggagaagaaaaatgggcagaagacagagatgagaaaggccatggctgtggtttgggggtttgcggtgggccctgctggcaggagccttctctagcccatagctgctggtctccctccatgaatctggctgggactgtcagttcacctgaactcagcccaggcaggaggctttctttgtcctagatcatctcgctgctgctgggggttcagagctcacagcagtagtgggctgtcaacccatccgtccagccatctaaacgttctttaatacctcctgggtggcaagcaccatgccaggctctgaaagcagcccctctggtgccaccaaagaggtattgaacattcactccaaaggcatggcccatttttgccctttgagaaatttccaggttgggttcaggcaatgccagcagtttctgcccatgctgaaagcacaggagattctacttggctggtttttacagagcatccagttaattggcccatcacagggttggagccatgttgaggtggggatgggtattaagttattagacaaccggggtctaagcctaaagaccacaggaccacatatacagtaaggctgtgaacactagagtgcatttgttaaaatcaccaattctttcacttagcctccctcttctaaaaaaggagtgttagtatagtcacagactccggagaagaggatttttgtctgtacctgcttgaatacccctatcactatcacatgtgcgtgcacacatttttatcctgttcaagtagtggttaaaatctggtgcccaggcctcctttttagccatgagccattgactgttttgtattccttagatgatgatgactctatagctgattttctcaatagtgatgaggaagaagacagagtttctttgcagaatttaaagaatttaggtaagtctgtgctatgcttgtcaatcgttgagatacatttactgtgttgtaaggattgtgattttttaaaaagtttttaatttcttgaataagtatggcatgtagggctcttactatctagccacataatctgtaaacatacagggtttcacacctcccagcctgcccacaccattccttctgcctggaatcctgctggtcttgtgggttggcaaaattctgctcctccttcaagccttggttcaagttttcttcactcagctaagcttttcttgaccttttgtgtctctttcagaattaggcacttttttggtttcccatagcaacttggacttaatagtaataaatcactgttacatttcatggtaatttgtctctcacataccgatttgtacagcagggacctgtattcccagatccccagtgctcagctcacagtccagcccttaacacaaactggttatcacatgatttgatttagggggaaacaggtgttgccatttttgtagcactgcttattcagtccttacaacattctgttacatgtgcatggggtctgttaatttcattcttcccatttcacagaatcatgttaaaaggttatgttttgcacttagtctcatggtaatgattagttagactgagtttggagatgagctagtaataggtgtgaaaaattttacagactgtgaagtaccatgcaggtattattgttggttccctgctactggtgctgctgcatgccaaatggcatgcttagacatcattcagattatttcgtatagccgtcttcaccactggcaacttttatggctagaaagaaagaaaacatgccagcagcttaatgctactatttgctttgtgattgtgctgataaagcatttttttcttagctgaagtggcacgaagttacaatatttacaaagataccaagaactggtatctgttactgcatttaatgcggaaatagtttgatatgctggtcttacctttcattttatagaggtggggtctcgccatgttgcacaggctggtcttgaactcctgagctcaagcaatctgcccaccttgacctccccagttgctggtattacaggcatgagccaccacaccttgctgatagttttattacacttgaaatagctcttcacttttcagccatctccatgtgtttccacttgaactcagactggctttttttcttgttaatttttaggggaatctgcaacattaagaagcttattgctcaatccacacctcaggcagttgatggtcaacctcgatcagggagaagacaaagcaaagctcatgagagcttacatgcaagagcctttgtttgtggagtttgcagactgctgtttaggaattgtggagccatcccagaatgaggagtcttaagatggattattgtgctgcttgctcaagcgtgtgcttgactcctggaacctgcctgctccctctcccagaccagctagtttggggctggggagctcaggcaaaagaggtttccaggatgcagattaggtcatgcaggcctttaccggcattgatgtggctcatgtttcaggcagacttggggtccttaaggtggcaagtcctttatggagagaaaacttgacattcagatgattgtttttaaatgttttacttttggtacagttgatagacatcataaacgatatcaagcttacacttcatatggagttaaacttggtcagtgttaataaaatcaaaacgtgattctactgtacattgcattattcataatttaattgtttgaaattacattaaataaatcaactaattaaatactaaagttttgttcctttttaaaggaaataaccacaagatttttcccagcccaaattccagcgccaattttaggccaactttggctgttttcttccaaaagtgcttatgtggaattgggatccccagtgtagtgacagacagtcatgactgctgctgagtttgatctgtgaaggtagtgaaatgtggccctgatgtttcttaaccctgatttggtaactaccagccctgacaccatcagtgcttgatgtagcctggaaccccaggcccactgacgcactgggcacggggctctgggtcgaaggctggagccgtcactgttgttcatgtgcatttggagcactgtgggaatagtctggcagctgtgtgctgattaaatgtctttggcaaggcagggggcaggaaaaggccttgtggaaacaaaggcaccaaggatcaccccagcccagtgaaggcagaagaggtcacgtggatcagcctgtgtctttccagcagaatctgattaaagcctgtaatgctgtagggtgaaggttcagggcagatgtcagcataccgcagtggagactttctgcagtgaaactttatcgatccctagaggggagagagagatgcagctttagcactagttcctgggagtgccagggcctaacaaccccacagagcagacgctaaaaatgcaagaaggtatggacaagtactagtattgggggccacagcaggattaaaatagcattacatccactcagtgtgagacagatgaggaaaccctaggaggaggcgctccctaagaggaatgtctgtcacattcctatgactgcttaaagccagaagggcaaaacatttacccttctgtttagcaggcctgtgtgttttcatgggagacttcatccagattaaggcctatagttattcctctgaatggaaatttggtgtttccttctgccttgtcatttcacttactccttgctgtgactccatgcagtaggttgagtattagcccattttatagacaggctccgagaaaatgtgtcttagccaagatcatccagtgaatggggcagaaccaggatccagaccctggggttctacctcccagtgcaacatactttcacctttcctcggccactttaattctatgaggcctggcttactggggtgactcacaaagccctgagtgacaatgacttcctgagtgtgctggctgacttttccctggatgcttatataaaaacagctgggcacggtggctcacacctgtaatcccagcactttgggagggcaaggcaggcagaccacttgaggtcaggagtttgagaccagcctggccaatatggcgaaaccccgtctctattaaaaatacaaaaaaaaaaatatagccaggcatggtggcacatgccctgtagtcccagctattcgggaggctgaggcaggagaatcgcttaaacccactgcattccatcctgggcgacagagtgagactccgtctcaaaaaattaaataacatgaaaaaaaaaaaaaacccacagagaacttggaccactgaccctgcttgtcatttcgtcagccagaaaaggaaaaaaccaagcaatacaatttggggaaaacatggtgccaaatccagtgccatttgaggtaacaaactcctcacaacccaagttgtgatgtgggactaattagattatttgctctcaagtcttgggtagtttcttttttgctatgtctcgtgaatttttcctcttttctgtaattgacctattattaccctaaaccaaacttttttttttttttagatggactctcgtcctgtcacccaggctggagtgcagcggcgcaatctcggctcactgcaacctctccctcccagattcaagcaattctcatgcctcagcctcccgagcagctgggactacaggcgcctgccactacgcccaaccaatttttgtatttttagtagagatggggtttcgccatgttggccaggctggtcttgaactcctgacctcaggtgatacacccgcctcgacttcccaaagtactgggattataggcgtgagccaccgctccaggccctaagctaaactttcatcacctcctgctcctgactcatctaaagccttggttctcacagtgtggttcatggagcatcagaatcagctgggagcttgctagaaacgcagcattgcatttggaaatgggactagaagatttagagatgctgaaataattagaagcagtttttaaaaagataaagggctctggaagattcccagttataacaaaataaataatccaaacctgcagctgatggggacatgcagccctctggtttacccagtagggttagggatggatcttgtcccagcctcagtctcattcccgctgtgaacttgtaggctttgctcctgctgttctcaggaacaaagctgtcatggccatcacacacaacgtacctgaggcagcgctcggatggacgtgacaccagcctggtcttgtgctgtctggacagtgtagctactggggctgcccctggggagctggaggcaagcccagaccactaatttcctctgaaagctgcctacacccatagccgtattggccaggaccagtcccaggggccagaggcggattattgcctccaggagcctggtctgcagcggcgaggtgctcagggaacagggagcttgagagaagtgtttttcttccacaccatccagctctttagcagcaaggcaggccattctgatcttaaaaagcaaatatccctttatagctttagatttatctagccctcttagcagaaaatggaaatcaaaactatctttaacaaatcatcttaacaaggtgaactgaaggcacctggttgcaaacagctggctgccctgaaccaaactggttccatatgccacaagtctatacaccccaggcaactgtgcttaggccttacatatgctacttgaaaacaagataagagtccatcaagatataactgatatgccataaaacccagtcttctaaagtgtacatcccagagtttggtatattcccagagttgcttataccactcttcacctacataaccaccctgcagggtaggtgttactgtgcccactgcatacatgaggaatatgaggctcagagaggctaaacaacctgcccaaggccacctgcattgcagtggcagagccagcattcccactcgggtccatctggtccccaaaattgatccactgcccaccccgacttcttgggtcttacttactctccacttctgccatgcacgcttgatgactgtggcagctgcatgcagcctctggatgtgtttccgagttaaccaggaacgaatggctaagaggtttgcccagaaacaggaaagagataataaaggggccattagagctgtcagtgacctcgctgcagcagcaccacagttgctgtcaaagtttcaaatacgttttttttttttcaataaattgctacaaataaggttctaaaatcaatacataaggcaaaattggcttttaaacattccttacactgcccacacacttgaatacacctacacaacacagtgaaggggcactggggagaaggactggctgagggcccagcaatcacttcccgtctcaggctgggtccaggtcagcacccagggaatgggaggggtctggattgtctgtgcctttaaaaacttttttttttgttttgtttttaatcctcagttgaatttgttcgctttatgcatccctgatctcacatcaccatatacccaaacactgatacaattaatagatggtggtaatttttattcccttctctgcaatttcagcatattctttttctttttgtttttttttttttttttttttttttttttgagacagggtcttgcccaggctggagtgcagtggcacgaacagcttattgtagcctccgtaaggctgtagcttcaatctcccaggctcaagcaatcctcttgcctcagcctctggagtaactgggactacaggcatgtgccaccaggcacggttaattatgttttgttgttttttttttttttgagacagagtcttgctctgtcacccaggctggagtgtaatggtgcaatctcagctcactgcaacctctgcctcctgggttgaggtgattctcctgcctcagcctcctgagtagctaggattataggtgcatactaccacacttggctaatttttgtatttttagtagagaaagggttttgccatgttgcccggctggtatgaaattcctgggctcaagtgatcctcccacctcagcctcccaaaatgctgggattacaggagcgaactactgtgcccagcttccttatacaattttttaatgcctacacacacacaaacacaccttaaaaggagggcatcgcccttaatatgtagtttgacatctaggtatgaatatcattttggaagtggttctccattaaatttataatattcttcaaaaacacttagctgcatcatagggatggtccagtccatcatttggccatgatgtcaccactgttagatatttgggttctttccaacacttttccttttcaaaataagaccactatgaacatgttggttaatacatcttttcatctgatgaactccttttggtttttaccttctccttaaattcattccagccctagagcccagcaggtaatggtttgagttgtcataaagggaaaaaaagttggcctaaacagctgtcagggtctgagaaaggaattaaagacaacgcttagacaacgcttagcctccacttcttacagagcacctttgtttgtggagtgacttggtttccattgaactggagagacgttatgagtgagggggacagggaatttgaatcccagcacaccacagggacatctcttcaggctgggacacagcttcaggagatggggactcgacgagctatgtttcaaaggaaaccaacatcctgtggggtctgtgagcagtgctgacaggtgacctgcccacctacctgcctggatgagcatgacggcccgccactgccgctcctgctctcggtgccggtgtcgcctccagccaccctggatgcagcgggcacactgctccagcacccgggcacgcccacattccagaagctccagctgggagaaaaggcatccattgagggcagcctcttctccccctgccccctcctgctgaggagagcacacagcttgcctctgtaacctcctcatccccaaaccagctcaccatagagtcagtcatgaacaccttggtcctgccacagtgcatgggggctggcatggcctcagccgagtcaccagttatggctgctgcctgagttaggaccggcagagtgtggagaatgtcctggatgagaggttcaagcgtggcttcctcgctgtgtggacaccattctgggggagggagatggccccatcagtgcatggtcatctctacatgcctctgtggcctgaagaaactggctttggcctccctagcactctacaggtctctttcctgctgttcttggctctagccattttctccttgttcttcttttggaggaagccacaaacagcctctctgttgtccctcagggtgctagctgttccgtggagccttggaatacccacttgcgcctgtgtgtcctggggtgtcccacagcctctactgccatgagtccctttgggcaggctggcagagggtgcttgacacctggaagggtgactccttccaagcttggaatcccaggctgctcagccagcatttgtttccaaggcccaaacacacatcctgagggccaaatagggcagctataggccactccctcagccccgacccctcaactccccaccatgtatgggaaaagggagatccaatcccagcccttagtttgggaatcttctactgcaaataaaaagaataaattaaaaaataaatttaaaaaatcccagccctgcaaaggtcccgtgtcccactgcctgccctcccgcagctcgcagagctgactcctggagaggtaggatttacctgagggctctgaccaccttagatgcccagtgcctctctgaagacagaggctgccaaaggagacaccacagatgagaaacagcagcaaaatcaaccaggggccagaagggctatgggcaagagacacggaacaggacagcaaaccatggagagggagaagaaaggagaaagggtgaaaggaaagtgaaaactgcccaggaggggaggaaacaaagcaggattgccccaatggctgtgaggggcccagggtaaggctgggtgggaggggcagaggtgctgggctggggtcctgccgaggcggggccccccggcagcctgtccttggcctgttctccctctgcctgtgtctgggccctgtggctcccacagcctctcttttatctgcatgccgacaacccccatatgagggcctccagatccttcctttgagactaaagcctgcctaagtgccttgcagacttcttcactggacctgcaggacaagtcacccatgcccgggctcttcagcctccctgaacctcttttcctcttgcttttcctcacttcccaggctaagttaatttactcctttcctctccctctacatctagtcaagcccctaccaagactgaccagtttcttccaacaaatatttcccgactgtgcccacaattcttgtttctctctattggggcaactttgcagcctcaatcccacagccctccatggtgcccccagagtggtctccagaaagtgtgaggctgataagagtcatttgctccttcccctgcagtgcctgctcatctgcccagagaataaagtccagattccttgatggagccctacctgccactccagcctcacctgccccagttctctgcctcaatgaaccagcaacacagaactggctggagttcctcatacccacactgctgcctcaagcctctaggcctttgttcagattacatttatcatgtggaccacccatcacctggctaatccaatttattctcagatactacctcttccaggaagccttccccaattcacacctccctagcaccacccacagcatcctgctcatagctctgcttttccactttccatgctatttgtcttttttgaatctgtttcccccactgaaccaaaaccagggctgtgttttattcaccagtaagccccagcccctagccctaagacagggcacagggtagatgctcagtaaactgtggttgcacaaatgactaactcatgggtcccactcaccagggagccctttggcaggatatgggctgtcggggccagaggatgtgcaaggatgaagccttcttagtaacttgtatcgttctacaaagtttcggtgagagaccctggaggccaaagcaggcagaagtagagaattacttcatctgtgagccaggttaacggttcagggctcatcagaagttattctatttaatctgctcaacaacacagcacggtgctgccctccccgagtatccccactgaatgtgaatgtggttttgaagcgatttctaggatcacttagttggaaacccataaagactatttaaaatgggtctgctctccctgctgccttggtctaccaacacaaagcatctcttgtgttagcaggggatttgcgggctgcctccctccaaaggggctgacaggcctctccccaaacaattggaccagtcctatgacgcagacatgcttggccacatctcccctctgacctctctgaccccacagtctcctctgcctcccccagatctccctgctcctcatcaaggcaacacttctcagacagctgctggcacctgatatctgcacttcctcccaattgcttgtcagccctcctgagtctggcttctgtccccaacattgtaccagtgtggcttttgtcacagccatcagctgggtacaaaatagtgcacaataagtgaatggatgaacgaatgggtgctgctccctagttcccagttgacttctacagaccagcctctttctcttcatttccacatctcactctgggttgggcaggctcttgcccaatgagagtcctgagccccactctgtactggccctgcactgtgccgtgatcgagcccactcaccggatggggaagccagcagcactgatatggatggtctccacgaggccacaggcctccagctggctcaggacctgcaagggtggggagacagggcaggcacctgcagcatggggccagcaggccagaaatgccattctctcagcccttcttcttagaccctggccagtgccaagctgcaggctctcccaaggcttggctaatgggggtatctccttggggctgtgagaaatcgagggaccttgaaaacaaatctcccactagaaagggtcctggtggtcccaagtccccctcatccgatgcatggcttctgatacagctgaagcaagtgatgtcctggctccgtctcaccctgccctcagtgtagtctcactaccacacaacccagcccaggcaaatttccagtttggattgttttcactgtctgcaggcattagagggtggttcacagctgagaggcagggaagattatactatgaagattcttctgtgacctgaacccaggtctttaccacagagctgagttgtcctggctacaaaccggaaggccacatctaccaggccacaccttcagcagtgcccagcattcacccctcatccacatccctcagaacctggaatcccaagaaaagggcagctgctggctagagtgcttttgttagattagaaaaaaatgataccggctgagtgcagtggctgctcatgcctgtaatcccagcactttgggaggctgaggtgggcagatcacctgaggtcaggagtttgagaccagcctggctaacatggtgaaactccatctctactaaaaatacaaaaattagccaggtgtggtggtgcatacctgtaattccagctatttgggagactgaggcaggagaatcacttgaactcgggaggcggaagttgcagtgagctgagattgcaccactgcactccagcctgggtgacagagtgaggctcagtctcaaaaaaaaaaaaaaaaagaaaaaaatgatacctccagtgagaaatggctgcactgtgcggggactgtgtggtgatgtagactttcagctaatcacgagacacccattcctctgggcagtttcagtctctcatcagggtacatggctcaaaaaaacaagatgcactggaacttgcctccctggctaggctactatgcacagaccacacaaccatacatgcctgccctgccacagcaagggagatgggtcctctctcatgtcaggcctggccggagagaccacttctgtgcactccatttggaacagatgtcctgcccttcatctctccagggccttggccagatggggtttggtgcgaagcagctttggcccggtgttaattacctcctcttggagaaaggtctgcgcctggccctggctgttgggcttgatgcagcgaatgtagtggggcgtggtgctgtgtaggacctgcagaagctgctccagtgaggcctgcagatgagagaccatggggttaggcagggagaggggctgcccagggccatcaactgggctctggttagtaactacatcaaatgcctccagcgggcccttccatgatcctgagaccaagaatctcctgtgcagggatgactgctgcaggctctcaacgagcaggctcagagcacattcctctcccaacttcccatgctcctcacctctgtcttaagggacccttctaaacctgtgatcctccctgactgttctccctgaatccaatctcctcctctttcccctccccacttctccccagagcaatcttcttagaaaagaacaatctcaaaacttcttgccattcgtccagcaacaactgttatcactcagctcatcctgtgtgttggaggctgtgcacaggctgcctgctgccatgtcagagctcactccaatgggccacacatgttggatgaacaccctcgggggtgtgtttgaggctgggtaggaaggtgctaatcaaacctggttttccaggtgcctcctcgaggtggtggtgataaagctaaagtctgaaggatgagaaggactaaactaggaaaaggggcgtggaggatgggagtgaggtggagctgatggggcagtagtcaagagtatcccaggaaggtggggcggtacatgcaaggactgagaggtggtagaaagcagacgatgtgagagaagtgagtgagggtagggttagaacaggaagctagacagctggagatgagccaggtcaaagaagctcatgtagctgatcctcttcccatgagcaccccagtggcagggggtgagaggctgcatagtgcccccataggcccctagacttcccatcatattatacctgatagcctatttgtctactgtttctgtcttccacactgaagtataaactccaggggactgggaccacatctacttgacttgccactgctccccaacaaacagcaccgatcctggcaggtgctcaataaatatttgtgagaccgtggagtttgaaccaagcacctcccatcagcacatcagacccaccttgaacttggacaccacggtcaacacaggggccctgctctggccagggggttcctcctgggtcttctctttggggttagtaggaaacagccccatgagcagggggtcctgggattgctgcaggagcctggtcagctcaggtgggatagggtcctattgggaaatggcaagagcagcagtgagggcaggtggagcttctgctcagggccatccactgcccacccaagccgcagatgacggggcttccaggtaggacagggcctgagtccaagagaaggtccattggacaaccagagacctggagacccagtctaacatgggttatctccaggcaggtcatgcttgattagtggagacctcagacaggtgggcccaagatggtgattctggattctgggaggaggttcaggagagaaaggactcacgatgggaaactactatgtctgcatagcaaagacccagcatctcgtttctcgcaggccccacaggcatggcccagcccgtaccttgttcttctccaccaggcctgctgtgtggtaccgcacaggccccgcataatgcaccacaatgaagctgggctcccggctgagcttattgtggcccaggcaggggctgcctgccagggcagtctcaatgcgtgtctggagctgggctgcgctgctgggtcgattgaggcggcattcctgtgggatgggaacagggggtcagccaccaacatgagagtgtctcaccacaaccctcactgtccccaccctgtggaccccatgacagcagacatcacacaggcatcatagtgtccccaacagaaaaaatatagcaattagcagatctatttggcagactgggaggagagaggcacagagaggaaacaggataatcatcaaggccccagaaaacccaaaggccaactctggtgctcggctcattagctgacctccccacctcatttatgagggagcagatgctgatggggcttccctcaatgagatccaaacagggctggttgtcctggtagttgatgaatgaccactccaggccctcaactgcgtattcctcctaaagaacaaggtgggatgaggtgggagaaggcagctgtggtctgatgtcctgacgggccatccacggctggcctcggtaccacagcgtattccagaacagcatcaaagaaacaaaagtatatcaaaacattacattgtactccatatgtgcaattattatttgtcaattaaaaataaaataagaaggaacaaaaggcttctaatcagaacctggactggggctggaaggtcaggaagggattgaggatccaaaagaaggacctgcctcctgctcaccccatccctcacctgctgggcccttaggtagtgagccacaaaatgctgctgcagcttctcattggcgtagttgatgcacaactgttccagactgttgtcaggaaatgattcaaatccatacacatccagcaggcctgggaagatggcagagaacccatggggccactgcagggagcagatggggaataggggaccaaggaacccagggtggctgggcccctgccaatgccttatacttggcagcctgggcatcaggctgagtgagcatgacacctgtggtgggcagaacataccttccccaccctccacccaaggtggctcccatctctaccccattcccctgtagagctcagagcaagcaggaaacccaaatgaagtgtgaagacagcccagagcatcaggcccatttttgagtctgaattctctggttctgataggcacctcctatgaggaaaccaggtcccagggaacattttctgtgttaaatctagttcggagggcattagtctcactagccaatttggtgcctagaattccaccattccatgagcaaactgcacttgtacctttaagctttatttcctcctataactgactgtcccacctagttacaaccgtgttgacctccctcagtcatgtcccccaagtctttttttgttctcccccctgagatagggtcttgctctgttgaccaggctggagtgcagtggtgtgatcacagctcacagaagcttcaaactcttgggctaaagtgatcctcccacctcggtctcctgagtagctgggactacaggcatgtagcaccatgcctggctaatttctttgaaatggggtcttgctatattgcccaggctggtctccaactcctggcctccagtgatcctcccactttggcctcccaaaatgttgggattacaggtgtgagccacggtgccagcctccaaagtcccttctaatacagctattttccccaacccccactactctcccacaattagagctgggtctctggggaggtaaagggctctttcagacaaggcactgttgagcctgtctggagagttatggactgctcagatgtgggtgcaggagagcagagatctcaccctatgcagagatctcgctctatgctggcaggcagatgcaagaggagacaaaaaagggaaaggaactgcccagagtcacacagtggacccagggctcctgcctctccatccagggctttattgctctttttctggagtgctcccagcacagtgaggccttgctacctatgaaagtggtccacgagtcggtgtctgcacagatgctgctgttgatcactgataccagccagtcaaacaacctgttgggggaagagagtggactctggtaagagggtctggctgagtcaaaggggtggtaaaattgctccccccatcagggtgctacaccctggggggcccttgtattctgagcctgacaggtcaaagaccaaatcctctcctcttgcttccggcctatcacgtcttgacctactacagatgcaggctatgggcatgcatgttgccaggtacacacaaacctggcatgtccttatgggaagactgagcacaggacaagctcagctcctaggctggggagggaatcagtcgagctcagtcacatggctcgagacccagctagtgtcttgggaaggggcagatgggcctgggtgtggtttgtaaataactgagttcattgaacacccctgcaaaactctaccggtggagcccagagctcaaggccccaccataccccctgatgtagttctgcacaagtgggcccccagtcccgaggtcaacaatggcatcctccactctagaaccggccccagcccagagaagatgagactaccacacaagacgctgacacgtacagcactatacaggggtttcttcctcacattttttcttaaagtaattgctctgcaacttttttcccttcagtaaataaactggctctttttgcaacaggggctgtgcaaatgtcctgtggtcagaagctcactctatctgtgttcatcacactttatctgctcatcttggagtgacttgtaggcaaaggctttaaaagcctttgacctcaaattgtgacctgaaattagcttgaggcagtggtaactagtctcttgctgaaatggatttagtctggcctcagctgccctggaccattttcaactcggacgatctggttcccccagcagagcttctcaggctattggctctttgtggagtttatgaaagcaggggaccctctccccagaaaggtgcccaaggtctcatgtgcacatgcacacacatacactcattctggctcatctcagaggattctgggcccctgaagcccttacaaggcctgctgaagaatctcagaactcaaggtgagagatcatccttaaccacatggccagagggtggaggtacccacgtaatctaccagaaaaggccaggaccccaccttcaccactgtgctacatgctgtgggctgagcctctggctttaccacaatctatcaaactcctaggtgatgtacaaaggcacagggagacagagaggcccattcagccaaggatctgaagcaggaactgcgaaggctctagatcacctttggggcctgccttgccagcagacagctgagcaggttctcttcaccttgctgaggctaaagcagcctcctgaactttaataatgagctgaattctggccaggaatgtagcaactttcccactcagaaagaggccacagacgctgcttggtgaaacctgggagctgtgccctgatgtgtccaggggtttgaggagcagggagaggaaccagtctgtcttatctcccaccctgggcctgtgcctattgcctgatgttgtctggcccaaccccggacaggaagagcacttgtcggggtcctccccaacaaggggccagagtaactgctcaccgcgcatagatcagtttggccaggcagtctctacgggtgtcacactcggctcgggcgcagggcttccggaacacctgctgctgtctgcctgccctgatggttctaatctgcaccatctccagcagcacgtcctctgggagccccagcagcgaggctgccgtcctgacagagtctgggaggggcaaatcctctttaggcaaatcactctccatccagtcctcttcacgaggcactgtgaagtcatcacagcgggaccatgacttgcccaactggacagaagaaacctaagttctgatcagtgaagtgactcacccaaaggactccataaacagcagtcagaactcaaacccagcactttcatgtaccagtccatgctgccatgtatgggacaaatcactttacaaacctctgactcattttctcatctttaagatggggacgatactgtctgcctcaccagacagggtgaggagtaaatgatccagggccaggccctatggtgggtggcataagcaagggcatcagattccaattttcaccatccagccttccacccaaccccagcaatgctggctaccttcctgacagggcctgccccatcctacaccctgaccctcacacttggcatcatccatcggctggcagggctgggcttcatcctcggaggcagcaaactggatattgccaaggtgcagcagtccagctaggacctgggggaaagaaaaggatgggtgggagtaggagagggcgtgacgtgggcctactctgggaagggccgttctgctgagtacaatcacgacagcagaagggcagctcccaatcatggcccaagtgcccatctctgccagacacaattctatacaagttacatgcatcgcctcattgcaacttttcaacaacctgtaaggtatgtgctacgccactgcctatgatagagatgagactgaggacacgtgcttcctgaggggaaaggtgggatgagaacccaggctgacttcagatgtctcctggggcagcctgtgggcctccatgcccacccatcctctacatttctgccccctgctctctaggaatagactggtgactgggggcagggctgcttctgtgtgcctgctggaggcttgtctctgcttccttgagccctttcccactgtcaggcttctgagagcccagcctgctggaggcactgtgaccttggtctgtgtccgatgggtgcccctttgcctttgtactcaatgttccacaccgacaagccccctggggctatagacagaagctcccctcaccccaccaaggcccagcaacttcaaaaccctcagacccagctaggcatggtggcacacgcttgtaattccagcactctgggaggctgaggcaggtggatcacttgaagtcagaagtttaagaccagcctgaccaatatggtgaacctccatctctactaaaaataaacacacacacacacacacacacacacacacacacacacacacacaaaattagctgggtgtggtggcacatgcctgtaatcccagctactcggaggctgaggtaggagaatcacttgaacccgggaagaggaggttgcagtgagctgagattgtgccactgcactctagactgggcaactagagtaaaactccatctcaaaaaaaaaaaaaaaaaagaaaaaaccaccaccctcagacctgacacagggaccccacccaccattcctatatggtcccaggcagggtgcctccatgtgctactggtcttccggccacaacttgctccagaagactgccatgcccaccaggcagaagggctgtggcagagggtcatgcccacccccaaagcactcctgccccgactcccagtgttgtccacttatcctgggcttgtccccaggtactgtccttctgtcaagttcttacctggcagtgtctgagcagcccccatctggaggtgagggtcactttccactgcattgctacctccctgaagtggcctccctttctcgactgccaggccatcctatctatcccctcctgctgctctagagggtgaggaagatgagaggaggtagtcagctctgtcagcaaagacagaagggaggcccccctagtgtgactgagaggagcccagctcacctggggcagtctcatgttccagaggacgacggggcacgggttgggggaagacagagagggtaggaacttggaattactatgtctggtactctgtatcaccacttagtggtatctgaccttgggcacgtcactttacctctctggttttctcaggcataaagggaaataaacacacacagaggactgtttaaaaaactaagtgagcagagaagtgtgaacatgacttgtaagttttaatgtactagacaagcaaggcggtagcactagttctctcttctgatcatgcggtaccttgctctctgcccccatggatcacttactgcattctgtactctagcactgtgtatgcatcactcttccttatgccccgtccaccccaccacctggtctccagactcagcagaacagaggtgactgattccttggaggtagcccagaggggcccaaagtcctagatcctcagggaaagaccaactccaagtccagggaaaagctctatgcaaagggctgcccgtcatctctgccaaacttaagtggcgtggcttttcttctgaccttaaagatgttgttctgggtaggggtgtcaatgcccaaatggagcatggcctctctggtcacctcaaaacaatcctctgaaaaagaatccaagttcggggcagaggtcagcagcagcaagatgcgagggaggcaggctctgtacagagtgggtgggtgatgctgggtcagcgcaaggtgctggatggggctccccttaccttctaagctcctctctgggttgggcagccaggagaaggcagctccctcaggaaggtgccactggagcctctcgtcctcactggctcctttgcaaatctgtggagaagggtaggtgggaggctgggtagggggtctgagaaaagcccaggcctgcataggcaggcatggggttgggataagaggagagttggtagcaacatcacaaggctcagaggtcccttccgagagcccacggcaggtatgggggcaaaagatgccgtaaacatagccctggatgtctccaacctgatgcaaaagaaccttgctctagggaaacctgcagtctggtgaaaaaaggacaactcctgcccagggagtccgtcgtcttgacgtgggaggcatacccatcacctaaggatgctccgattttgagagaaagggagatatcctatccatgccttgggggactcccagtccgatggaaaaggcacaactctagggaagcccttgttctgttagcgacagatgccattctaggagagcccttaaaatgataagagtgacacggcttccaccctagagatacagtcccagcctcaaggaccttctggtctgatggaggaggtaaaacatactcccaggccacaactgtgctgggagccaaggcgcagtgtgaggcagaagtgttgcatgtaaagtctgcaggataaagtggtggctccatcaaaagctaggtgaaggaaccaggtatggagcattctggggagtggggggttgaaaaacacggacccatccctgtctcgcatctggggggctgtggccccatttggcacaaacctgatagaagatgtggaagttcctctcactggaagcctggcaggccactcgagttttctctaggaggtaggtctggactgcggctccagtcatttgctgagccctgggacacacacaggccagagcccgttagttgcccattcattccatagccatgtctggcaatctgggtgtgccagattgcctgctacctggcaactccccgccaagctcttccacttagccaatgggcactgaggggtggggaccactcagaatgtccttgggtgtcctggaatattcccctgcatctagctcaggtgggcagggccaaggcctctgcacatcactttgctctaccccaagacaggagtcgaagtctcagcctcaagctcagggatatggtccaaagaggtggcaatttagcttgaagtccctgaacaagagtaaaagccaggaggaacccaggcctgaataagcgcactgccccagggtctcccaaggggagaggagctatagttctccaggtgcaaagatcaccctcagagctcacacctgaggtaaagggcatgcaccaggaggagcagggtttttgcccataggggtggcccaggccagatactgccccagccactttcaacctccccagtcccatcctcccactagccagggcaacagcagctattacctgttcagctggagctggatgaacttcccaaagcgactgctgttgttattcctcagtgtacacgcattccctacagatcacacctatgtttatttcactcccctgggtttgcagagtcctcataagccaaggtggctgcaggtctctggaggtcatgttcccgtgctcaagtcacctaaaggcccctttgttggttttcatgtcataggggacaggactagaaaatgggccctcatgctttagcaagtgggattcaggggagttagaagaaattcctggcaagaaattggaatgagcaagcctaggcagtcagggacctttctttgaagggaaaggtcaaaaacaatcagctgtcactactgactttagacaggaaggcacatctgggttccagtgccaacacaaacactaatcaccttgtatcccttaacaagtacccttcattgaaccatcaggaaactggatagaaagacagaatttggacgagctaagccaccaggtcttctccagcacgactgttatgtgtgcctaggctggagcgaggaagaggactgaatgacatgacctctgttagaatgatgctaaggagtaccagggagaggttggggatctgaggcagtgaaggatacactcatcctccacccccacccaagagagggtctcaaagcactgtccctctccctggaaggtggaaaatcccagaggaaatgggactgagatactgtgcaaaggagcccaagctcaccaaaagcttccatgacagggttggagttcaggatcctctgttctatcctctctgcaatcttgtggctctcccaagatgcaggtgaggtggccaccacagcatagaacttcattaggcagcgagacgtccatgtctgtggcagaaacagccctgtgggagctgtatctatgctcccgcccacttctgagcctgcctgagagaacagtgcccaccagagctctcttctccaccagtgtgttgctgacaaaatgggtgaaggcagaattcaaccctggcctcaggcaaggcacttcctctacctctgtttgtaaaatgggagtagacatctgtttctctcagctctgtggcagacactgagctatcgaggctttctgtgtatgttttttttgcaaactctgcaaaggtgtgattatacaattgtttataaacaataaaaccaaagcatagaaatttaaaaatttattaaaaatcatgcatctactcaatgacagggctcccatttatacccaagcagtctaactttttttttccgagacggagtctcatcttgcctcccaggctggagtgcaatggcacaatctcaactctctgcaacctctgcctcctgagttcaagcgattctcctgcctcagcctcccaagtagctaggattacaggcgcacgccaccacgcctggctaattttttacatctttagtaaagacggggtttcaccatgttggtgagtctggtcttgagctcctgacctcgtaatctgcccaccttggcctcccaaagtgggattacaggtgtgagccaccgcacctggccccaagcagt

SEQ ID NO: 3298 - DNA, 911 bp, Homo sapiens
ccacagaaagtaaagcaaatccaggcttagaattagacctgtttgtggggagcagaaaggattgggatggggaggcatagtggagcaacacatctgagacaggaagtacggcccctgttctgttggcagtggacctcttcagtcagtagccaaggtcacagccctgagccgatgatgctccatgctgctgcctggatggaaagcattcgaggggaccttttggccaccagcattatgctgacagtcccagctcagacagaaggccttcttgtggcctcttttctgaggtaggaaggaaggttccgggtcaggaagtacatggtttgttgtaggtctgatgtgaacagtttgttgtcactaaccagccctggctagcaagaattccagaagagggatttggcagggacccatgtggtattgcaacctgtcaatacatcttgacaagtttgtaaatcagtcttcctggcagccagcttcacatagtatctaacacagacaggatttgctcaccaaaaacagagatgagtttgtttttggaggcctctgctgttacttctggccatttacctcttgcataatgtaaggtagccttttctcatctttgccctccaatgcccatctggttctcagacaatccccaaaccccacaaaaatggctgtttagaagaggaaggataaacagttggcccttggtatctgcaggttccacattcatggagtcaacaaaccataaatcaaaaacattttggggaaaaaaaaacagtgaaaattaacaatacaattagtctgggaacggtggttcacacctataatcccagtactttgggaggctgaggtaggcagattttttagcccagaaatttgagaccagcttaggcaacatggtgaaaccctgtctctacaaaacaaaa

SEQ ID NO: 3299 - DNA, 83 bp, Homo sapiens
aaaatacaaaaattagccaggcatggtggcacacacctgtaatcccagctactcgggaggctgaggcaggaaaatcactcgaa

SEQ ID NO: 3300 - DNA, 369 bp, Homo sapiens
gcataatttacattgtattagtgcaagtaatctagagatgattttaagtatacaaaaggatatggatagtttgtgtattagggacttgagcaaccatagattttggtatccacagggggtcttggaaccaattccccaaagataccaagggacaactgtactgctttttaaagaggtggcctttggaattacaccaactccacagcctgacaggccccttaaaaggagctgggagaggtttactacagcgcagtgaaaagaagagcacttttgtttggctgtggctctttcccttcaaagaagcaagtagtattccctcaggtgaagcctaatcatagttaccctctaaaagacagatttgggccgggc

SEQ ID NO: 3301 - DNA, 6134 bp, Homo sapiens
gcggccgcccagcgcccgtccccgcgccgcactccccggcactccccggcgctccccgcgccgcgcgccccgcaccggctggaggccccggccccccggcgttccctctccgcgcacctcccggcccgcgctaggtgagtgtggacgccactggcgggggtgccgcggtgcgcgagcgctcggccagcggcagagacgccgcgggagccgcccccagcgccaacgccgccgcgggcgggaagggcgaggctcggcgaggctgggcgaggagctgggcggcagacgctgagcggggcgcggcgcggggcgccggacgagcgcgggcgtaggaggagcgcgggcgtaggagtcggcgacccgctcgctcccgcggccggtgcctctgggctgggggccgggctgggggccgggccgggccgggccgggccgggcggccaggcggctccgccccttcgccgggcagcggctgagcgcgcgagaggagcggcgcgggggcgcccccctcggccgggcgctcgggtttcagccgccgctcctccgcgccccgcccgcgcctggcccgctcgccggcgccgggagagacctcgtaacggaactgggacgccagcgctgcattgtgggagcttttaaagcggcggggagctcggcgcgaccctcgggcccaccgggccacgctcgcccggcccgcgacgcccccccgctgtcgcctggcccgcgacgcaccgaggcctgaggacccgaaagccgggcgcggggagatgaccggtggctcgtgacggtcccacgggcaaaatcttccatcgcccggggctgagacttgtcaaactgccctctacggtcacccggaaagtaggaggctttttctgcagaggggaaaaaaatcaaaaagagccgttccatcccccctccaaggactgggtttgaattgcttttcatctgcagtggctgtgattcagcgtccctcttagcagcaggcaatgacagaggcaggagaggggaaaaaaaaaaagaaagaaagaaaaaacacagcaaatgaatcaaacggacgtgagtaacaaaagtttagaaagagctgggctcgtattcagaaaaaacgcctcatccccccgccccgctgcactcccaacccctttaaaaatagcagataatcaagaaaggaaacgggtgctttcatatggaaatacagatgtgtatgttgttttcaatattctactgtttttttgtgtgtggcatgcaattactcaggcactgggcaaaattcagcctttggattttgtggtcacacataccccaactccgcaacagctattaatttgcagggcgatggggtgcggatagtggatgagatacaagaaagcattccaattaaaatgcccccccccaccccgccttttaattttccagacacttgcttttatttttctttttttaaacatcatcaaaacaagaatattaaacttgaagcagaatttgttacagcgtatctgactcaggacctgatttaaggtttggggttttttggccctttgtttcttcctcttgttttttgacctttagttactccacacctcattagttccttgacctgcaggtggactgagaagagagccatggtaagactcaaatttgtcaaatcaacatttggagaggagaaagttcactgtgattcaaatgcaaaaccaaagggaatatgatttaaaagtcaacctggagggcatggatcctcccttaaccctacttgactcttttcaaaggagttgcctagccttaaggtgaatgtttcctaacctctcattcccttctcagcctttcactccactgaacaacatcagccattgcttaattgccaaatctaatggaaaaatttaattcccatcttgtgccctttgtggcatttgccaatgttgacctctccttcttagaactttctgccttttggccgggcgcggtggctcatgcctataaccccagcactttgggaggccaaggctggcagattgcctgaggttgggagttcgagaccagcctgaccaacatggagaaaccccgtctctactaaaaatacaaaattagccgggcatggtggcacatgcctgcaatcccagcaactgggaggctgaggcaggagaatcgcttgaacctgggaggcagaggttgcagtgagccgagatcacgccattgcaccccagcctgggcaacaagagcgaaactccatctcaaaaaaaaaaaaaaaaaaaaaaaaaaaactttcctcctttctttggctgtggtagtgatccctcttttgtgtacttcttgaagcaggtagcaggcaagagtgtggttatcgttggaccaggattcaggatctgactgagtagctgactcttaatccagtttgtgttgatcaccaggaggatctggacctcagtattaccacatctagaggtgagcaagttgactgactcttgataactaactcttatatgatgagcatttatatcaggacagaacttcctgattggataacaatacctactatttaggaaaaacccttcctaaaaatccaggtatcctcacctccagtcttactgatggctgccaaagtcagtgaatttgcctccattcagtgctggataagtgcagaaaaatctttaccctacctagcccatttggttaatgcgttctttcttcagagtgtagtacaatttgttttaagcttttttttttttttggtagctataatcacatccctgttaagccttcctgagatcacaccaaatgtccttgatgggaattgtaaacaacccttacttctggtttctaatgatattccaggaaaggagcctaactagagtcagtgagtattcatgcacttcaaaccctgtgacataataagatttgatttttaagaaaacaacttgagaggatggattcagaaaagaggcagatccaagggagagtctaaactggagagcagtggcaatgaacaggaggaggccatatcgagagatgaattgatcatcttatagacctggaggtcagaaatctaaaatcaaagtgtgggctgtgttccttctggaggatcgaggggagaatccatttccttgcccttttcagcctctagatgccacctgcattccttggcttatagtccctttctctatgtttaaggccaactgcatagcatcttcccccatttctttgtaacttctgcttcatggtgatggggacatctctctctctgatcgtaggaattgatttagatgcttttctagccatatgtattatgaactaaatgcagttgaattacttatgggaggaaatggcaggtgacctcattacttgtcaaatcatcgttagataactgacttgactgttaagattgctgaagcagtgatttattacctcagctaaatctgtatcaatctggtgacccgtgtaactgaaaccaagatgttaacactgtaagaaaacctagcttatgtttgcagctcctgagaataaatccctttatcttgaaatacctggaaatccctttttaatgtccagtggagtcatattgccaagtttgagaaatgtgtctagaccagtatttcccaaacagcccaccagacaacaccagcctgtaagatggtgatattgtttggatgttttttccctccaaatttcgtgttgaaatgtgaccgccatgttggagttggacctagtggaaggtatttgggtgatggggaatctcttgtgtggctatgtaccttccctgcagtaatgagttcatgaaagatctggatgtttaaaagagtctgtgatcttcctcctctctctcttgctcctgttcttgccaggtgatatgccaactccacctttgccttccaccatgtttggaagctccctgaggcctcaccaggagcagatgctcgtcccatgcttcctataagcctgcagaactgtgagccataataaactgtgaattataaattgcctttatagcaatgcaaatggaccagtacagatgggatgctgggaagacagttgtttccaccttcagtaaagtccgtggaacacagttgtgactatattctaggccagccaagatgcttgtactcagaaaggagtggtctcaggaccataagaaagtgaaaaaataaaaataagaaaataaagaagggattgtcaatgaatcagaattcatcaaggtcaaagtcttaggaaattccttcatgaggaagtctaggggggctatggaaatgaaatttttaaacaaataggtatgtggtgctggcaggaataaattatggacttatgaatataacataagattctttattacctggtctcacccgtctttccacctctgccccccttcttgcccgactctgtgtatcacccataataaactacttacagcttcctagtgttaaatttaccctaaagctgcctccttcaatattttaagtttaacctaaaggttcttcatacatagtgaactataacccaatgattaaacagattgtaacctactcttgtaccagtcaccaagtttcagccaatcagaggtggccaactgttcaaaccatgctcaaataagggaaatgtcatggtgtaactaatccagctgtttctataccttacttctgttttcttaggtcactttccttttttgtccataaattctctccaaccactcagcagcactggagtcactccaaagctatcctggttcaggggtctgtctgattcacaagtcattctttgttcaattgagctctgctaaatttaatttgtctgaagtttttcttttaacagatggtgtcagaaatggaccccaaagtagagctcccagtgatcccccaggagcactgagtgaccacaaggggtacctgctgggcccgtcctctcgcagtgtccactgctctcttacagcaactggagattgtggctgcattctctctcagattctgaagctccatacattgccgttttcagctgttcaagcttgcttgagcaaatttttgatcttagctgagtttggaagtcgatagacattggactgggtccaggatttgattggatctgataattaactggcttggatccagttagatgcctcggttatctgactgggtcagatagaaaccgccagtaaatattttaataacaatactgcaggggtatgaactctggctttaagaaactcacaaggaattttatgttctataccctttgtttctttttcttgtgtgcttcggtcaggaaaaatcattagtcaagttaatcaaggggatctgagagccaaatacaagattcaacgtaaaaatggaatccttgggctaggcgtggtggctcaggcctgtaatcccaggactttgggaggctgaggcaggcggatcacctgaccttaggagttcgagaccagtctggccaacatggtgaaaccccgtctccactaaaaatacaaaaattagccaggcgtggtggtgggcacctgtaatcccagctactttggaggctgaggcaggataatcacttgaacccaggaggcagaggttgcagtgatctgagattgcaccactgcactccagcctgggcaaaagagcgagactccatctcataaataaatacataaataaataaagaaatccttaatttctgcggaactgagtgctctaccttctggctacacctacgtatacctgtatgaggtataggccctggaagcagcaaacacttacagaaatggtgaaatcttactaaaggtaatctaaagttatggtggaacatcccaaatgaacaacactgcactttaggaagtacatataaaaatgaagtctcccaatttagtattattcagggatggctgttgaagttcagaagcttctaaaaagattccaataattttacagattcttttaaaagattctttgtaaaaggcaaataaaaagcttaagtgactaatcagaaaaattaggtcttctaaccttttgtcattgttactgtcttgccctgaaagggaaaagaaagctggataaagtatttatagaagatagaggacctgtggtggctcatgcctgtaatccaaggtggaaggattgcttgaggccagaagttcaagaccagtccaagcaacatagcaaggccccatctctacaaaaaat

SEQ ID NO: 3302 - DNA, 489 bp, Homo sapiens
  SITE (107): n equals a,t,g, or c
ctctaccttctgctacacctacgtatacctgtatgaggtatagcccctgaagcagcaaacacttacagaaatggtgaaatcttactaaaggtaatctaaagttatgntggaacatcccaaatgaacaacactgcactttaggaagtacatataaaaatgaagtctcccaatttagtattattcagggatggctgttgaagttcagaagcttctaaaaagatcccaataattttacagattcttttaaaagattctttgtaaaaggcaaataaaaagcttaagtgactaatcagaaaaattaggtcttctaaccttttgtcattgttactgtcttgccctgaaagggaaaagaaagctggataaagtatttatagaagatagaggacctgtggtggctcatgcctgtaatccaaggtggaaggattgcttgaggccagaagttcaagaccagtccaagcaacatagcaaggccccatctctacaaaaaat

SEQ ID NO: 3303 - DNA, 1255 bp, Homo sapiens
cagtgtccactgctctcttacagcaactggagattgtggctgcattctctctcagattctgaagctccatacattgccgttttcagctgttcaagcttgcttgagcaaatttttgatcttagctgagtttggaagtcgatagacattggactgggtccaggatttgattggatctgataattaactggcttggatccagttagatgcctcgggtatctgactgggtcagatagaaaccgccagtaaatattttaataacaatactgcaggggtatgaactctggctttaagaaactcacaaggaattttatgttctataccctttgtttctttttcttgtgtgcttcggtcaggaaaaatcattagtcaagttaatcaaggggatctgagagccaaatacaagattcaacgtaaaaatggaatccttgggctaggcgtggtggctcaggcctgtaatcccaggactttgggaggctgaggcaggcggatcacctgaccttaggagttcgagaccagtctggccaacatggtgaaaccccgtctccactaaaaatacaaaaattagccaggcgtggtggtgggcacctgtaatcccagctactttggaggctgaggcaggataatcacttgaacccaggaggcagaggttgcagtgatctgagattgcaccactgcactccagcctgggcaaaagagcgagactccatctcataaataaatacataaataaataaagaaatccttaatttctgcggaactgagtgctctaccttctggctacacctacgtatacctgtatgaggtataggccctggaagcagcaaacacttacagaaatggtgaaatcttactaaaggtaatctaaagttatggtggaacatcccaaatgaacaacactgcactttaggaagtacatataaaaatgaagtctcccaatttagtattattcagggatggctgttgaagttcagaagcttctaaaaagattccaataattttacagattcttttaaaagattctttgtaaaaggcaaataaaaagcttaagtgactaatcagaaaaattaggtcttctaaccttttgtcattgttactgtcttgccctgaaagggaaaagaaagctggataaagtatttatagaagatagaggacctgtggtggctcatgcctgtaatccaaggtggaaggattgcttgaggccagaagttcaagaccagtccaagcaacatagcaaggccccatctctacaaaaaat

SEQ ID NO: 3304 - DNA, 177 bp, Homo sapiens
gtcactagaaactcttaccactgatctaacataaatcttaccattgtttaaggtgcttttccttgccatcttgtcttaaccgggcctttaccgacacttttcttccttggtttagggaaccagtggtacagtatttaggcccaaagtctcagctctgtgcttttgagatatgaattt

SEQ ID NO: 3305 - DNA, 177 bp, Homo sapiens; identical to SEQ ID NO: 3304

SEQ ID NO: 3306 - DNA, 177 bp, Homo sapiens; identical to SEQ ID NO: 3304

SEQ ID NO: 3307 - DNA, 2125 bp, Homo sapiens
  SITE (3): n equals a,t,g, or c
  SITE (6): n equals a,t,g, or c
ttntgngtatttcttgaagcaggtagcaggcaagagtgtggttatcgttggaccaggattcaggatctgactgagtagctgtctcttaatccagtttgtgttgatcaccaggaggatctggacctcagtattaccacatctagaggtgagcaagttgactgactcttgataactaactcttatatgatgagcatttatatcaggacagaacttcctgattggataacaatacctactatttaggaaaaacccttcctaaaaatccaggtatcctcacctccagtcttactgatggctgccaaagtcagtgaatttgcctccattcagtgctggataagtgcagaaaaatctttaccctacctagcccatttggttaatgcgttctttcttcagagtgtagtacaatttgttttaagctttttttttttttttagctataatcacatccctgttaagccttcctgagatcacaccaaatgtccttgatgggaattgtaaacaacccttacttctggtttctaatgatattccaggaaaggagcctaactagagtcagtgagtattcatgcacttcaaaccctgtgacataataagatttgatttttaagaaaacaacttgagaggatggattcagaaaagaggcagatccaagggagagtctaaactggagagcagtggcaatgaacaggaggaggccatatcgagagatgaattgatcatcttatagacctggaggtcagaaatctaaaatcaaagtgtgggctgtgttccttctggaggatcgaggggagaatccatttccttgcccttttcagcctctagatgccacctgcattccttggcttgtagtccctttctctatgtttaaggccaactgcatagcatcttcccccatttctttgtaacttctgcttcatggtgatggggacatctctctctctgatcgtaggaattgatttagatgcttttctagccatatgtattatgaactaaatgcagttgaattacttatgggaggaaatgacaggtgacctcattacttgtcaaatcatcgttagataactgacttgactgttaagattgctgaagcagtgatttattacctcagctaaatctgtatcaatctggtgacccgtgtaactgaaaccaagatgttaacactgtaagaaaacctagcttatgtttgcagctcctgagaataaatccctttatcttgaaatacctggaaatccctttttaatgtccagtggagtcatattgccaagtttgagaaatgtgtctagaccagtatttcccaaacagcccaccagacaacaccagcctgtaagatggtgatattgtttggatgttttttccctcccaatttcgtgttgaaatgtgaccgccatgttggagttggacctagtggaaggtatttgggtgatggggaatctcttgtgtggctatgtaccttccctgcagtaatgagttcatgaaagatctggatgtttaaaagagtctgtgatcttcctcctctctctcttgctcctgttcttgccaggtgatatgccaactccacctttgccttccaccatgtttggaagctccctgaggcctcaccaggagcagatgctcgtcccatgcttcctataagcctgcagaactgtgagccataataaactgtgaattataaattgcctttatagcaatgcaaatggaccagtacagatgggatgctgggaagacagttgtttccaccttcagtaaagtccgtggaacacagttgtgactatattctaggccagccaagatgcttgtactcagaaaggagtggtctcaggaccataagaaagtgaaaaaataaaaataagaaaataaagaagggattgtcaatgaatcagaattcatcaaggtcaaagtcttaggaaattccttcatgaggaagtctaggggggctatggaaatgaaatttttaaacaaataggtatgtggtgctggcaggaataaattatggacttatgaatataacataagattctttattacctggtctcacccgtctttccacctctgccccccttcttgcccgactctgtgtatcacccataataaactacttacagcttcctagtgttaaatttaccct

SEQ ID NO: 3308 - DNA, 3651 bp, Homo sapiens
agttcacctgctgccgttgtcgtcgccgccgcggctcccggggctggatggggggccgaggccagccagtggcacccggaagaaagagacgcggcggcggcgacgccgacaccctcaggacgagtgtccggacttgcccacagcctcaaggaggagacggcgaggcccggcccccgctgtccctggtgtaaagaagtcgccgtagccgtcgcggccgggactccccgggctctcgcccttcaggtttcgttgacactcaggaccgtacgtacgctgcgccatgttcaagaaactgaagcaaaagatcagcgaggagcagcagcagctccagcaggcgctggctcctgctcaggtacgatggccgccgctctcctcccctggttccgaatacctcttgaaccggcccgcggacgaaagaggcggggggagtggggaagttcttccgtgacctttaacccctaacccgcacttttcccaaactccggacccagaaggagctccgggcggtgcaggtcgtccgtaactcctgacctggattttcccatcgcaaaacttcatccagtcaatgagtggatgggggtggctggatccctcgtgacattccatctccgttaagagttttctcctaaggccagagtccgaacttgcatgatttctgatccatatttgaggttttcccactcatctgagaccccacgctgggaatgagggcggggtggaaaaacccgggtcccttgtgatatctgacctctgctcgaggggtccccctctcttttgccagtcgtgagattttgtatggaatggccaggatcccgcacaattgaccctcgacggaagtctcctaattccaaacccaggtccagggattgaaggctggggagtagagccatcctgggtcaggctgctggtaggagcggtgggacctgaaagacgtggcggcgtggccggcgtccagcgcccgaggctgtcacgagttagtcacttcgcataacttggttaatccgggactggcgggcggaggggcagacactctgcctgtccggagctctgctctgctttttaagtcttgctgctctgcggacagggttatgcttgtttttcaggaatgctgttgctttaggaaatgcgtttccagggaaaaggaggcgtgttaagtagtattaatttaaagaaacaatttcctaagcgttcactggagatgtttcgatgctggcagcacagggtcttaacagcgaagacgtcggtttctgcttaatttcttcccagcctttttgaatttcaacagactgagcagatctgtcccttaattttagggtttttggtctttgcttgcggttgcaagaaaagctgagttttgactaacttggaggcatttctaaattcttaacatacaacgattgcattaggtttattctgaaactataaattgaagttgttctttttaaatgtaaagctcatgtgtagtaaaacagtgcttgagaaaaacatcagaacacaacactgaagggttgcttcttttctcaagtgcaaatggtaattaaaatttaaatggtaaagattgtccttttcataccatctattgcagtcatttacaattttacaaaacactgttaattaagaaacaaagataaactttaaaagtgaggtagagatgaggaatgtgaggaaatgggcatgttagtgaatgtaaggcacttccacttgggaatgtataaaatgtaattgagccaggattccatttctagaaatttattctaagaaaatttaggttgtattaaagatttagctctatggattttcacgtcaatgttgttttaataggttaaaaactagccaaaaatgtccaacaatagagaattggttaaattttatcaggcaattagttatgcttcataggttattatgcagccataaaaagtcaacatttactgtgtcattagtatgtaccagacattttgcttagtatttacacagattatttaatctcacataaacctgtgaggtagataatactataattcctcttttatagatgaaggagtgaggctcgaagaggtgaagtaacttgcctaatgttacgcagctagtgttagagtcttcagaaaagtattaacacagaaggatatttgtgttaaaagacagaagcagcaggtaaaatgtgatcccagttttgggaaaaagaatctgtatgtaagtgtatttatatacacacatagtaaaactagtttaagaagaatatactttaaggtgctggtgaattattgagtgtgctttttcttatttgtagtgtttagcttttcttcgtgaaaatgaattgtttttgttcattaacaaagaggtttttagtaataataagctagtcacaaactaagatataagagctctgtttctatagcttaatgcttctggtgagacagggcatctggatcaaataaaatcactttgtgtacgaaaggtttaaaataatccttttggattatatgtatattcactatgttggccaggctggtctccaactccggacctctggtgatccgccagccccggcctcccaaaatgctgggattacaggtgtgagccactgcgcctggccattcgtggtctacttttgataattattttgtaacctttctttctgcctgccatatatttttctccttgcttgtgaattgttgtgatcttagaaacaaaaaatgtggcctggtatggtggccttacgcctgtaatcccagcactttgaatcgcttgaactcagtagttcaagaccagcctggccaagatggcaaaatcccatttctggcctggcaccgtggctcatgcctgtaatcccagcactttgggaggccaaggcgggcggatcacctgaggtctactaaaaatacaaaaattagtggggcgtggtggcgcacacctgtaatcctggctactccagaggctgaggcaggagaattgcttgaccctgggaggcagaggttgcaatgaactgagatcgtgccactgcactccagcctgggagacagagcgagactccgtctcaaaaaaaaaaaaaaaaatatgttttaacaacaaatacctattttggatttttaaactccttaaagaactaagtcaataaaagaaacatcaagaagtaatacagacattgtaatttcttgggatatatgtagtacatgaatacaaatattttaaaacatttttagccttttcaagtacttctaaaacttaaaaattatagaagtatagatacaaaaggatgaatacatgactccacttaattgaggtacctagagtagtcaaattcttagagacaaaatagaatggttgttgccaaaggctggagagaggagagaatggggagttactgtgtagtgggtacagagttttagtttggaaagatgaaaacgtactggtgatggatggtggtgattccacaacagtgtgaatgtagttcatgccactgaattgtacagctacaaatgtttaaaatggtaaattttatgttatgtatatttttaaaaaatcaacatatacgcccctccttatgcctgcagaatcatcccttatttttttccctcagctcagagatggcagctgacctcactcttttagagtgagaccccaaaataatagtttatgtgatataaatttaaa

SEQ ID NO: 3309 - DNA, 673 bp, Homo sapiens
atgaactgagatcgtgccactgcactccagcctgggagacagagcgagactccgtctcaaaaaaaaaaaaaaaaatatgttttaacaacaaatacctattttggatttttaaactccttaaagaactaagtcaataaaagaaacatcaagaagtaatacagacattgtaatttcttgggatatatgtagtacatgaatacaaatattttaaaacatttttagccttttcaagtacttctaaaacttaaaaattatagaagtatagatacaaaaggatgaatacatgactccacttaattgaggtacctagagtagtcaaattcttagagacaaaatagaatggttgttgccaaaggctggagagaggagagaatggggagttactgtgtagtgggtacagagttttagtttggaaagatgaaaacgtactggtgatggatggtggtgattccacaacagtgtgaatgtagttcatgccactgaattgtacagctacaaatgtttaaaatggtaaattttatgttatgtatatttttaaaaaatcaacatatacgcccctccttatgcctgcagaatcatcccttatttttttccctcagctcagagatggcagctgacctcactcttttagagtgagaccccaaaataatagtttatgtgatataaatttaaa

SEQ ID NO: 3310 - DNA, 451 bp, Homo sapiens
cattatatttattgtgccctttatttctattattattgcattgtaatatataatgaaacaattacacaactcaccataatgtagaatcggtgggagccctgagcttattttcctgcaactagatggtcccatctgggggtgatgggagacagtgacagatcatcaggcattagattctcataaggagcataacctagatccctctcatgcctagttcacagtagttccagctcctatgagaatctcatgccacagctgatctgacaggaggtggagctcagacgataatgtgaaccatggggagcagctgtaaatacagattaagcttccctggcttgccagagattcacttcttgctgtgtagcccggttcctaacaggccatgggctggtacccgtttgtggcccgggggctggggacaccttacatacataaggtgttcactacgaga

SEQ ID NO: 3311 - DNA, 10612 bp, Homo sapiens
cctctgcctccccagttcaagtggttctcctgcctcagcctcccgagtagctgagattacaggtatgcgctaccacgcccggctaattttgtatttttagtagagacggggtttctccatgttggtcagactggtcttgtaggagaaatagacttcactaaaatattacagccaattagtaaaaataagacagtaaatagtaacaccttgtcctggagtgatagtagccagtattgctaccatatattactgacaatgtttaattttcaacaacaaaaataattgagagataaagagaagtaagaaaacgtgaccttatggggaagaagactggcaaaacatctcaactttgaaggcctaagatgtgttactaagcagacaaatatttcaaattggccattataaatatcttaaaagaactagaggacaccatacctcaggaggcaatgatataattacaataattttgcaactagagaatataaataaataggtaagaattatagaaaagaaccatatggaaatctggagttgtaaagtataataacagaaattacaattcattagagaggtttaatactagattttaactggtagaataaacaatcattgaatttgaagatagattgatagaaatcacccagtttaaaaaatacagaataaagaagtaagtaaaatgcagtttcagagaaatggcagaagccattgagaataccaacatatgtgcagtggtagtgccagaacataaggacaacgagctgagagaaaaaatatttaaagaaataatacctgaaaattttctatattatgaaaaaaaaatccaagaagtgtaaagaatttgaagtataataattgcaaatatattcccccttagacacatcaaagtaaaattatgaaagtaaaaaaacatcttggaagcatgaagagaataatggctgatatacaaggaaactctaataatacagtaataattaaggccacagtggaggtgtatgacatattaatagtgtagaagaagtaaattcaaaattttacctgaagcacgactgacattcttaaatcaaagtaaagacattgctagataaacaaaaactgggaatgtgttcttagcagacccaccttgtaagaaaagctagtttttgagaatgaagaatactgaccccaaactgtaattgaaattcctatgaaaaatcagagtaccagtcataattatgtaataattatagaggctagtataaatgcatattttttatgtattagctggcatatatgcctatacactgtatacttataaatattcatatatgtgtattgtgtgcagtatttccatatttgtatttgtgagcttacaacatatagaaatgagatctatttaataatatcacaaagtatgtggttgagaacaaaactgttgtaataaggaaatgaatcttttttttttggagacagagtttcgctcttattgcccaggctggagtgcaatggcacgatcttggctcaccacaacctccacctctcaggttcaagcgattctcctgcctcagcctcccaagtagctgggattacaggcatgagccaccacacccggctaattttttgtatttttagtagagacaggttttctccatgttggtcaggctggtctcaaactcccaacctcaggtgatctgcctgcctgggcctcccaaagtgctgggattacaggcgtgagccaccacacctggccaggaaataattcttgatggtaactcagatccacaggggtaatataaaagaaccagaaataataagaaggataataaaatgctaaaaaaaaattttcttaccattcttctctgacctgattatataaaattatataactaagtatataattttgaggattttattgtattataataatggctgaaaagggagaagttatagagatatatagaggtataatgatttttcctttcttttttttttttttttttttgagagggagtcttgctctgttgcccaggctggggtgcagtggtgtgatctcagctcactgcaatctccacctcctgggttcaagcgattctcctgtctcagcctcctgagtagctgaaattacaggcacgcaccaccaggcccagctaatttttgtatttttagtagaaaaggggtttcaccttttggccaggctgatctcgaacttctgacctcaagcaatccacccgccttggcctcccaaagtgctgggattacaggcgtgagccactgcgcccagcccatatagaggtaatatttctatattatactcatgttagtgtaaatatgaagtcgagtcctttaggatgtgtaagaaaagtcctagagagatgtcagtgacataatagaattggagctgcctcatatacactatggaatactgtgcagccataaaaaagggtgagttcatgtcctttgtagggacatggatgaagctggaaaccatcattctcagcaaactatcgcaaggacaaaaaatcaaacaccgcatgttctcactcataggtgggaattgaacaatgagaacacttggacacagggtggggaacatcacacacaggtctgtcgtggggtggggggctaggcgagggatagcattaggagatatacctaatgtaaatgacgagttagtgggtgcagcacaccaacatggcacatgtatacatatgtaacaaacctgcacattgtgcacatgtatcctagaacttaaagtataatttaaaaaaaaaaagaattggaggtacctgttttgtccctcctttcatggatacaccaagtaagtacatgcatgtggatcaattctatccaagagaaagccaaaatgtagttgaaggatgctcacacactggatgactgagaaaatatctacaacaaaatgggaaggataaactgaggtatactgatggttaaacctcaccttgagcacaggctggtataatttggaaagaatccttaactcccaccctcttcctgaggggtgacgggttgatagcacacatatagtgtcccagttcttacattctctaccagaaggcttggcccttaaatcccattatatgaggagcacaaggacttggcactagagtatttccttgaagaacagtagaatgggtggggggttgaactgcaggagcacttccaacagctgtatctcctgggatcagtataccctctagcttctcactggaaacagtttggctgcacatttctagcagcttcttgtgtttgtgtcttctatcatgcctgcacctaggagcccgtgtagcaaatgaagcataaacctcctcaagtgttaatgggagggatggcactccctacatcttccctggattgctctagtgattaatccaggtctatagtttcccttgaaagagatttgaggcctcagtgagcaaaaatggaagggtcaaaacccaccatgccttttcccagctttctccagatatgtataaccttgtaatctctccctggaaggagactgggagacagacctctcttatgctatatgtgaggaactgtacttcacctgccttcctatgtaccagtcttgttccaacaacatattggcctggagattctgtgtgaagtgagtttgtgagacttcaggaagccttaaagggagatgaatgttcttcgcaatttcttcttcagattgctccagcaataagtccaggcttccaaatccttactggcaggaggttgtgtgacttactgtgccttattgtgagattgggtacttcccatgctttcctacttggcctgctctggtgatgaattcgtttctgcagactttccctgggagtaatttgtacacatactgactgccccatattttacatccctcattcaaggtactggctcctgtatcacccagctctggagttgaaagagctcttcattcctgagtctcctgtaccactgagaataggtagttttctctcctctcctctcctctcccctcccctcccctcccctcccccccttttcttttcttttttcttttctttttttgatggagtttcactactgttgcccaggctggagtgcagtggcgcaatctcggctctctgcaaccttcacctcccgtgttcaagtgattctcctgcctcagcctcctgaatacctgagattacaagcatgcaccaccacgcccgtctaattttgtattttcactagagacggggtttctccatgttggtcaggctggtctcgaactcccgacctcaggtgatccgcccgcctcagcctcccaaagtgctgggattacaggcatgagccaccgcgtccagcaagaataggtgattttcaaacttggaaacattcagaagttatcgcctcagtttcagattgagtagtctcaaagagattacagacatctaccacaaattctctacttggtgtggtgcaaaatcagtatgatgtaaactttgtctctcagtttcttcaaaggaaagaagcaactggaacacacatataacactaacccttccagctgcattatgagggaccagtacctgtctcaaggcaaaattatgacttagttcatcctcacctctggaggccagtaaaagtgggttatagaagaacaaagaggcatctagatctttcactgggttatttggagagaaacatctcctaccgaaggccagtttaacaagactggtagaggaggttatcttatctaattcacagaaatcaacacattgagtcaagaaaaatgaaacacagaaacactctaaataaaagaagataagtcttcagaaaccaaccctaatgaaatgaagatatgtgattaacctgacaggaaattaaaaagagcaaccataaagagtctcatgggagcaatgcatgaacaaactgagaattttcataaagaaataaaagataacaaaaagtataaagttgaagaatacaataactggactcaaaaatttaatgtgtccaacagaagaatcgatgaagcagaagaaagggctatcaaacttgtagataggccattggaaatcatgtaatgtgaggagaaaaaagaaaaaagattgaagatagtttaagagacttttgagacatcctcaaaggggaataatttatacattaccagatggagaagatagagggaaaaggacagaaaacatatttgaagaaataatgtcagaaaacctcataattctggcaaggaaatagaaatttagatctaagaatctcgaacatcaggtatgatgaatccaaggagactcacaccaaaccatattgtaattaaataaaggttaaagacaatcttcagagcagcaagggaatagtctcttcttacatacaaaatgatccacggaagactgtcagcagacttcaccagaaaactttcacgccagaaggcagtcgtgatatatacaaaaagctgaaaggaaaacactgccatccaggaatactatctccaactatcctgtgtttcaaaaattaaggagaaatataaagttctcaaacaaaagatgtgggagtttaccaccactagacctgcacgggaagaattgctaaagggagtccttcaagctgtagtaaaagagtgctaattagaaacatgaaaacgtgagtataaaactcgctgataaaagtaagtacatagttggctgggtgcggtggctcacgcctgtaatcctagcagtttgggaggccgaggcaggcacatcacctgaggtcaggagttcgagaccagcctggccaacatggcacaacatcgtctttactaaaaatacaaaaattagccaggcgtggtggtatgtgcctgtaatgccagctactctggaggctgaggcaggagaatcgcttgaacctgggaggtggaggttgcactgagccgagatggcaccactgcactccagcctgggtgacagagcaagactccatctcaaaacagaaaaagtacacagtcaaactgagaatatgctaatactgtaacggtggtgtgaaaacaaattatgtatttatcataaaagttaagacaaaacttaacttgtagcaacaataatttaaattatacaaattataaaatgatataaattgtgtcatcaggaacacaatgtggggttgaaagtaaaagcatagcatttgagtaattgatctaattttagttgtattaatttaaaatagtctcataagtgtaagagactgtttaaggttcatggtaaccacaacgtttgcaaaaaacccttagtagatatgcaaaatataaaaagaaagtagatatgcaaaatataaaaaggaaaacattgaatcacataaaaaaacagcaagaaaggaagagaaaagcaaagaatttgtaatcaaccagaaaacaaattgcaaaatgacagcagaaattctttacctgtcaataagtgctttgaatgtaaatagattaaattctctaatcaaagtacataaagtggatgaatggattttgaaaagtctcatctatatgttgcctacaagacagttcatttttaaggatacatataaattgaaagtgaaaggatggacagatatgccatgtaaatggaaactaacagagagcagaggcagatctcttaatatttacatcagatgaaatagaattaaagtaaaaatttttaagcagagacagggtcattatataatgataaaaagtggtctgttcatccatggggtataaaagtcataaaggtatatgcactcaacattacagcacctaaatatataaagccaatattaaaagctttgaaggaaaatataaaatctaatacaataattgatgggacttcagcacacctctttaagcaatggtgagatcattcagacagaacatcaatgagacatcagacttaaaccacaattgaaaaccaaagttgcccatatggacctaaaagacattgatgcagtcttctgttcaacagcagtggaatacacgtttttcaaaagtgcacacagaatattctccagagtaaatcatacgttaggtcacaaaagaagtcttaagaaattttaaaagattgaagtaatattgaatatcttttctgaccataatggtatgaaactagaaatcagttataggaggaattttagaatattcacaagcacatggaaattaaataacatatcaatcagtggttcaaggaagaaattaaaagttattttcagaaaaaaatggaaacacaaaataccaaaacttataatatgcaagaaaagcaattcctagagggaaattttagcaataaatgtctagaagtacaaagaagaaatagctcaaacaatttaatgttatacctaagagaactaaaagaagaacgtaacaaagattatagtataaatgagactagaaaaataatagaaaataccaacaaaactgaggggatattttgataaactaaaaaaattaagcaatgaacaataaaataagtaaaaagacagtccaatagtgagtaagaaggctgaatcaataattaaaagtttctcataaaaccaggaacttatagattcccttctgaattctacagatgtttaacccttttcccgtttgccccaaactcgctggtggcccttgtggctgtagcatttaccctgagataactttgctacaaaatatcttgctttcattattttcgtattgctctagtatattgactttggaagcaaaacacatttttctatttatagcattctgtctttagtagtggtatttccatttacaaagtatagtaactctcaatcactgaaaatgtcaaattctagaaaacatagtattcctgtgtatgatgttaatattcttgaacagttattgtccaaagatgcattgattttcttcagaaatagacaattccgatgattgtgatgttctgtttagaaataactccaagaacagtttttgtattttattttcacattgaaaatcagtcagatttgcatcagcctcaaagcgcatgtttatgtaaaatatttaagtcctggcagcgagctgccctttttttttcctaaatgggaaaagagttaaagaaaagctaatatcaatccttttcatactctttataaaagttgaagaggagggaataagttccaatcacactttatgaggccaacgttaacctgataccaaagtcagatgaagacactaaaagaatacaaaattacaggccaatatccctgatgaacatagatgcagaaacccccaacaaaataccagcaaactgaattcaacaacaaatttaaaagatcattttcccatgatcacatggggagataaccttttgcatttaaggatggttaaacatacataaatcaataaatttgatagatcacattaaagtgaacatcaaaaactacatgtctcaatacttccagaaaaagaattgacaatatttaacaaccttttttttttttttttttttcggagacagagtcttgctctgtcacccaggttggagtgtggtggcactatcttggctcactgcaacctctgcctcctgggttctcctgcctcagcctcccgagcagctgggattacaggcatctgccaccatgcctagctaacttttgtatttttagttgagacagggtttcaccatgttggctaggttggtcttgaacccctaacctcaggtgatccaccctccttgacctcccaaagtgctgggattacaggcatgagccacagtccccggcccaatacttaacatctttgcatgataaaaacctgaacaagttaggtataaaaggaagatgtctcaacacattaaaggccctatatgaccggcccagagctgaaatcttaacaccgaagagttgaaggctttttctctaagatcaggaacaagacatggatgccattttttctccttctgttcagtgttgtactggaagtcatagcaagagcatttaggcaagagaaataaaagacatctaagtaggaaaagaagaaaaaacttgcctctcctgattatcttatcttatagctagaaaaccttaaagactccattaaaaaaaaaaaaaactatagaactaataaaatgaattccataaaaagtgctacgtacaaaattgacaattaagtctgtagcatttctatacactaacaaacaacaatctatccaaaaaagtaatcaggaaactaatcacatttacactatttactaagtaaacaaacttatgaatgaatttaaccaagtaggttaaagatctgtatagtgaaaacattgatgaaacgaattgaagattacaaaaatagaaatttttctttgtacatggattgggaaatttatattgttataattttcatactgccaaaagaaacatacagattctgtgtaatcaatatttcaatgtcctttttatttttattttttttacagaaatacaaaaaaaattctaaaacttgtatggaactacaaaagacattaaataatcaaagtaatcttgagcaacaaggacacagctggaggcatcactctacctgattttgtaatccattatcaaaaaactgtggtaccagcataaaaacagattcactgaccagtggaacaggaaagcccagacataactcatacatttccatccaattgatttttgacaaaagtggcacacagaatggggagaggataaataaataaataaattgttttgagatatctgtatatctatatgtgaaattgaaccattttctcatagcatatagaaaaatcaactcaaaatggattaaagcctgaaatgttgcctttgaaactgtaaaactactagtagaaaatataggggaaaagctctatgatgttgttctgggcaatgatttcttggatacatccttaaaagcatgggcagcaaaaacagccagacaactatcagggaacctgcccagatagtcacataggttcttttctattttccctaagcattggccgggttgagaaataaagggacagagtacaaaagagagaaattttaaagctgggcatcctggggagacatcacatgtcggtaggttccgtgatgccccctgagccgtaaaaccagtaagtttttattagggattttcaaaggggagggagtatacgaataggaggtgggtcacagagatcacgtgcttcacaaggtaatagaatatcacaaggcaaatggaggcagggcgagatcacaggaccacaggactgggttgaaattaaaattgctaatgaagtttcgggcaccatcgtcattgataacatcttatcaggagacagggtttgagagcaacctgtctgaccaaaatttattaggtgggaatttcctcgtcctaataagcctgggagcgctatgggagactggggcttatttcatccctacagtctcgaccatagaagacagctacacccaagggggccattttagaggcccaccctcaggggcacattctctttctcagggatgttccttgctgagaaaaagaattcggcgatatttctcccatttgcttttgaaagaagagaaatatggctctgttccacctggctcaccggcggtcagagtttaaggttatctctcttattccctgaacattgctgttatcctgttcttttttcaaggtgcctagatttcatattgtttaaacacacatgctctacaa

SEQ ID NO: 3312 - DNA, 469 bp, Homo sapiens
aaatcccattatatgaggagcacaaggacttggcactagagtatttccttgaagaacagtagaatgggtggggggttgaactgcaggagcacttccaacagctgtatctcctgggatcagtataccctctagcttctcactggaaacagtttggctgcacatttctagcagcttcttgtgtttgtgtcttctatcatgcctgcacctaggagcccgtgtagcaaatgaagcataaacctcctcaagtgttaatgggagggatggcactccctacatcttccctggattgctctagtgattaatccaggtctatagtttcccttgaaagagatttgaggcctcagtgagcaaaaatggaagggtcaaaacccaccatgccttttcccagctttctccagatatgtataaccttgtaatctctccctggaaggagactgggagacagacctctcttatgctatatgtgagg

SEQ ID NO: 3313 - DNA, 10614 bp, Homo sapiens
cctctgcctccccagttcaagtggttctcctgcctcagcctcccgagtagctgagattacaggtatgcgctaccacgcccggctaattttgtatttttagtagagacggggtttctccatgttggtcagactggtcttgtaggagaaatagacttcactaaaatattacagccaattagtaaaaataagacagtaaatagtaacaccttgtcctggagtgatagtagccagtattgctaccatatattactgacaatgtttaattttcaacaacaaaaataattgagagataaagagaagtaagaaaacgtgaccttatggggaagaagactggcaaaacatctcaactttgaaggcataagatgtgttactaagcagacaaatatttcaaattggccattataaatatcttaaaagaactagaggacaccatacctcaggaggcaatgatataattacaataattttgcaactagagaatataaataaataggtaagaattatagaaaagaaccatatggaaatctggagttgtaaagtataataacagaaattacaattcattagagaggtttaatactagattttaactggtagaataaacaatcattgaatttgaagatagattgatagaaatcacccagtttaaaaaatacagaataaagaagtaagtaaaatgcagtttcagagaaatggcagaagccattgagaataccaacatatgtgcagtggtagtgccagaacataaggacaacgagctgagagaaaaaatatttaaagaaataatacctgaaaattttctatattatgaaaaaaaaatccaagaagtgtaaagaatttgaagtataataattgcaaatatattcccccttagacacatcaaagtaaaattatgaaagtaaaaaaacatcttggaagcatgaagagaataatggctgatatacaaggaaactctaataatacagtaataattaaggccacagtggaggtgtatgacatattaatagtgtagaagaagtaaattcaaaattttacctgaagcacgactgacattcttaaatcaaagtaaagacattgctagataaacaaaaactgggaatgtgttcttagcagacccaccttgtaagaaaagctagtttttgagaatgaagaatactgaccccaaactgtaattgaaattcctatgaaaaatcagagtaccagtcataattatgtaataattatagaggctagtataaatgcatattttttatgtattagctggcatatatgcctatacactgtatacttataaatattcatatatgtgtattgtgtgcagtatttccatatttgtatttgtgagcttacaacatatagaaatgagatctatttaataatatcacaaagtatgtggttgagaacaaaactgttgtaataaggaaatgaatcttttttttttggagacagagtttcgctcttattgcccaggctggagtgcaatggcacgatcttggctcaccacaacctccacctctcaggttcaagcgattctcctgcctcagcctcccaagtagctgggattacaggcatgagccaccacacccggctaattttttgtatttttagtagagacaggttttctccatgttggtcaggctggtctcaaactcccaacctcaggtgatctgcctgcctgggcctcccaaagtgctgggattacaggcgtgagccaccacacctggccaggaaataattcttgatggtaactcagatccacaggggtaatataaaagaaccagaaataataagaaggataataaaatgctaaaaaaaaattttcttaccattcttctctgacctgattatataaaattatataactaagtatataattttgaggattttattgtattataataatggctgaaaagggagaagttatagagatatatagaggtataatgatttttcctttctttttttttttttttttttgagagggagtcttgctctgttgcccaggctggggtgcagtggtgtgatctcagctcactgcaatctccacctcctgggttcaagcgattctcctgtctcagcctcctgagtagctgaaattacaggcacgcaccaccaggcccagctaatttttgtatttttagtagaaaaggggtttcaccttttggccaggctgatctcgaacttctgacctcaagcaatccacccgccttggcctcccaaagtgctgggattacaggcgtgagccactgcgcccagcccatatagaggtaatatttctatattatactcatgttagtgtaaatatgaagtcgagtcctttaggatgtgtaagaaaagtcctagagagatgtcagtgacataatagaattggagctgcctcatatacactatggaatactgtgcagccataaaaaagggtgagttcatgtcctttgtagggacatggatgaagctggaaaccatcattctcagcaaactatcgcaaggacaaaaaatcaaacaccgcatgttctcactcataggtgggaattgaacaatgagaacacttggacacagggtggggaacatcacacacaggtctgtcgtggggtggggggctaggcgagggatagcattaggagatatacctaatgtaaatgacgagttagtgggtgcagcacaccaacatggcacatgtatacatatgtaacaaacctgcacattgtgcacatgtatcctagaacttaaagtataatttaaaaaaaaaaagaattggaggtacctgttttgtccctcctttcatggatacaccaagtaagtacatgcatgtggatcaattctatccaagagaaagccaaaatgtagttgaaggatgctcacacactggatgactgagaaaatatctacaacaaaatgggaaggataaactgaggtatactgatggttaaacctcaccttgagcacaggctggtataatttggaaagaatccttaactcccaccctcttcctgaggggtgacgggttgatagcacacatatagtgtcccagttcttacattctctaccagaaggcttggcccttaaatcccattatatgaggagcacaaggacttggcactagagtatttccttgaagaacagtagaatgggtggggggttgaactgcaggagcacttccaacagctgtatctcctgggatcagtataccctctagcttctcactggaaacagtttggctgcacatttctagcagcttcttgtgtttgtgtcttctatcatgcctgcacctaggagcccgtgtagcaaatgaagcataaacctcctcaagtgttaatgggagggatggcactccctacatcttccctggattgctctagtgattaatccaggtctatagtttcccttgaaagagatttgaggcctcagtgagcaaaaatggaagggtcaaaacccaccatgccttttcccagctttctccagatatgtataaccttgtaatctctccctggaaggagactgggagacagacctctcttatgctatatgtgaggaactgtacttcacctgccttcctatgtaccagtcttgttccaacaacatattggcctggagattctgtgtgaagtgagtttgtgagacttcaggaagccttaaagggagatgaatgttcttcgcaatttcttcttcagattgctccagcaataagtccaggcttccaaatccttactggcaggaggttgtgtgacttactgtgccttattgtgagattgggtacttcccatgctttcctacttggcctgctctggtgatgaattcgtttctgcagactttccctgggagtaatttgtacacatactgactgccccatattttacatccctcattcaaggtactggctcctgtatcacccagctctggagttgaaagagctcttcattcctgagtctcctgtaccactgagaataggtagttttctctcctctcctctcctctcccctcccctcccctcccctcccccccttttcttttcttttttcttttctttttttgatggagtttcactactgttgcccaggctggagtgcagtggcgcaatctcggctctctgcaaccttcacctcccgtgttcaagtgattctcctgcctcagcctcctgaatacctgagattacaagcatgcaccaccacgcccgtctaattttgtattttcactagagacggggtttctccatgttggtcaggctggtctcgaactcccgacctcaggtgatccgcccgcctcagcctcccaaagtgctgggattacaggcatgagccaccgcgtccagcaagaataggtgattttcaaacttggaaacattcagaagttatcgcctcagtttcagattgagtagtctcaaagagattacagacatctaccacaaattctctacttggtgtggtgcaaaatcagtatgatgtaaactttgtctctcagtttcttcaaaggaaagaagcaactggaacacacatataacactaacccttccagctgcattatgagggaccagtacctgtctcaaggcaaaattatgacttagttcatcctcacctctggaggccagtaaaagtgggttatagaagaacaaagaggcatctagatctttcactgggttatttggagagaaacatctcctaccgaaggccagtttaacaagactggtagaggaggttatcttatctaattcacagaaatcaacacattgagtcaagaaaaatgaaacacagaaacactctaaataaaagaagataagtcttcagaaaccaaccctaatgaaatgaagatatgtgattaacctgacaggaaattaaaaagagcaaccataaagagtctcatgggagcaatgcatgaacaaactgagaattttcataaagaaataaaagataacaaaaagtataaagttgaagaatacaataactggactcaaaaatttaatgtgtccaacagaagaatcgatgaagcagaagaaagggctatcaaacttgtagataggccattggaaatcatgtaatgtgaggagaaaaaagaaaaaagattgaagatagtttaagagacttttgagacatcctcaaaggggaataatttatacattaccagatggagaagatagagggaaaaggacagaaaacatatttgaagaaataatgtcagaaaacctcataattctggcaaggaaatagaaatttagatctaagaatctcgaacatcaggtatgatgaatccaaggagactcacaccaaaccatattgtaattaaataaaggttaaagacaatcttcagagcagcaagggaatagtctcttcttacatacaaaatgatccacggaagactgtcagcagacttcaccagaaaactttcacgccagaaggcagtcgtgatatatacaaaaagctgaaaggaaaacactgccatccaggaatactatctccaactatcctgtgtttcaaaaattaaggagaaatataaagttctcaaacaaaagatgtgggagtttaccaccactagacctgcacgggaagaattgctaaagggagtccttcaagctgtagtaaaagagtgctaattagaaacatgaaaacgtgagtataaaactcgctgataaaagtaagtacatagttggctgggtgcggtggctcacgcctgtaatcctagcagtttgggaggccgaggcaggcacatcacctgaggtcaggagttcgagaccagcctggccaacatggcacaacatcgtctttactaaaaatacaaaaattagccaggcgtggtggtatgtgcctgtaatgccagctactctggaggctgaggcaggagaatcgcttgaacctgggaggtggaggttgcactgagccgagatggcaccactgcactccagcctgggtgacagagcaagactccatctcaaaacagaaaaagtacacagtcaaactgagaatatgctaatactgtaacggtggtgtgaaaacaaattatgtatttatcataaaagttaagacaaaacttaacttgtagcaacaataatttaaattatacaaattataaaatgatataaattgtgtcatcaggaacacaatgtggggttgaaagtaaaagcatagcatttgagtaattgatctaattttagttgtattaatttaaaatagtctcataagtgtaagagactgtttaaggttcatggtaaccacaacgtttgcaaaaaacccttagtagatatgcaaaatataaaaagaaagtagatatgcaaaatataaaaaggaaaacattgaatcacataaaaaaacagcaagaaaggaagagaaaagcaaagaatttgtaatcaaccagaaaacaaattgcaaaatgacagcagaaattctttacctgtcaataagtgctttgaatgtaaatagattaaattctctaatcaaagtacataaagtggatgaatggattttgaaaagtctcatctatatgttgcctacaagacagttcatttttaaggatacatataaattgaaagtgaaaggatggacagatatgccatgtaaatggaaactaacagagagcagaggcagatctcttaatatttacatcagatgaaatagaattaaagtaaaaatttttaagcagagacagggtcattatataatgataaaaagtggtctgttcatccatggggtataaaagtcataaaggtatatgcactcaacattacagcacctaaatatataaagccaatattaaaagctttgaaggaaaatataaaatctaatacaataattgatgggacttcagcacacctctttaagcaatggtgagatcattcagacagaacatcaatgagacatcagacttaaaccacaattgaaaaccaaagttgcccatatggacctaaaagacattgatgcagtcttctgttcaacagcagtggaatacacgtttttcaaaagtgcacacagaatattctccagagtaaatcatacgttaggtcacaaaagaagtcttaagaaattttaaaagattgaagtaatattgaatatcttttctgaccataatggtatgaaactagaaatcagttataggaggaattttagaatattcacaagcacatggaaattaaataacatatcaatcagtggttcaaggaagaaattaaaagttattttcagaaaaacaaaaatggaaacacaaaataccaaaacttataatatgcaagaaaagcaattcctagagggaaattttagcaataaatgtctagaagtacaaagaagaaatagctcaaacaatttaatgttatacctaagagaactaaaagaagaacgtaacaaagattatagtataaatgagactagaaaaataatagaaaataccaacaaaactgaggggatattttgataaactaaaaaaattaagcaatgaacaataaaataagtaaaaagacagtccaatagtgagtaagaaggctgaatcaataattaaaagtttctcataaaaccaggaacttatagattcccttctgaattctacagatgtttaacccttttcccgtttgccccaaactcgctggtggcccttgtggctgtagcatttaccctgagataactttgctacaaaatatcttgctttcattattttcgtattgctctagtatattgactttggaagcaaaacacatttttctatttatagcattctgtctttagtagtggtatttccatttacaaagtatagtaactctcaatcactgaaaatgtcaaattctagaaaacatagtattcctgtgtatgatgttaatattcttgaacagttattgtccaaagatgcattgattttcttcagaaatagacaattccgatgattgtgatgttctgtttagaaataactccaagaacagtttttgtattttattttcacattgaaaatcagtcagatttgcatcagcctcaaagcgcatgtttatgtaaaatatttaagtcctggcagcgagctgccctttttttttcctaaatgggaaaagagttaaagaaaagctaatatcaatccttttcatactctttataaaagttgaagaggagggaataagttccaatcacactttatgaggccaacgttaacctgataccaaagtcagatgaagacactaaaagaatacaaaattacaggccaatatccctgatgaacatagatgcagaaacccccaacaaaataccagcaaactgaattcaacaacaaatttaaaagatcattttcccatgatcacatggggagataaccttttgcatttaaggatggttaaacatacataaatcaataaatttgatagatcacattaaagtgaacatcaaaaactacatgtctcaatacttccagaaaaagaattgacaatatttaacaaccttttttttttttttttttttcggagacagagtcttgctctgtcacccaggttggagtgtggtggcactatcttggctcactgcaacctctgcctcctgggttctcctgcctcagcctcccgagcagctgggattacaggcatctgccaccatgcctagctaacttttgtatttttagttgagacagggtttcaccatgttggctaggttggtcttgaacccctaacctcaggtgatccaccctccttgacctcccaaagtgctgggattacaggcatgagccacagtccccggcccaatacttaacatctttgcatgataaaaacctgaacaagttaggtataaaaggaagatgtctcaacacattaaaggccctatatgaccggcccagagctgaaatcttaacaccgaagagttgaaggctttttctctaagatcaggaacaagacatggatgccattttttctccttctgttcagtgttgtactggaagtcatagcaagagcatttaggcaagagaaataaaagacatctaagtaggaaaagaagaaaaaacttgcctctcctgattatcttatcttatagctagaaaaccttaaagactccattaaaaaaaaaaaaactatagaactaataaaatgaattccataaaaagtgctacgtacaaaattgacaattaagtctgtagcatttctatacactaacaaacaacaatctatccaaaaaagtaatcaggaaactaatcacatttacactatttactaagtaaacaaacttatgaatgaatttaaccaagtaggttaaagatctgtatagtgaaaacattgatgaaacgaattgaagattacaaaaatagaaatttttctttgtacatggattgggaaatttatattgttataattttcatactgccaaaagaaacatacagattctgtgtaatcaatatttcaatgtcctttttatttttattttttttacagaaatacaaaaaaaattctaaaacttgtatggaactacaaaagacattaaataatcaaagtaatcttgagcaacaaggacacagctggaggcatcactctacctgattttgtaatccattatcaaaaaactgtggtaccagcataaaaacagattcactgaccagtggaacaggaaagcccagacataactcatacatttccatccaattgatttttgacaaaagtggcacacagaatggggagaggacaaataaataaataaattgttttgagatatctgtatatctatatgtgaaattgaaccattttctcatagcatatagaaaaatcaactcaaaatggattaaagcctgaaatgttgcctttgaaactgtaaaactactagtagaaaatataggggaaaagctctatgatgttgttctgggcaatgatttcttggatacatccttaaaagcatgggcagcaaaaacagccagacaactatcagggaacctgcccagatagtcacataggttcttttctattttccctaagcattggccgggttgagaaataaagggacagagtacaaaagagagaaattttaaagctgggcatcctggggagacatcacatgtcggtaggttccgtgatgccccctgagccgtaaaaccagtaagtttttattagggattttcaaaggggagggagtatacgaataggaggtgggtcacagagatcacgtgcttcacaaggtaatagaatatcacaaggcaaatggaggcagggcgagatcacaggaccacaggactgggttgaaattaaaattgctaatgaagtttcgggcaccatcgtcattgataacatcttatcaggagacagggtttgagagcaacctgtctgaccaaaatttattaggtgggaatttcctcgtcctaataagcctgggagcgctatgggagactggggcttatttcatccctacagtctcgaccatagaagacagctacacccaagggggccattttagaggcccaccctcaggggcacattctctttctcagggatgttccttgctgagaaaaagaattcggcgatatttctcccatttgcttttgaaagaagagaaatatggctctgttccgcctggctcaccggcggtcagagtttaaggttatctctcttattccctgaacattgctgttatcctgttcttttttcaaggtgcctagatttcatattgtttaaacacacatgctctacaa

SEQ ID NO: 3314 - DNA, 195 bp, Homo sapiens
tttaagatatattccctgtggatttggcattcattgattacccttttccttgctcattctttaccttggttactttgcaactgtagtactcctgctagatttactagtcaggccttagcaaaatactgtaagcacaagacctcccttctcccttatttgtttagtaccatgagggactcatattcctaccctttt

SEQ ID NO: 3315 - DNA, 1632 bp, Homo sapiens
agggtcctgaggcgacatacgtcctcctcggcttacgagatgacaggattaagagattaaaacaggcataggaaatcacaagggtattgattggggaagtgataagtgtccatgaaatcttcacaatttatgtttagagattgcagtaaagacaggcataagaaattataaaagtattaatttggggaactaataaatgtccatgaaatcttcacgatccacgttcttccgccatggcttcagccagtccctccgtttggggtccctgacttcccgcaacagacaacttgagttgcatcaaactaaaaagcatctgcactgcaaagggtacagttaacagaatgaagacacgggttttgagaaaccattttcaaatcatatatctgataaggggctaatatccaaaatgtattaagaaacccaagcccaatagcaagaaaacaactgtctttaaaagggggaaaaggacctcaacttaaatttttcagaggaagacatgagtggccaattgattgatacatgaaaaaaatgctcaacatctctaatcattagtgagttgcaaatcaaaactgcaagatattaccttacaccttttagaatggctattattaaaaggatgaaagacaggtgctggcaaggatgtggataaaaggaagtcccaacattctgttagtgggaatataaattagtatagccaatttaggaaactatatggtggttccttaagaaactaaaagtacaattactatatgatctagcaatctctacttaggtatatatccaaaggaattgaagcagtatgttgagatcttgcactcccttattttgaaattatttacaaagctaataaatggaaaagacttaagttttcataacagatgaatggacatagaagatgtgttgtatatacatattggaatattttttatccttggaaaagaaggaaaattgtcatttgtgacaacatggatgaatctgtagtatactatgctaagtgttgtaagacaggcacagagaggcaaatactacattatatttgtatgtggaatctaagaaaggctaactcatacaagtagaaagttggatgttatggtttccaggatgtgggtgttggagagatgggcaaaggcaagacgttggtcaaagagtaccaattttctgttaggaggaataagttttagacatatttcacagcatggtgaccattgtcactgactgtatattttaaaattgttataagtagatattaaagttgtcacaacaaaagtaggtgaagttatggatatgttaatgtgcttgatttagttattacactatgtatacatacaaaaacatcagatagttccctggaattatatacaattattacttgtcaattataaaaaaaagccctactgcaaccactaaaaaggattttcatataatagagggaaaaatcgttaaagataataatacattattttagaaaatattaacttataaaaagtagtataggagggattctgtaaaagaagatagacatagaattttaaaatgtataatggaaaatttaaatccagctgtactgatggatcaagcaatccaaaccagtctgattgaccaagtggatatttaaaaaacaatcaaactata

SEQ ID NO: 3316 - DNA, 162 bp, Homo sapiens
tggggtggggggctaggcgagggatagcattaggagatatacctaatgtaaatgacgagttagtgggtgcagcacaccaacatggcacatgtatacatatgtaacaaacctgcacattgtgcacatgtatcctagaacttaaagtataatttaaaaaaaaaa

SEQ ID NO: 3317 - DNA, 195 bp, Homo sapiens; identical to SEQ ID NO: 3314

SEQ ID NO: 3318 - DNA, 1632 bp, Homo sapiens; identical to SEQ ID NO: 3315

SEQ ID NO: 3319 - DNA, 5846 bp, Homo sapiens
gcttcccacatctggaggatgacgaccctcccctgaccacatctggagggcgtccagctgcgagccagcggggcacagctctcttctcctggcctggatccccacccccccaacccaggaagactgaggtgtgtgtacgcaggtggggtaagcccgggttaccgacgagacctgctcgcgtctccgctcccactctggtgccccctcccctccctggcagccccccccccatccgcctaccctccgggctcacttcgactcacctggcggtgggtcttcttcccccccgacccccggcggtgcggcccgtcccccttctgaccccgcgcctggccgtcgtgccccgaaggatatgggttacagaccgtgcggagacaccagctccgcgggcggctgtcctggctcaagtagaagaaaaccaccggggccagcgccgggtacggcagcccctccgcctcggagtccgcgctgcccgggtccttttctgctgaccccggccccggccgcccccggcccccgacaggtcgttgagccgcatgaagctccggggctgtcccgactcctcggcgcccgctccatcctcctcctcgtccatcctctggccagccggggccccgggcgatccggagaggggcaagcggcgcccctcagaggaggtgtcctcacgcaacccgggggccccggcgggggcacatctggtgggctctagggcgcaagctgagcccccgggagggccagttcagcccagctccccctgcccgcaggggcatgctgcccgcggggcgccggggcgcagggaaaccccgcccggcgcgagtcccgcttcccctgcgcccctggggcttcccgggccagccggccggctccccctcactttgttccggcttcttcgcttcgcgcccaggctccggttgccggattcggcgctaccttcggcgaagccgccccgagagggcgaacgaaaaggggggcagcggcggagggcgggggtccggggaggggcgccccctcttcccgcggcgcagctggagccggatctaaggggtcagcatcgtcccggctccgcgccaggcggcgggggaggggaggagggatctctttaggggtgggcttggagggggtgggggcggctccttcccccgccccgccgcgggctcactgtccgggaggggcggggagacagtggggggcagtcccgggcgggagtggaggcggagatgccgccgccgcagccgccgcggtggctgccgctgccgtagctgtcgccggcgccacagcctcctcctccggccgagacgcggagcgagcgagcgaaagcggcggcgaggagccccgcgcacaccacagctggatccctcacttcaacttcaagcctcggccccgcccccagacagccccgcagccaatcgccggacgccgccggccccgagccgcgcgcccattggccgtccgccgtggcagtgcgggcgggagcgcagggagagaaccacagctggaatccgattcccaccccaaaacccaggaccgcccctctcccctccccttgcccctgggtccgctcccgaaggctggagccaatcagactgctgcccagaccgaacccactttcctattggccattggggtctttgggactcccttggagggagcccgaagaatcagagtattcggcgcggggtcctggcgtagggccgcaggccccaggcatcctttgtccacgacccctgatttgggcagcagccggaggacggagctcagctctgggcgggcctggggaagaaaggagacaggcggcacgggggtgagggttgtcaccagggggtcccagagcgaaatcccaggtctccacctggttaatctcccaccctggagttgagcttggctgcgggactggggaagggaaggagcggagctggatgtcctgggggtggggcttcaggctggaggggcccagtcttggagaaacgggcggagctcgagaaaggctagggtaggcatggtctgggcgtggcctccacaaatctcttgggcttattggtcatactcccgagtcaattctgagacttcgaccctgacctcgtaaccctaacccgctggacctgacctcacattgacgctcctgggcttcatccctttgcccctagggaccttttgaagggcgtggactccacgcaggggcttcgtgcttgaacacgtggccccaggcaggtcgcgctggaccgcagagcccggatccccaggaggggctgcggagcagagcgaggacccctaagaaggaacctgtgggggtctcgagtgtgtgggagggggcggaagcacagagctgggctttatcgactcgaccttcaaagtccccaccaccgccaccccccaacttcgtgcctcagtttctcttaagtccctatgtggcttagggaaggagtgtccgcggaactggaacttcgcgggtctgccgccttcactcactcaccttaaccctaccggcagcgggccctcgtgggtttgtgctttccacgcgtgcacacgcacgcgcagaccccggcccttgccccgcctacctccccgagttctggggctcagtcggctctagctctctcctgccgccggcgccactccagaaagctgtgggtacccgggagcggagcgccgcgggtgtgctgggcgccggtggaggggggaacagcgaggattagacgccgggaagcacttccccaacatctgcgagaggtagacacggcggaacctagtgggtcagtcagttccctctccggagattttggggcgcttgcgccactgcggagaggcggcgggatgggtcggatgacctccatcaccacccctcactttgctgaggccatcacccctgggcgttgttcactctcctaaggctgcaccacccacgcagcccccgcgcacctcccgccaccgcagagggttggggtcgtctcagttcccgccccggccgatggggggaggggatgggggaagtggcagagtggctgctgcgccgtcgtctccctggttgccctttcgccgaatccatgcacagagttgtgtaaatgaggccgggcgggctcatttgcatttcatgctaatgagcagatcccctaagtgcctttttttcctggcgggagtctctgctctcattctgagtatgcggcgcctgagtcttgaaccccgtgccgtcttctgggaaaggggggctatttatggttgctccgcgcgtctgacaccttcttccctcccgagaggccgcagtctgccgggtcggcctgcccttcccgccaggatagaggccccggggctggcgcgagaagtagggacgcccaacaccccttctttgcagaggggaaaatgaggacagagaggctggcccagcccaatgatcaggtcccctggtggtcagcaggccccacaccctcatccatcatcccggccacccctgggctctggactgaactctgttctagaacatgcccgaaaggagggcaggcacaaacgcaccatctagataaattgagatccacatgcacttccctgggttcaggacctaggggagaccggccacgcaagacaggatctgatccctgtactcggcatgttggggctgatggccagtcggagatgcttacccttagcctgagtgccagagaggaggcagaggcagaacctacagggaaggcaaagaagacctgaaaccatctttatttaactccagccctccaagcctcagctctgacatcacctcctcagagtggccttctttccagcaagtatttcaatgccacttaagtgccaaggtgcttaggatacagcaccgagccagacacaagtctggaacttcacagcacttagcccaggctgggattatatgtttgtgtttgcagtaatgaaatgatcatctccctatctaggctctgtgttcccagaggggctatgttcattttgctcactagggccttgtctagtgtcgggcacaaagttgttaggtgaatgaatgacctcaggcagggaaagggaaacaaagggacaagaaattcctttctttgggcctcagtttctcaacaaagacactaagcctaactaagagtttttctgggtttgaggaagaaccccccccatatataccctgctcagccagcccctccagccccctccagccctgcctttacccctccctcacagcccatctggctccctgcggagctaagataatcttcccatctgtgataccctttgctcagggatgatacaaccattatcccatttagtcaccttaacagccctgagagctgggtggatggccccccacctttcagataaggaaggggggtgctcagaatgatgaagttacttaagtgaccgcccagacggtatggccctgtctccagtgaccctggcccgcaggtgttccgctggtagaacagggtgcacactcaagagggaccagcaaaggggaagggatgctgcaggaactcttataatcctgcttctgagtgagatttatgtgggaccctgccccctttagaaattcgagcactcctgggagaactaaccctttaaggaggtaactccttcttcccaacccatttacagaatcccatcatcgcgtgcacatctcatcccaggagggagagaggagctgccgagtagaaagcagactggctgcagggacagaagacaccaagggcaccctcccccacagctgcgcctggacctcctgcgagaagaggaagccttaggggtctttattgtaccctcaagaccccagagagaaacagaagtgctgaggggtcgcaggcaggtctcttaccctctctgggcctcgaatatttatccataggaggctgaaggtaactgcctcgcaactcattcatgagggtcaatgggacgacagtggcaagaggggttggcacactgcccagactgttccaaagccagggctggggctgccaaaaaggccacctgtgcttcaccatgctccatcctccctctcttccacctccccaggctgggctccacttgtccagctctctgacttcctggcaaggttgagtaggctccagctaggaaggggccagctgaccttgttggccggagcactaatcccctccagatgggctggtggcttgcactgagggcctggctgcccagacagagctgactctggtcccagtgaccatgtgtggctatgtgtgaccgtgtgaagggagcaattccatccagtctcccggttccttcctgcttcactcctccccactgctgacatcccccacaagcagtggccccatgaaggccttcttgtctctagtagcctcttttggctctctgtgttgcttagctggagggctgaggatgcctggcacagccgattcccaaaggcctcagagggacagctcctccccctgcttcccccaccccgtcagccccatcactctgcacctgcccttcccaaagcatgtgtcccagtccccatccctcaacccaaggaagatgtatgtgtcaaggacaggactcaggagcatttcccaacatttaggggaaaggatgaggtcacaggaaggctttctctgcagcaagaaggactcagatagatttggggaaggacttccaacccaacagatgttccaaacgaaagagaactctttctttggaccagcttgtatgaaagcagacaaatggacaacatgacctcctgcaaggaggccctgcttccatcctttcgaggctggggctagatggataccccaaaagaaatgtcttagtcgtgacaatagcagctcccacaatgcaccagggcatatgcaaagtcaccattctgtgaaatataaaagctcatataaagc

SEQ ID NO: 3320 - DNA, 5848 bp, Homo sapiens
gcttcccacatctggaggatgacgaccctcccctgaccacatctggagggcgtccagctgcgagccagcggggcacagctctcttctcctggcctggatccccacccccccaacccaggaagactgaggtgtgtgtacgcaggtggggtaagcccgggttaccgacgagacctgctcgcgtctccgctcccactctggtgccccctcccctccctggcagccccccccccatccgcctaccctccgggctcacttcgactcacctggcggtgggtcttcttcccccccgacccccggcggtgcggcccgtcccccttctgaccccgcgcctggccgtcgtgccccgaaggatatgggttacagaccgtgcggagacaccagctccgcgggcggctgtcctggctcaagtagaagaaaaccaccggggccagcgccgggtacggcagcccctccgcctcggagtccgcgctgcccgggtccttttctgctgaccccggccccggccggcccccggcccccgacaggtcgttgagccgcatgaagctccggggctgtcccgactcctcggcgcccgctccatcctcctcctcgtccatcctctggccagccggggccccgggcgatccggagaggggcaagcggcgcccctcagaggaggtgtcctcacgcaacccgggggccccggcgggggcacatctggtgggctctagggcgcaagctgagcccccgggagggccagttcagcccagctccccctgcccgcaggggcatgctgcccgcggggcgccggggcgcagggaaaccccgcccggcgcgagtcccgcttcccctgcgcccctggggcttcccgggccagccggccggctccccctcactttgttccggcttcttcgcttcgcgcccaggctccggttgccggattcggcgctaccttcggcgaagccgccccgagagggcgaacgaaaaggggggcagcggcggagggcgggggtccggggaggggcgccccctcttcccgcggcgcagctggagccggatctaaggggtcagcatcgtcccggctccgcgccaggcggcgggggaggggaggagggatctctttaggggtgggcttggagggggtgggggcggctccttcccccgccccgccgcgggctcactgtccgggaggggcggggagacagtggggggcagtcccgggcgggagtggaggcggagatgccgccgccgcagccgccgcggtggctgccgctgccgtagctgtcgccggcgccacagcctcctcctccggccgagacgcggagcgagcgagcgaaagcggcggcgaggagccccgcgcacaccacagctggatccctcacttcaacttcaagcctcggccccgcccccagacagccccgcagccaatcgccggacgccgccggccccgagccgcgcgcccattggccgtccgccgtggcagtgcgggcgggagcgcagggagagaaccacagctggaatccgattcccaccccaaaacccaggaccgcccctctcccctccccttgcccctgggtccgctcccgaaggctggagccaatcagactgctgcccagaccgaacccactttcctattggccattggggtctttgggactcccttggagggagcccgaagaatcagagtattcggcgcggggtcctggcgtagggccgcaggccccaggcatcctttgtccacgacccctgatttgggcagcagccggaggacggagctcagctctgggcgggcctggggaagaaaggagacaggcggcacgggggtgagggttgtcaccagggggtcccagagcgaaatcccaggtctccacctggttaatctcccaccctggagttgagcttggctgcgggactgggggagggaaggagcggagctggatgtcctgggggtggggcttcaggctggaggggcccagtcttggagaaacgggcggagctcgagaaaggctagggtaggcatggtctgggcgtggcctccacaaatctcttgggcttattggtcatactcccgagtcaattctgagacttcgaccctgacctcgtaaccctaacccgctggacctgacctcacattgacgctcctgggcttcatccctttgcccctagggaccttttgaagggcgtggactccacgcaggggcttcgtgcttgaacacgtggccccaggcaggtcgcgctggaccgcagagcccggatccccaggaggggctgcggagcagagcgaggacccctaagaaggaacctgtgggggtctcgagtgtgtgggagggggcggaagcacagagctgggctttatcgactcgaccttcaaagtccccaccaccgccaccccccaacttcgtgcctcagtttctcttaagtccctatgtggcttagggaaagagtgtccgcggaactggaacttcgcgggtctgccgccttcactcactcaccttaaccctaccggcagcgggccctcgtgggtttgtgctttccacgcgtgcacacgcacgcgcagaccccggcccttgccccgcctacctccccgagttctggggctcagtcggctctagctctctcctgccgccggcgccactccagaaagctgtgggtacccgggagcggagcgccgcgggtgtgctgggcgccggtggaggggggaacagcgaggattagacgccgggaagcacttccccaacatctgcgagaggtagacacggcggaacctagtgggtcagtcagttccctctccggagattttggggcgcttgcgccactgcggagaggcggcgggatgggtcggatgacctccatcaccacccctcactttgctgaggccatcacccctgggcgttgttcactctcctaaggctgcaccacccacgcagcccccgcgcacctcccgccaccgcagagggttggggtcgtctcagttcccgccccggccgatggggggaggggatgggggaagtggcagagtggctgctgcgccgtcgtctccctggttgccctttcgccgaatccatgcacagagttgtgtaaatgaggccgggcgggctcatttgcatttcatgctaatgagcagatcccctaagtgcctttttttcctggcgggagtctctgctctcattctgagtatgcggcgcctgagtcttgaaccccgtgccgtcttctgggaaaggggggctatttatggttgctccgcgcgtctgacaccttcttccctcccgagaggccgcagtctgccgggtcggcctgcccttcccgccaggatagaggccccggggctggcgcgagaagtagggacgcccaacaccccttctttgcagaggggaaaatgaggacagagaggctggcccagcccaatgatcaggtcccctggtggtcagcaggccccacaccctcatccatcatcccggccacccctgggctctggactgaactctgttctagaacatgcccgaaaggagggcaggcacaaacgcaccatctagataaattgagatccacatgcacttccctgggttcaggacctaggggagaccggccacgcaagacaggatctgatccctgtactcggcatgttggggctgatggccagtcggagatgcttacccttagcctgagtgccagagaggaggcagaggcagaacctacagggaaggcaaagaagacctgaaaccatctttatttaactccagccctccaagcctcagctctgacatcacctcctcagagtggccttctttccagcaagtatttcaatgccacttaagtgccaaggtgcttaggatacagcaccgagccagacacaagtctggaacttcacagcacttagcccaggctgggattatatgtttgtgtttgcagtaatgaaatgatcatctccctatctaggctctgtgttcccagaggggctatgttcattttgctcactagggccttgtctagtgtcgggcacaaagttgttaggtgaatgaatgacctcaggcagggaaagggaaacaaagggacaagaaattcctttctttgggcctcagtttctcaacaaagacactaagcctaactaagagtttttctgggtttgaggaagaaccccccccatatataccctgctcagccagcccctccagccccctccagccctgcctttacccctccctcacagcccatctggctccctgcggagctaagataatcttcccatctgtgataccctttgctcagggatgatacaaccattatcccatttagtcaccttaacagccctgagagctgggtggatggccccccacctttcagataaggaaggggggtgctcagaatgatgaagttacttaagtgactgcccagacggtatggccctgtctccagtgaccctggcccgcaggtgttccgctggtagaacagggtgcacactcaagagggaccagcaaaggggaagggatgctgcaggaactcttataatcctgcttctgagtgagatttatgtgggaccctgccccctttagaaattcgagcactcctgggagaactaaccctttaaggaggtaactccttcttcccaacccatttacagaatcccatcatcgcgtgcacatctcatcccaggagggagagaggagctgccgagtagaaagcagactggctgcagggacagaagacaccaagggcaccctcccccacagctgcgcctggacctcctgcgagaagaggaagccttaggggtctttattgtaccctcaagaccccagagagaaacagaagtgctgaggggtcgcaggcaggtctcttaccctctctgggcctcgaatatttatccataggaggctgaaggtaactgccttcgcaactcattcatgagggtcaatgggacgacagtggcaagaggggttggcacactgcccagactgttccaaagccagggctggggctgccaaaaaggccacctgtgcttcaccatgctccatcctccctctcttccacctccccaggctgggctccacttgtccagctctctgacttcctggcaaggttgagtaggctccagctaggaaggggccagctgaccttgttggccggagcactaatcccctccagatgggctggtggcttgcactgagggcctggctgcccagacagagctgactctggtcccagtgaccatgtgtggctatgtgtgaccgtgtgaagggagcaattccatccagtctcccggttccttcctgcttcactcctccccactgctgacatcccccacaagcagtggccccatgaaggccttcttgtctctagtagcctcttttggctctctgtgttgcttagctggagggctgaggatgcctggcacagccgattcccaaaggcctcagagggacagctcctccccctgcttcccccaccccgtcagccccatcactctgcacctgcccttcccaaagcatgtgtcccagtccccatccctcaacccaaggaagatgtatgtgtcaaggacaggactcaggagcatttcccaacatttaggggaaaggatgaggtcacaggaaggctttctctgcagcaagaaggactcagatagatttggggaaggacttccaacccaacagatgttccaaacgaaagagaactctttctttggaccagcttgtatgaaagcagacaaatggacaacatgacctcctgcaaggaggccctgcttccatcctttcgaggctggggctagatggataccccaaaagaaatgtcttagtcgtgacaatagcagctcccacaatgcaccagggcatatgcaaagtcaccattctgtgaaatataaaagctcatataaagc

SEQ ID NO: 3321 - DNA, 8680 bp, Homo sapiens
ttaccacgggacactgttaagtttattctagggtgagtgggtgcccaaggggggcagtgagtatggccgaggtcacctggtggcagggtgctcagggatggccacaggttctatagggccctgcagggcctgagtctctagtcagttgggatgcttcaccttctgccccaccccaagggggttggggcagtcatggatgtagtagttttcgtaattcgcagggatcagtgatgggcactgagcaggcttgattctcacacacatatgcagtggcctggtcttccaaccgtcggagggtactcaggaaaggcagctggcgggacaggaagctcgaggggtccccatcagccagaatcagcacctagggcagcagcagagcagggagagtcacctgccggggtggggtcacctgcccattagaaaggcccactgggaagttccctcttcccaacattctgaggggaaggagatgttgaggagctgaggatgggagggggcagctctggggaggtggcagattgggctcacagggatgggtaccttgttaggaatgtagacagagtggacgcactgcaccagggccttggtgtccttggcctgacggtctccacagatcacgatctgaccggaatagaaaggtcactccggtgtgtcaggggagggagggctgagccctagaccaccagggcttccccatcctccttccgccccaccgtatatctctaagaaggaacagggactcatctcagctgccaggatgagttaatgcttggcaagtgggaacacacacacacactcacacatgagaataccgaagtggaaatgtcatacatatacacaatggtacagatacaaacatggggagacacacacccagaagacccagagcacacagagacccattcagacagacacagagtagtcacacacacacacacacacacacacacacacacacacacacacacagtagatgcccacacagaggcagataccacacacacaaacaccagacacacacgcatgcaggcagacacagaggcaaacctgcagatggggcatccacatgcagacagacaaacactcacaccagcatccccctcaaaggtaggtgcacagacacacacctccagggtcacacacacccggaagtacacacacaccagtaacacagtatggacagaagcaattacactgacaccaagacgtacagagaaacacttcatcagccaccacggactcatattaacttctgcctccctgtctgacaggccacgtgcctgcacacacacagacctgagctctggggacagcccaggaaccccaccccctgttcccatctgccatcgcagccccaacttccctcctacccgaggtcccagcccagatgccctcaccccccacctgcttgagggtctgctgctgggctgagagggcgcggaccatctcgggcaacgccaccgggacacgacgcatgcgctcggaaaaggcggtcaataggcacacacacttgtccatccagtccttgtggcccgtgaagccatgcagccggagcaggttgtgggctgacacggaattggcgctgggctctgctccatcctggtctacagcacatagggaggcagggggtgggggtaagggcaggtcactgagtcccaggaccctgcccaggactgtatccagggccacttgggggacgggacagagaaaaggccctgcccatcctgccccttccccgctctgggtgtggatgccactccagcagttatcagtactttgctgtcttttttatggcaccctccactctacctgtcctagcctcaactgttggtctccaggctccctcctcgctgctgatgcctctgtccagccactcagctgctcaagctagagcggcatcatcctgtccccttcctctccctctccctccgcttctaatccatctgtgagtcttgccagggctgtggccagaagagatccaaatctcaccatgtctccccatctcatacttccacatcctctgagccttcaccaatgcctgcctggactgaacacgagtaatggcctcctaactggtcgcctgtttcccccacccccacttctctccatcagtggtcagagtgacctccttaaaaccataccagagcagatcacaatccacttaaaacctccttgccagccgggcatggtggctcacacctgtagtcccagcacctgggaagccgaggcgggaggatcacctgagcccaggagtttgagaccagccttcttttcttaggaaaaaaaaaaaaaaaagacggcttccgtgccctgccggcctcagcattctcctcggtgccctcctggaacacgcgggccctgcctgtcctccaggatacaggctgcctgcaccaggcctgtcatgcactgctccctatgcctgaactctctccacagcttctccatggccacatggcccctctttccctccaggccttggttaaatgacacctgtcacaggtgtcctctaatctctccctaggctgagttggtcctcctctgtggttctctcccaaggccctttcattcactcagttaacatttattaagcacttacaatgtgccagaaccacactagaccctggggatacaacagtggcagaaagtcctgatctttgaggagctaaaatttgagttttgggaaagaaacctttaaccacagacaaggcacatgggtgatagggagcaggcacacatagagcgtcctacttcttcatggcactcaccacaattttaactgcacatttgtgcatgtgtttttgcatcattactgcattttcgctgtctcccctaccatactgtaagcttcatgagggcagagaccaagtgagccttggtcaatatctgaatccatgggtgtcagttactgtgctaagcatgtttacagaacagctacattcatctttacatcaaccctgtaaggtagtaccaatgttagctccattttacttattaagaaacaggccaggcatggtggctctcgcctgtaatcccagcactttgggaggccgaggtgggcagatcacttgagcccagtagtttcagaccagcctgggcaacatggagaaatcccatctctacaaaaaattagccaggcatggtggtgcatgcctatagtcctagctactcaggaggctgaggtgggagaattgattcagccccggaggcagaggttgctgtgagccaagatcatgccactgcattccagcctgggtgacagtgagaccctgtctcaaaaaaaaaaaaaaaagagaaagaaagagagaaagaaaagaaagaaaggaagaaaggaaagagaaagaaagaaagagaaaggaaataaaaagaaaagaaaggaacgaaacaaaacacgctgagtgtagtggttcatgcctgtaatcccagcactttgggaggccgaggtgggaggatcacttgagcccaggatttcaagatcagcctgggcaacatagcaagactctgtctctatttaaaaaaaagaaattgagacacagaaatattacagcagccaaaaatcacgccattaataagtagcagagacacaaagccaggagggctcctgcccacaccagctcttcacccacgctgcacttacacctcccaggaccccagactagccctgcacccccactgaccgtccttcagacgcaggggcaggccagcccccagctcagcctcactgcagaagtagccgccaccctgggagtcccaaaagagcttgtcctgtgtgtcctgcagccgcagagcccactcgagccacgcactctcctgtgaggcctcatacaggtccagcaggccccgcaccacgaaggcgtagtcctccaggaagccccagcagggtgggttgctgggggacaggcattacgggaggggctggggagagccccaggagagagggcctttcccagaggaggccctttcacgcatttgttcacttaaccctccagatgaaccctcttgggcaggtgccatcagcccacttcccagatgagtaaatgggcccagggaagctacaaactcacagcaagcacctggcagagccaggactggagtccacatggaggggagaagtagggcagaggtaggctggggacgcgttggggagacgggccctcccggtctacccagcccccaacctgtgctccacagtccccccagggccggtgtagcaggtccgcatcaggcggccactggccacatcaaacatgtgccgcttcaggaacttggcaccattggtggcatagttgatcagcctgtcttggcccaggacagccccagtcacagcatagcctgacaccatcaagcctggagccaggagagacaagtagtggtaagaagctggccaggaccctccaggcatgtccaccctatcaccttaggccccaacacctccctggagccatgggtgatccctaagatcttgggctccaaagccagacatggcggggttcccagcccttgcgcgtgaccttgggcgggttactcaagctccttaagcctcttttgtcaactgagaataataacgctaatcaagggagagtgagcatttagccgctgccggaaagacaggggctttgtgaagggggatcctacagacaggctcggtctcaggtgtgctgccccaccattccaggcagccagcatcttgctgtccaggtgcggcttgggccgatgcttccgggcctggaagagcttctccagccctgaattgagcaaggtccgcacggcctccacatccaagccaaagcgggcagcagtcagctccagcgagtaccggacggtcagcacattctggccctgcagctcccccttggggtcctgaggagaatggcctttgtctgcgagctcacacgcctggcaggcaccagggcccgtcaggtgaccccagaagtcctcacctgactggggctgatgttaccagcctctgtgaggccgtagtgcttcatgaggagctggcctgaggtcagcggctcggtggcacccaacacaggctccgggaggagctgctgaacctctttgaccgtccacacatagtaggcgccctctttgggccgctggccccgctctgggggcgagtctgcatcttctgcgctatagaagcctccggactgtggggaggggagagttggctggccccggcccacagggcagtggaggccccaacccctcccacagccaggcctgcctgccaccatggacacacacccggtggctcaggctccgagccacgtactgcaggatgcctttggccacgtcagagtagaattcatcaccagagagctaagaaagggaagaaaggagactgtgaacagagaggtcactggggaggcccaggtggaaggtggcaacattctctgaggcaggcgggggagggaagcctgggtagtgggtacatgggagggaacaggggattcagattaagagaagccacagtcaccaggaaggccttgggaggggcagccagagtgagatgcctgttctctgggctggggtcaggggtcacctggaaggcctgcgaataggccacagcgagctgtgcctggtcatagagcatcttctcaaagtgagggacgtgccactggcggtctgtggagtagcggtgaaagccctgtgcggatacaaagctggaggccagtcccagcttctgccccaccccacagccccctgctgcccctccagggaacacccagtgcccgtcacctgccccacatggtcccggatgcccccgttagccatcattttcagggtatgcaaggccatctgctgggcccgagagccatcctgagtcagtcgatggctgagccagtaggagaacaggaagctcaggatcactgtgggggcaccaagaacatgcaggtgagagaatgggaaagtggggacagagatcggggtggtcaggaggccttgggccaggcagaggctgggagttcactcaacaggcagtctctggacaggctgtgaggtcaagagtcaacccacaggacagaaggtaatagcctaagccagaggtcagaatatcattggttcacagaggaccagtaagttacttgtccccctagagcccagaatgtcattagccaagtcagggtcactgggtaactgaccaagtcaggggacagaaggtcatcatctaggttaaggtgagagggtcactgctgacaccagcagtcgggtcttcaccgatagctaccgacaggctaggggcaaggaggtcactgccagtcaggaggacaggaagctatgggtgaggccaggagccagtaggtccctgaccagcataggaatcagaaggccaaagcctgggctaaggcgggcgtggggcactgacccggcgtgggaaacttgggggcctcagcgaagccaccgtattcctcatcatagccctcatccagctgctggaagcagcgattgttcacggtggcggcagagggcggcagctggcggtcacccacgctgatctctgatcgggccagcagggcagtggtgacacgctggctattttctagcagggtgttcttgttctgtttccactgcgggaggtgggggcacacctggaggtcagctagggggaggggctcttgtttcctagtcccccaccctggtcccccaactcccggaggcacacccacctgttctcgtattctcagcaacactgtgcggaagccgactcgggtcaagccatcctcaggagggaaataggtgcccccgacaaagggctggaggttgggagtcagccacacattcatgggccagcccccgccgctgctggtggcctggcggagagagggcgagggtgaggggagctgctctgagcccatgtggcgcatacactcccgaggagggctgctcacctgcacgaacgtcatgtacaccttgtccacgtcaggccgctcctcacggtctaccttcacactcacaaagtcctcactgagcaggcggccaatctcctcattctggaaggactcctcttccatcatgtggcaccagtggcaggtggagtacccgactgaacagggccatggggagaggtcagggggccagcaacgggtcagagggaggctggccaagtggccctggctacatggaagacgtcctggcctctagtctcctggaagacccgccaggccgagaggaccctcccccatccactgccactccctgcccacacccccacatcagggaaggtgggagcattacctgagaggaaaatcggcttgttttccttcctggccttgtcgaaggcttcctgtccccaggggtacctagacccagcagggtggggcatcactcagtagcccagggggtctgggaggggcccaggaccccagcgattccaggcagggccccaggagaggtgctcaccagtccacaggattgtaggcatgttgtaggaggtatggtgacttctcgtggatcaggcggttggggaccctctggggtgtagatgaaggatggcttcctttccctccagcaggcatgggcactgaactactgaccgtcgcacttcggtccttgtcccgggaggagctacccctggcgaggactggtgcatcaggcaagccaggggcctccacccaccttctcccaggccccccagcacctgctccatttcactcagcaccccagtaggacccctgctcccagcccaacccacctttctgaaccatgggggagactgtggcctttgtgctcccccttatgttttttggggggtgaggagaggtggctcattgggggctccttgccaggttagtctcccccaacctcctgggcctggcggtgggaaggatggctgtgaggtcagggcgggtcacaatgggcagaatggttcttggggctccattcttacccctccccaggcccctcccccggcccttcctggagcagctgcttggaggcatctctctggcaggcctgggtgtggccccactggaaggcagcctactgttggtggctggacaggccaagatcagtagggtctgggactcgaccaggtgagggacaaacagaggaaaccagacatggggactccctcactcagcgcccacctgctgggactcctgtggggccaggtcctgggccagactccaggacacctagggaatcagagacctcagggagttcagcctggaagtgggactgcaggcagacctaaataacgaaaggtccatgcagcaataaaggactgtgacagggcacagggtactattggagaaaggcccttgacccagcatccagcactggggtgcaaggaaggcttcctggaagcagtgtcagaacagtccctgaggagctggcactgcactggaaggaaggggagaggagggaagggatgaggacgggagaggaggggaggagggccttacagccagagccaggtctcaggagcagaccggaggtgggggtgggggaagggccaggcatgcaggggtggtccagactggcactggggaccggtgtccggaagaccctccactgggcccgcaggcaggcgcagggagtgccctaggggcccgctcgcccgcccgtacctgcggctcgcggcgaggcctgcaccggcgcggggcagcagaaggacgcggcccaaccaggcccgcgcgcccagcatggctgctcggggccgtgggcccggccgctgagg

SEQ ID NO: 3322 - DNA, 8677 bp, Homo sapiens
ttaccacgggacactgttaagtttattctagggtgagtgggtgcccaaggggggcagtgagtatggccgaggtcacctggtggcagggtgctcagggatggccacaggttctatagggccctgcagggcctgagtctctagtcagttgggatgcttcaccttctgccccaccccaagggggttggggcagtcatggatgtagtagttttcgtaattcgcagggatcagtgatgggcactgagcaggcttgattctcacacacatatgcagtggcctggtcttccaaccgtcggagggtactcaggaaaggcagctggcgggacaggaagctcgaggggtccccatcagccagaatcagcacctagggcagcagcagagcagggagagtcacctgccggggtggggtcacctgcccattagaaaggcccactgggaagttccctcttcccaacattctgaggggaaggagatgttgaggagctgaggatgggagggggcagctctggggaggtggcagattgggctcacagggatgggtaccttgttaggaatgtagacagagtggacgcactgcaccagggccttggtgtccttggcctgacggtctccacagatcacgatctgaccggaatagaaaggtcactccggtgtgtcaggggagggagggctgagccctagaccaccagggcttccccatcctccttccgccccaccgtatatctctaagaaggaacagggactcatctcagctgccaggatgagttaatgcttggcaagtgggaacacacacacacactcacacatgagaataccgaagtggaaatgtcatacatatacacaatggtacagatacaaacatggggagacacacacccagaagacccagagcacacagagacccattcagacagacacagagtagtcacacacacacacacacacacacacacacacacacacacacacagtagatgcccacacagaggcagataccacacacacaaacaccagacacacacgcatgcaggcagacacagaggcaaacctgcagatggggcatccacatgcagacagacaaacactcacaccagcatccccctcaaaggtaggtgcacagacacacacctccagggtcacacacacccggaagtacacacacaccagtaacacagtatggacagaagcaattacactgacaccaagacgtacagagaaacacttcatcagccaccacggactcatattaacttctgcctccctgtctgacaggccacgtgcctgcacacacacagacctgagctctggggacagcccaggaaccccaccccctgttcccatctgccatcgcagccccaacttccctcctacccgaggtcccagcccagatgccctcaccccccacctgcttgagggtctgctgctgggctgagagggcgcggaccatctcgggcaacgccaccgggacacgacgcatgcgctcggaaaaggcggtcaataggcacacacacttgtccatccagtccttgtggcccgtgaagccatgcagccggagcaggttgtgggctgacacggaattggcgctgggctctgctccatcctggtctacagcacatagggaggcagggggtgggggtaagggcaggtcactgagtcccaggaccctgcccaggactgtatccagggccacttgggggacgggacagagaaaaggccctgcccatcctgccccttccccgctctgggtgtggatgccactccagcagttatcagtactttgctgtcttttttatggcaccctccactctacctgtcctagcctcaactgttggtctccaggctccctcctcgctgctgatgcctctgtccagccactcagctgctcaagctagagcggcatcatcctgtccccttcctctccctctccctccgcttctaatccatctgtgagtcttgccagggctgtggccagaagagatccaaatctcaccatgtctccccatctcatacttccacatcctctgagccttcaccaatgcctgcctggactgaacacgagtaatggcctcctaactggtcgcctgtttcccccacccccacttctctccatcagtggtcagagtgacctccttaaaaccataccagagcagatcacaatccacttaaaacctccttgccagccgggcatggtggctcacacctgtagtcccagcacctgggaagccgaggcgggaggatcacctgagcccaggagtttgagaccagccttcttttcttaggaaaaaaaaaaaaaaaagacggcttccgtgccctgccggcctcagcattctcctcggtgccctcctggaacacgcgggccctgcctgtcctccaggatacaggctgcctgcaccaggcctgtcatgcactgctccctatgcctgaactctctccacagcttctccatggccacatggcccctctttccctccaggccttggttaaatgacacctgtcacaggtgtcctctaatctctccctaggctgagttggtcctcctctgtggttctctcccaaggccctttcattcactcagttaacatttattaagcacttacaatgtgccagaaccacactagaccctggggatacaacagtggcagaaagtcctgatctttgaggagctaaaatttgagttttgggaaagaaacctttaaccacagacaaggcacatgggtgatagggagcaggcacacatagagcgtcctacttcttcatggcactcaccacaattttaactgcacatttgtgcatgtgtttttgcatcattactgcattttcgctgtctcccctaccatactgtaagcttcatgagggcagagaccaagtgagccttggtcaatatctgaatccatgggtgtcagttactgtgctaagcatgtttacagaacagctacattcatctttacatcaaccctgtaaggtagtaccaatgttagctccattttacttattaagaaacaggccaggcatggtggctctcgcctgtaatcccagcactttgggaggccgaggtgggcagatcacttgagcccagtagtttcagaccagcctgggcaacatggagaaatcccatctctacaaaaaattagccaggcatggtggtgcatgcctatagtcctagctactcaggaggctgaggtgggagaattgattcagccccggaggcagaggttgctgtgagccaagatcatgccactgcattccagcctgggtgacagtgagaccctgtctcaaaaaaaaaaaaaaaagagaaagaaagagagaaagaaaagaaagaaaggaagaaaggaaagagaaagaaagaaagagaaaggaaataaaaagaaaagaaaggaacgaaacaaaacacgctgagtgtagtggttcatgcctgtaatcccagcactttgggaggccgaggtgggaggatcacttgagcccaggatttcaagatcagcctgggcaacatagcaagactctgtctctatttaaaaaaaagaaattgagacacagaaatattacagcagccaaaaatcacgccattaataagtagcagagacacaaagccaggagggctcctgcccacaccagctcttcacccacgctgcacttacacctcccaggaccccagactagccctgcacccccactgaccgtccttcagacgcaggggcaggccagcccccagctcagcctcactgcagaagtagccgccaccctgggagtcccaaaagagcttgtcctgtgtgtcctgcagccgcagagcccactcgagccacgcactctcctgtgaggcctcatacaggtccagcaggccccgcaccacgaaggcgtagtcctccaggaagccccagcagggtgggttgctgggggacaggcattacgggaggggctggggagagccccaggagagagggcctttcccagaggaggccctttcacgcatttgttcacttaaccctccagatgaaccctcttgggcaggtgccatcagcccacttcccagatgagtaaatgggcccagggaagctacaaactcacagcaagcacctggcagagccaggactggagtccacatggaggggagaagtagggcagaggtaggctggggacgcgttggggagacgggccctcccggtctacccagcccccaacctgtgctccacagtccccccagggccggtgtagcaggtccgcatcaggcggccactggccacatcaaacatgtgccgcttcaggaacttggcaccattggtggcatagttgatcagcctgtcttggcccaggacagccccagtcacagcatagcctgacaccatcaagcctggagccaggagagacaagtagtggtaagaagctggccaggaccctccaggcatgtccaccctatcaccttaggccccaacacctccctggagccatgggtgatccctaagatcttgggctccaaagccagacatggcggggttcccagcccttgcgcgtgaccttgggcgggttactcaagctccttaagcctcttttgtcaactgagaataataacgctaatcaagggagagtgagcatttagccgctgccggaaagacaggggctttgtgaagggggatcctacagacaggctcggtctcaggtgtgctgccccaccattccaggcagccagcatcttgctgtccaggtgcggcttgggccgatgcttccgggcctggaagagcttctccagccctgaattgagcaaggtccgcacggcctccacatccaagccaaagcgggcagcagtcagctccagcgagtaccggacggtcagcacattctggccctgcagctcccccttggggtcctgaggagaatggcctttgtctgcgagctcacacgcctggcaggcaccagggcccgtcaggtgaccccagaagtcctcacctgactggggctgatgttaccagcctctgtgaggccgtagtgcttcatgaggagctggcctgaggtcagcggctcggtggcacccaacacaggctccggcaggagctgctgaacctctttgaccgtccacacatagtaggcgccctctttgggccgctggccccgctctgggggcgagtctgcatcttctgcgctatagaagcctccggactgtggggaggggagagttggctggccccggcccacagggcagtggaggccccaacccctcccacagccaggcctgcctgccaccatggacacacacccggtggctcaggctccgagccacgtactgcaggatgcctttggccacgtcagagtagaattcatcaccagagagctaagaaagggaagaaaggagactgtgaacagagaggtcactggggaggcccaggtggaaggtggcaacattctctgaggcaggcgggggagggaagcctgggtagtgggtacatgggagggaacaggggattcagattaagagaagccacagtcaccaggaaggccttgggaggggcagccagagtgagatgcctgttctctgggctggggtcaggggtcacctggaaggcctgcgaataggccacagcgagctgtgcctggtcatagagcatcttctcaaagtgagggacgtgccactggcggtctgtggagtagcggtgaaagccctgtgcggatacaaagctggaggccagtcccagcttctgccccaccccacagccccctgctgcccctccagggaacacccagtgcccgtcacctgccccacatggtcccggatgcccccgttagccatcattttcagggtatgcaaggccatctgctgggcccgagagccatcctgagtcagtcgatggctgagccagtaggagaacaggaagctcaggatcactgtgggggcaccaagaacatgcaggtgagagaatgggaaagtggggacagagatcggggtggtcaggaggccttgggccaggcagaggctgggagttcactcaacaggcagtctctggacaggctgtgaggtcaagagtcaacccacaggacagaaggtaatagcctaagccagaggtcagaatatcattggttcacagaggaccagtaagttacttgtccccctagagcccagaatgtcattagccaagtcagggtcactgggtcactgaccaagtcaggggacagaaggtcatcatctaggttaaggtgagagggtcactgctgacaccagcagtcgggtcttcaccgatagctaccgacaggctaggggcaaggaggtcactgccagtcaggaggacaggaagctatgggtgaggccaggagccagtaggtccctgaccagcataggaatcagaaggccaaagcctgggctaaggcgggcgtggggcactgacccggcgtgggaaacttgggggcctcagcgaagccaccgtattcctcatcatagccctcatccagctgctggaagcagcgattgttcacggtggcggcagagggcggcagctggcggtcacccacgctgatctctgatcgggccagcagggcagtggtgacacgctggctattttctagcagggtgttcttgttctgtttccactgcgggaggtgggggcacacctggaggtcagctagggggaggggctcttgtttcctagtcccccaccctggtcccccaactcccggaggcacacccacctgttctcgtattctcagcaacactgtgcggaagccgactcgggtcaagccatcctcaggagggaaataggtgcccccgacaaagggctggaggttgggagtcagccacacattcatgggccagcccccgccgctgctggtggcctggcggagagagggcgagggtgaggggagctgctctgagcccatgtggcgcatacactcccgaggagggctgctcacctgcacgaacgtcatgtacaccttgtccacgtcaggccgctcctcacggtctaccttcacactcacaaagtcctcactgagcaggcggccaatctcctcattctggaaggactcctcttccatcatgtggcaccagtggcaggtggagtacccgactgaacagggccatggggagaggtcagggggccagcaacgggtcagagggaggctggccaagtggccctggctacatggaagacgtcctggcctctagtctcctggaagacccgccaggccgagaggaccctcccccatccactgccactccctgcccacacccccacatcagggaaggtgggagcattacctgagaggaaaatcggcttgttttccttcctggccttgtcgaaggcttcctgtccccaggggtacctagacccagcagggtggggcatcactcagtagcccagggggtctgggaggggcccaggaccccagcgattccaggcagggccccaggagaggtgctcaccagtccacaggattgtaggcatgttgtaggaggtatggtgacttctcgtggatcaggcggttggggaccctctggggtgtagatgaaggatggcttcctttccctccagcaggcatgggcactgaactactgaccgtcgcacttcggtccttgtcccgggaggagctacccctggcgaggactggtgcatcaggcaagccaggggcctccacccaccttctcccaggccccccagcacctgctccatttcactcagcaccccagtaggacccctgctcccagcccaacccacctttctgaaccatgggggagactgtggcctttgtgctcccccttatgttttttggggggtgaggagaggtggctcattgggggctccttgccaggttagtctcccccaacctcctgggcctggcggtgggaaggatggctgtgaggtcagggcgggtcacaatgggcagaatggttcttggggctccattcttacccctccccaggcccctcccccggcccttcctggagcagctgcttggaggcatctctctggcaggcctgggtgtggccccactggaaggcagcctactgttggtggctggacaggccaagatcagtagggtctgggactcgaccaggtgagggacaaacagaggaaaccagacatggggactccctcactcagcgcccacctgctgggactcctgtggggccaggtcctgggccagactccaggacacctagggaatcagagacctcagggagttcagcctggaagtgggactgcaggcagacctaaataacgaaaggtccatgcagcaataaaggactgtgacagggcacagggtactattggagaaaggcccttgacccagcatccagcactggggtgcaaggaaggcttcctggaagcagtgtcagaacagtccctgaggagctggcactgcactggaaggaaggggagaggagggaagggatgaggacgggagaggaggggaggagggccttacagccagagccaggtctcaggagcagaccggaggtggggtgggggaagggccaggcatgcaggggtggtccagactggcactggggaccggtgtccggaagaccctccactgggcccgcaggcaggcgcagggagtgccctaggggcccgctcgcccgcccgtacctgcggctcgcggcgaggcctgcaccggcgcggggcagcagaaggacgcggcccaaccaggcccgcgcgcccagcatggctgctcggggccgtgggcccggccgctgagg

SEQ ID NO: 3323 - DNA, 554 bp, Homo sapiens
atactgaaataagttgagtcatttcgcaaacatttactgagcacctcctgtgtgccaggctcctagaaagacagggagttggtgccctgcacagatgacaaactgccccagacagcagacagacaaacaaactgccccggacagcagacagacaaacagacacattgccctggacagcagagagacaaacagacacactgccccggacagcagacagacagacacgttgccccggacagcagacagaaaaactgccccggacagcagacagacagacaaactgccccagacagcagacagacaaactgccccggaaagcagacagcaaactgccccagacagcagacagacagacacacttccccagacagcagatagacagacaccctgccccagacagcagacaagctgccctggacagcctgctcaccttgcctgccacagtgcatgccccacagggagaagccttccttctcacccagggagtccagccattttcacctcccctggtccatgctcaggaagtctggtcaccctggcaaactgcacctgac

SEQ ID NO: 3324 - DNA, 468 bp, Homo sapiens
ccacagatccctggcccttccaggagtaagtcctgggcaggcagagctggggttggcctgatcccacctgccttgctcttggaaaggacatcaggtgtgggcaaagcatccttgaagcccagacaacacaggcatggcctgcgtgccctcccagcatctgctgcgatggcctcaaggcctctccagtcccctgctgcaccatgccactcagagcccctgagtgagccccctggaattgtctgcaccccccaagccccaacaggaagaagggaaaggtggggaagctgacgctcactcagtgcccactgggtgccaggctctgggctcaaccctctaatatccacacattccatccccccagccccatgtagatggtggggttaagaccattcttcagatgtggaaatgaaggctctgggagaccacaggacatgcccaaggcaaagagttggtagtccctggatttgg

SEQ ID NO: 3325 - DNA, 3813 bp, Homo sapiens
gctgggattacaggcatgcgccaccacgcccagctaattttgtatttttagtagagatggggtttccccatgttgatcagcctggtctcaaactcttgacctcaggtgatctgcccgcctcagcctcccaaagtgctgggattacaggtgtgagccaccacacttggcctttaataaaatcttattggaatcccaagagttaatgccaatgatctatttaaaaaccagttacgggccaggcgccgtggctcacgcctgtaatcccagcactttgggaggccgaggtgggtggatcacctgaggtcaggagcctgagaccaagctggccaacatggtgaaaatgcgtctctactgaaaagacaaaacttagccaggtgtggtggtgcatgcctataatcccagctactcgagaggctgaggcagcagaatcacctgaactcaggaggcgaggtgcagtgacccaagatcccgccactgcactccagcctgggtgacagggcaagactgtctcaaaaaaaataaacaaataaaaaccagttatactattaaaaccaaaagaaggtctgtggggtcctgaaacccaccagccagcgcatctctctcccctcccccagcctggcaacaccccacagaccctacaggccccaagcctcccctgcctcccacccactctatcttacaggacaagaagctgatcaaggccctcttcgacgtgctggcgcatccccagaactacttcaagtacacagcccaggaatccaaggagatgttcccacggtccttcatcaaactgctgcgctccaaagtgtctcggttcctgcggccctacaaataaccggggggagcggccctgcctgggggtggcctggtccgcggagggtgcacctgccctccacagtgggagctgcatgggcctccacaccaccttgggaaccccatggcactgcccttcagggaagccgaccagcccatggagaccgagcccaggcacccttcggacccgctgcccctgtgggagcaccctgcttcaggaagcctccctccctccctctgcctcccttccccaggacaccaagagcgccctctcctgagccctggcagaccgactgcaggtagcaggattgcaggaccctctgcctggcctggcgtttcaggagagaggggaagtggggcctgtgctctgggaggcgtggtcatccgagacaggagtccaggggagagaggaggggacaaaggcgccgtctgggggaggtcgatgagcctgtgctggcatccgcgggccccacgctttgccaactcctccagccacaggcaaggccacggctccgggctgttgcgctctaagggttctgtgattggatggaacagagctgctggggaggagactggaagtttctgcattccttcaacagaacatttaatgaagtactctatatatatatataaatatatatataaatatatatatatacttctatttgtgggtactttaggaaaatgccctttggtcactgtaaatatgaattgtgaccccatcccttcccgcatgagcccagtgagtcccagcagctatcagcctccctgaacgattaaacagctcctcccagcatttgcatttgcccttctgtttctgtgaggccggcagcccttggggctggggagagcacagcttgccttggacttgcttctgaacacgaattcttcgagaactaggctcagatgctctgctggagtgttggcctcaccccagtccccttgccagcaacatcactgcccttggacgagactcagtggaagacacttcccctcggacccgttcccaggaggtgcaggggcccagcaataaacggcgaaaggggccttggctcttgccctgtggcagtgaccttggggtccgtactatgcccaggtgtcagcaggaaacaaggccttgctcacaggagcacaggctgtaccaccacaaggagcctcagagcggccagtgaggaaaggggagagagcagagcttgctgtcagaggccaggctcccagtgcagcctcctcttgctacgccatgccacccccattcacagggaaacctctttccttcctataaaggaaagaggttgaattgactcacatttccacatggcttgggaggcctcaggaaacttacaatcatggcggagggtgaaggggaagcaagcgccttcttcacaaggcagcaggagagagaagcaagcagggaaatgtcgggagaaagagagtctgggctgtgaccgagtgcatgtgtcccacccagccggaaggccagcgcctgggatggagccagcagaaccccatgccgaggtccaggaggccttgcctgctcttcatctgcctgcgagctgtaggacctgcatgggaaatggtctgtgtgtttcaggttaacaaatactgaaaatcccaaggaacctgggagaatctgaaaatgaactccagtcttcagctcgaagttgcctctagggttcctcctggtcacccccgggcccagcctggctggcgagaaacaaacacggtttgagaggctgtggcacactgaggaccacacagatggaggcagccaagtgaggtccctggaggttcagggcttggtgacgaggtaggccgtgatcacatattctacagtccaaaagagggcccggagctcagcaattactcacgccgtcacatgtgcccacagtagcgggctccgcggcgtggctcctgctgccatcagctgccttctctgctgaagtccaactcaagtcggagagagagtggagcctctgcacttggggagtaggtcagtgtcaactaacaagccctgccaggggccactgccgctcctctggtcacagtccacgcaggccagccctggtttctggaaagaggcctccctccctccctttgtggagccgtcagtcatccccaagatgagaggcgagcatcctgccgagtgagcctgcagcaacagctcctgaggaaggtgccgggaggggtgtcgcctcttcacgagtgttctccagagaatcagaacccagaggatacagacgtagatgtgtgaggggctgcattatgggaactggctcacagattctggaggccaacaagtcccacgatcggctgtctgcgattgggagaccaggagaagccacaccgtaactcagtctgagtccaaagcccgagaagccaggggccaccctgtgagtcccagcatccaaagccccgagaacgaggaagatggatgtcccagctcccaaagggaggattctcccttcctcctccttcttttctattggggccctcaacagattggatggagtggatgtcttcactcagtctgccaattcccatcctaacctcttctggaaacaccctagcatgttttcccagctagctgggtatccgttcacccaaccaagacgaccatgcaatcaaccatcacacttaaatgtttttgttttgttttttttgttttgttttttgttttctttttttgttttcttttttttttttttttttttttttgagatggagtctcgctctgtcacccaggctggagtgcagtggcgcgatcttggttcactgcaagctccgcctcccgggttcacgccattctcctgcctcagcctcccgagtagctgggactacaggcacccaccaccttgcccggctaatttttttgtatttttagtagagacagggtttcaccatattagccaggatggtctcgatctcctgacctcgtgatccgcccacctcggcctcccaaagtgctgggattacaggcgtgagccaccacgcccagccagg

SEQ ID NO: 3326 - DNA, 1820 bp, Homo sapiens
cttcatgttcccacttcaaaacaaacagatgctctgagagcaaactggcttgaattggtgacatttagtccctcaagccaccagatgtgacagtgttgagaactacctggatttgtatatatacctgcgcttgttttaaagtgggctcagcacatagggttcccacgaagctccgaaactctaagtgtttgctgcaattttataaggacttcctgattggtttctcttctccccttccatttctgccttttgttcatttcatcctttcacttctttcccttcctccgtcctcctccttcctagttcatcccttctcttccaggcagccgcggtgcccaaccacacttgtcggctccagtccccagaactctgcctgccctttgtcctcctgctgccagtaccagccccaccctgttttgagccctgaggaggccttgggctctgctgagtccgacctggcctgtctgtgaagagcaagagagcagcaaggtcttgctctcctaggtagccccctcttccctggtaagaaaaagcaaaaggcatttcccaccctgaacaacgagccttttcacccttctactctagagaagtggactggaggagctgggcccgatttggtagttgaggaaagcacagaggcctcctgtggcctgccagtcatcgagtggcccaacaggggctccatgccagccgaccttgacctcactcagaagtccagagtctagcgtagtgcagcagggcagtagcggtaccaatgcagaactcccaagacccgagctgggaccagtacctgggtccccagcccttcctctgctcccccttttccctcggagttcttcttgaatggcaatgttttgcttttgctcgatgcagacagggggccagaacaccacacatttcactgtctgtctggtccatagctgtggtgtaggggcttagaggcatgggcttgctgtgggtttttaattgatcagttttcatgtgggatcccatctttttaacctctgttcaggaagtccttatctagctgcatatcttcatcatattggtatatccttttctgtgtttacagagatgtctcttatatctaaatctgtccaactgagaagtaccttatcaaagtagcaaatgagacagcagtcttatgcttccagaaacacccacaggcatgtcccatgtgagctgctgccatgaactgtcaagtgtgtgttgtcttgtgtatttcagttattgtccctggcttccttactatggtgtaatcatgaaggagtgaaacatcatagaaactgtctagcacttccttgccagtctttagtgatcaggaaccatagttgacagttccaatcagtagcttaagaaaaaaccgtgtttgtctcttctggaatggttagaagtgagggagtttgccccgttctgtttgtagagtctcatagttggactttctagcatatatgtgtccatttccttatgctgtaaaagcaagtcctgcaaccaaactcccatcagcccaatccctgatccctgatcccttccacctgctctgctgatgacccccccagcttcacttctgactcttccccaggaagggaaggggggtcagaagagagggtgagtcctccagaactcttcctccaaggacagaaggctcctgcccccatagtggcctcgaactcctggcactaccaaaggacacttatccacgagagcgcagcatccgaccaggttgtcactgagaagatgtttattttggtcagttgggtttttatgtattatacttagtcaaatgtaatgtggcttctggaatcattgtccagagctgc

SEQ ID NO: 3327 - DNA, 1820 bp, Homo sapiens
cttcatgttcccacttcaaaacaaacagatgctctgagagcaaactggcttgaattggtgacatttagtccctcaagccaccagatgtgacagtgttgagaactacctggatttgtatatatacctgcgcttgttttaaagtgggctcagcacatagggttcccacgaagctccgaaactctaagtgtttgctgcaattttataaggacttcctgattggtttctcttctccccttccatttctgccttttgttcatttcatcctttcacttctttcccttcctccatcctcctccttcctagttcatcccttctcttccaggcagccgcggtgcccaaccacacttgtcggctccagtccccagaactctgcctgccctttgtcctcctgctgccagtaccagccccaccctgttttgagccctgaggaggccttgggctctgctgagtccgacctggcctgtctgtgaagagcaagagagcagcaaggtcttgctctcctaggtagccccctcttccctggtaagaaaaagcaaaaggcatttcccaccctgaacaacgagccttttcacccttctactctagagaagtggactggaggagctgggcccgatttggtagttgaggaaagcacagaggcctcctgtggcctgccagtcatcgagtggcccaacaggggctccatgccagccgaccttgacctcactcagaagtccagagtctagcgtagtgcagcagggcagtagcggtaccaatgcagaactcccaagacccgagctgggaccagtacctgggtccccagcccttcctctgctcccccttttccctcggagttcttcttgaatggcaatgttttgcttttgctcgatgcagacagggggccagaacaccacacatttcactgtctgtctggtccatagctgtggtgtaggggcttagaggcatgggcttgctgtgggtttttaattgatcagttttcatgtgggatcccatctttttaacctctgttcaggaagtccttatctagctgcatatcttcatcatattggtatatccttttctgtgtttacagagatgtctcttatatctaaatctgtccaactgagaagtaccttatcaaagtagcaaatgagacagcagtcttatgcttccagaaacacccacaggcatgtcccatgtgagctgctgccatgaactgtcaagtgtgtgttgtcttgtgtatttcagttattgtccctggcttccttactatggtgtaatcatgaaggagtgaaacatcatagaaactgtctagcacttccttgccagtctttagtgatcaggaaccatagttgacagttccaatcagtagcttaagaaaaaaccgtgtttgtctcttctggaatggttagaagtgagggagtttgccccgttctgtttgtagagtctcatagttggactttctagcatatatgtgtccatttccttatgctgtaaaagcaagtcctgcaaccaaactcccatcagcccaatccctgatccctgatcccttccacctgctctgctgatgacccccccagcttcacttctgactcttccccaggaagggaaggggggtcagaagagagggtgagtcctccagaactcttcctccaaggacagaaggctcctgcccccatagtggcctcgaactcctggcactaccaaaggacacttatccacgagagcgcagcatccgaccaggttgtcactgagaagatgtttattttggtcagttgggtttttatgtattatacttagtcaaatgtaatgtggcttctggaatcattgtccagagctgc

SEQ ID NO: 3328 - DNA, 1820 bp, Homo sapiens; identical to SEQ ID NO: 3326

SEQ ID NO: 3329 - DNA, 171 bp, Homo sapiens
gtccggcccagttttggggtgtgacctcaatttcaattttgtctgtacttgaacattatgaagatgggggcctctttcagtgaatttgtgaacagcagaattgaccgacagctttccagtacccatggggctaggtcattaaggccacatccacagtctcccccacccttg

SEQ ID NO: 3330 - DNA, 403 bp, Homo sapiens
gatggatatgaccagtggctatggcctgtgcgatcccacccgtggtggctcaagtctggccccacaccagccccaatccaaaactggcaaggacgcttcacaggacaggaaagtggcacctgtctgctccagctctggcatggctaggaggggggagtcccttgaactactgggtgtagactggcctgaaccacaggagaggatggcccagggtgaggtggcatggtccattctcaagggacgtcctccaacgggtggcgctagaggccatggaggcagtaggacaaggtgcaggcaggctggcctggggtcaggccgggcagagcacagcggggtgagagggattcctaatcactcagagcagtctgtgacttagtggacaggggagggggcaaagggggag

SEQ ID NO: 3331 - DNA, 171 bp, Homo sapiens; identical to SEQ ID NO: 3329

SEQ ID NO: 3332 - DNA, 171 bp, Homo sapiens; identical to SEQ ID NO: 3329

SEQ ID NO: 3333 - DNA, 403 bp, Homo sapiens; identical to SEQ ID NO: 3330

SEQ ID NO: 3334 - DNA, 403 bp, Homo sapiens; identical to SEQ ID NO: 3330

SEQ ID NO: 3335 - DNA, 587 bp, Homo sapiens
ccgggcgctcgaccaatttgttcgccactctcggggcgggggaagagataggaccgagcgaagtggagggaaatcgaaatttgggcaaaaggagtggagggggacctaccccgcctcccccgcgcatccactgccttcctgggcgggtgcaaccacgcgaaatggttgggaatttaggttacttcgcatcctgccttcccatccctccgccaagatgtttgaagtgggaaaagaccctttctggtcctccgacccctgttaactaaaatctttgtcaccctttttttttgtttgtttcgaatccagtgtattggacctttgaccgccaaaagctctttactcgggggagaaaaactcgaggagggcctatcccctccaaagcgccgctttttccttggacaggaagaagtgacctattgcagtgtctccattgctgttatagaagttcgtagattcataaaatagtgtttgcttaagaagtcttcgtttctgttccatttttgaaattttggttaaaatatttcttaaatattaaattacatttcaattagaagaaaagaaataaaacgtattaataacaaaacaaa

SEQ ID NO: 3336 - DNA, 2434 bp, Homo sapiens
ctaggttcccagcaccaccattttgctctctgccttcccctcaccgcgacaccgcgctctcccccaccccaaccacagcctcccggctttcctcccccgactacggctcgcaccccaccccacctccagttcgggctctcctaggcttaggagcctgccggagaaaaggaacctaaatctactgctacacagagaagcggagcctccatcttgcgctgctccgcgttctccattttgggccacccatggggggggggggtctccgtagaggccccgagggagagttgggcgagggaaggaagagaaaatcttcagcgagggtagtcgaaaagaagagccctgcggtagaaagccactctaggagtaggaggtagggaggaaggggggctggaagttccttggaagtgttggggtagcgacttggggggagaagggagaaaggagggcggggggcgccgcgggggcgagaaagatcctcccgcctggactctgccccccgttccatggctgccccccatgggggcgaagaaagcagaggggaaattcaatggcaacagagtgcccaacctctttccctcccaactcctctctctcgccctgtttcaatcatacacacctcacggtgggccaagcgccctccgggtgcccctccaaacttctagaagcttcgcctccgccattttataacttacctcccccctcagcgtacacagaggcagcaacgagactgttcgcctcccccactcctccttctttctcaggccgggggcttcttcacccctgggctggtacaagatatttttccccttcctcttctttacaccctcgaattctactcagggacggaagctcccgcggttctagagcggtggggggttttgaaagtggcggtcggatccggcggggttttttttctttttttttttttttttttttttttttttttttttttttttggtggcgcttcgggattgtttggggtgttcgctcttcggcgacttggaggcgaatggaacgcgcaggcgccatctgtcggccacgaacccgcgcccggctcccgttgggagggagcggcatctagcggcagagagttgccactgcaacgcctggctcccagccctcccacccagcgtcctcctcccagtcaccgaccaatcgtggccgactgactcccgggttcagcgtctccgacgccgcccgcaaaccaggcgcccgcaggggcgcgccgccgagtggggtaaacaaggtgccgtgcccgcgcctgacttactcattcgtttggccgcgcttccgccgcggacccgatcgagccgcggttcttctgtctttagtggggtgtcgaggggagggcggtaggaatgtccggcggagccctgggccgtgggaatccagaggctggctgggttcgctccgggactcgttccccgggcccctccgcccctcgcgaggcgctaaggtggcagcccagtcgggcatcacccttcgaagtcccctcttctgacacacccctgtgaggggcctgtggccctagttcccgtaccttcgatgcccccttgtccctaccccttcccaccaaaagaacccaagtcgcttaactctggcacctgatcctaaatggtttaatggagctacttgggctagatcgggggcggaatacgggttggttttgttttgctttttgcttcgggtgtggagagagagcgagctgattctctaccagtaagacctagccctggaaaagaaagaaaaattgttttgctttacagcccactggtcccgtctccgagaaaacgtggtctgtatctccaggttctaggagtcctaaagaactggactactaggctaggccgggcgctcgaccaatttgttcgccactctcggggcgggggaagagataggaccgagcgaagtggagggaaatcgaaatttgggcaaaaggagtggagggggacctaccccgcctcccccgcgcatccactgccttcctgggcgggtgcaaccacgcgaaatggttgggaatttaggttacttcgcatcctgccttcccatccctcccccaagatgtttgaagtgcgaaaagaccctttctgctcctccgacccctgttaactaaaatctttgtcaccctttttttttgtttgtttcgaatccagtgtattggacctttgaccgccaagagctctttactcgggggagaaaaactcgaggagggcctatcccctccaaagcgccgctttttccttggacaggaagaagtgacctattgcagtgtctccattgctgttatagaagttcgtagattcataaaatagtgtttgcttaagaagtcttcgtttctgttccatttttgaaattttggttaaaatatttcttaaatattaaattacatttcaattagaagaaaagaaataaaacgtattaataacaaaacaaa

SEQ ID NO: 3337 - DNA, 617 bp, Homo sapiens
tttaatccaacaccatggccctcaatttaaaaactacatccaagagaaagaaggagggagagggaagaggggtggtaggcaacaacataaaaaacattctaggccacggaagagaaagtctcacaaaccggatgaaactactaatacaatattaaaaattaaagccgagcactgaagcacgaaaatcacacgataacccattacagttaaggattaaaaataaaatgacatatgcaccaagggggagcggaaactaaatgtcgaaagtacagcggtttataaaaaactaaaggcaaaacaagacattctcgcgacggggggaaaaaaaggccgaaatcaacaatacgttcacaattctaggccaaaagaaaatgggaacggggctcaaagttttgcggaactacttgatgctgtttcccacaccttctctctcccacggcccatccgacccttttcgtcccaaaatcgccgtccgcagatctccggatccaggggagaagaaaaaagaaagtcgaccccgagcaagaataaaagtgtggagtgaaaacgcacaggctgcctacctggggcaaggatcagctcagttcgtgccttgagaaagacagtgcgggtggggg

SEQ ID NO: 3338 - DNA, 504 bp, Homo sapiens
  SITE (189): n equals a,t,g, or c
  SITE (191): n equals a,t,g, or c
  SITE (243): n equals a,t,g, or c
aaaaaaaaaaaaaaaaaaaaaaaattagccaggcgtggtggcgggggcctgtggtcccagctactcgggaggctgaggcaggagaatggcgggaacacgggaggcggagcttgcagtgagctgagatcgtgccactgcactccagcctgggcgacagagcgagactccgtctcaaaaaaaaaaaaaaananagtcaataccctgtacacagttagccagattgagtaattttgtactgttggntgatcttgtggccaccctgccttatgagaggaggaggggacagagcctttgggacccttcatggagcttcttaatgtgcaagatgggcacagggtgctttctggtggtagaaccgcatgctgattaccctagatgagctgcacaaggttgaaaaggcagcagaggcctgctttcctttctcatctcctgaggacatggccagggaagtttcccttggctttggaagatagcctcttgccatttctttctttgccaggggcc

SEQ ID NO: 3339 - DNA, 374 bp, Homo sapiens
cattgcactccagcctgggcaacagagcgagactccgtctcaaaaaaaaaaaaaaaaaaaaagtcaataccctgtacacagttagccagattgagtaattttgtacctgttggtgatcttgtggccaccctgccttatgagaggaggaggggacagagcctttgggacccttcatggagcttcttaatgtgcaagatgggcacagggtgctttctggtggtagaaccgcatgctgattaccctagatgagctgcacaaggttgaaaaggcagcagaggcctgctttcctttctcatctcctgaggacatggccagggaagtttcccttggctttggaagatagcctcttgccatttctttctttgccaggggcc

SEQ ID NO: 3340 - DNA, 288 bp, Homo sapiens
tttgttgtttttgagacagagtcttgctctgtcacccaggctggagtgcagtggcctgatctcggctcactgcaacctctgcctcctgggttcacaccattctcctgcctcagcctcccgagtagctgggactacgggcgcccaccaccacgcccggctaattttttgtatttttagtagagacagggtttcatcgtgttagccaggatggtctcgatctcctggcctcgtgatctgtccgcctcagcctcccaaagtgctgggattacaggcgtgagccaccgtgcc

SEQ ID NO: 3341 - DNA, 1147 bp, Homo sapiens
  SITE (24): n equals a,t,g, or c
cggcctcccaaagtgctggaattnacaggagtgagccaccataccccagcccctcttgattctttatcagtgccctatcctgtacctctcatggcctcttgagtaagtactgacccaagaaaagaagatgcagctgcttctctccagaagctccactagtgagactactccctggggtggtgttgacaaggtctcattagagagctggggagtcacatggggagtctgttgggtacacctcttgggccgagtctcttgcaaggtgttggctctacgcaggcagagtcccctctgcctggttttcagtggcctggtgtttaagggcctaggctctggaatgacatgggctggatctgaatccccatgctgaggtgtgaggtctatctagacacattgcttaacatctttgagccccagttctcttatttacagtgatacttaggtcaagacgttaatttgatagtcttggtgtcatgcctggcatgaagtagctgctcaataaataatcactgttagtatggcactatgataactgcagaccacacaggcctcgagcagtgagcagcagcccaatatttactattgctctggtagtctatacagccatagagtccacgaattctaaagaggagctctggaaagtgtgaaagcctctggactccaatgaagctatttgctgggctccccaggcaacaagaaggcataataattgtcaatatcatcattctcacattagaaggtgccacctcccagactctacaactcgtatatccagctgggagagcttctatttctctgcaggcaatcaattaatagaaacctcctttctgtaatgaacatgaaagcatttgacagttttaaaggattttaccaattaaacaaaagtcattccttttcctccttcctgaacccaatacccgctcccaacatacacaccttctactcctggtacatggaagaagacagggtaactcgtctactctagactcatcttaaattgactacagatggtttggctaattcagttcaaattaaattcttttcttgcctatcctgtcctcttcgcaaatgggaattggcccttggagttaaatttctttctaaagttcctactgtatgactggggtaatttctcaacaatggctgg

SEQ ID NO: 3342 - DNA, 994 bp, Homo sapiens
actagtgagactactccctggggtggtgttgacaaggtctcattagagagctggggagtcacatggggagtctgttgggtacacctcttgggccgagtctcttgcaaggtgttggctctacgcaggcagagtcccctctgcctggttttcagtggcctggtgtttaagggcctaggctctggaatgacatgggctggatctgaatccccatgctgaggtgtgaggtctatctagacacattgcttaacatctttgagccccagttctcttatttacagtgatacttaggtcaagacgttaatttgatagtcttggtgtcatgcctggcatgaagtagctgctcaataaataatcactgttagtatggcactatgataactgcagaccacacaggcctcgagcagtgagcagcagcccaatatttactattgctctggtagtctatacagccatagagtccacgaattctaaagaggagctctggaaagtgtgaaagcctctggactccaatgaagctatttgctgggctccccaggcaaaaagaaggcataataattgtcaatatcatcattctcaccattagaaggtgccacctcccagactctacaactcgtatatccagctgggagagcttctatttctctgcaggcaatcaattaatagaaacctcctttctgtaatgaacatgaaagcatttgacagttttaaaggattttaccaattaaacaaaagtcattccttttcctccttcctgaacccaatacccgctcccaacatacacaccttctactcctggtacatggaagaagaaagggtaactcgtctactctagactcatcttaaattgactacagatggtttggctaattcagttcaaattaaattcttttcttgcctatcctgtcctcttcgcaaatgggaattggcccttggagttaaatttctttctaaagttcctactgtatgactggggtaatttctcaacaatggctgg

SEQ ID NO: 3343 - DNA, 276 bp, Homo sapiens
cacgcctgttatcccagcactctgggaagtcgaggtgggtggatcatttgatcaccgttctgggattacaggcaatgagccaccacacccagcctgaacaagtcacttttgatgctaccatttccatgtttacaaagtgaaaagtaaatcagtcagagtatattagttgcaaacaacagaaacaactctagctagcctgagagaaaaaaaaggtagagggttagtctcctggagagatttggggacctcaaaggaaagattatacaatgtgcctcc

SEQ ID NO: 3344 - DNA, 276 bp, Homo sapiens; identical to SEQ ID NO: 3343

SEQ ID NO: 3345 - DNA, 125 bp, Homo sapiens
cctgtaatcccagcactttgggaggccgaggcaggcagatcacctgaggtcaggagttcgagaccagcctggccaacgtggtgaaaccccgtctctactaaaaatacaaaattagcctggcatgg

SEQ ID NO: 3346 - DNA, 380 bp, Homo sapiens
gcatatagcacagggtagtatgctctcaacatataaatgaataaaatagggcaccttggtgatgactacaaaatcacctgctatgatggcctgggtgcatggaggatgtaccaccagatgtttcaaactatctccattccttttgttttttttgtttttgtttttgtttttgtttttgcttttgttggagacacagtttcaatctgttgcccaagctggagtgcagtggtgtgatcctggctcattgcagcttcaacttcctgggctcaagtgatcctctcacttcagcctactgagtagctgggactacaggcatgtaccatcatgcctggctaattttaaaaatgttttgtagagatgggggtctcactatattgccc

SEQ ID NO: 3347 - DNA, 498 bp, Homo sapiens
acagacatgtgtcaccaatcccagctttttgttgttgttgttgttgttatgaaatgttttgtacatacaaagttttgtaaatcttcatttaaggatgatttcctcgattccttctttgtttcattcctaatagttcctcccagggacccttgcaagagagagaattccttcctgctttttctcttaagattcacaacctcaggacatagggagggcttttgttccatctcagaacccaagggccttcatgacccgcattacctcctctgaaagtgttcaaattcagcctgtctcctcgctttcaccgctgggaggtcgctctggccataggcatcctgaaagttgtaacctccctgctctttgttggcttcacatttgcactgatttttcgggaacagcctgaaacaagcaagaggactgtaaacatggattgggtgggtaggctggtgggtgagaggaaaccggagtcctaatccagtgtgtagtttaccctgaaaa

SEQ ID NO: 3348 - DNA, 4099 bp, Homo sapiens
ctctggcccatggccagtggcagggttgtggtgccaactccactctgctgagagtgagcctagggtcttggtgtgtgagtggtgctgtggccacccggtgctcaggtcaccagggcggaggccttgccctcttgccagctagtttgctttactgggttttgctttggggaaggatcttctataaataccagtccatagagcacttcatcctgctttctgggacgtaagaactcatccctctaagaagagcctctgcaacagaaaccgaaacagtgcatctgcttaggaacaaagccactctctgtctggtgtggtcagagggtcccggatgtccccccctccactctgctgggcaggggctgtgcctgcggagcttccttccaggatctgtccttctcagcttccccagccgagccgccaggggtcctgaggaccaccatggcccctgaacactcctggagctttggtgtcagccctgccacccgagagagagagagagacatggtgagtaactgaggcacagacaggttcaggcacagtcctggtcacaagtggccaccatgcaactctgggccccaggtctctcccagcacctgctctgccctaagcgtgtggggccgggcgctgcactgttgactttatgtcccctgtccccagccttggtgttacttactgcacttgagcctgtctcctggagggaaatgaaggtgagagggacactgtttcatctaagaggggaagctcgggaatgggtttgaggacttaaggggccaggagtcaaggtaaggaaagtgaatggcacagcgaggcgaagctgtgcagccctggtgggtcactgccaccgtccacgtccccaggtggcgtctgacacaaggtgggccaaagtggccctctccagcctgtctgcctcccatagcctccgtggggaaagcactgaggcaggatcagatggaaccagagaagcccatcccccacctcctgcccactcattccttaaagacatcagtctcggccgggcgcggtggctcaggcctgtaatcccagcactttcagaggccaaggcaggcagatcatgaggtcaggagatcgagaccatcctggctaacacggtgaaaccctgtctctactaaaaataaaaaaagttagccggatgtggtggtgggcacctgtagtcccagctactctggaggctgaggcaggagaatagcgtgaacctgggaggcggagcttgcagtgagccaagatagcaccactgcactccagagcctgggcgacagagcgagaccctgtctcaagaaaaaaaaaaaagacatcagtctctcccaaaacccagctaggttgctggcttgacggaggtcctggccctcagaaatcccgttgtcccaggacgggggcaggtggtctgagggcgccgcagcacccgtgagccatcctcactaggagttgtaccgtcctggtctggtcgtctcattctctcatgagctgggagctggcagcagagccaggagcggagctgcagagcaggctccccacgatgcccgtgtcgggatgttcctgccagtggcagtgggggcagccgggcctgtctggagcgactccaggctgctcagacatcaaagggaaaagcacccgattgtgttgtttgcggggctagttccttcttgtccctcaggtcttagcacagatgccccctctggaaagagcccttccctggcccccaccccaccgccccctgcccgtctccctgttgtttcctccatgggtcactcactctcagcctgtatccgtgtcgcctctcgcctgctccacgggagcaagggctttctctcttattccactaggtcccagccaggcacgcagcagcccctcacacaagcatggcatgagtcagggaggaagggacagagggaatggccgtgtgaccttgggcagtaacttgggctggtttttcatgtacaaaatgaggcgacgacccacttagattgctgaacacatcgagtggccatagccgtgagaagtgagagctgcccctgccctactgatggggagacaggtacaggtgacgggagcgttagccgagatgtccacccatccaccacacgcctatgggcacccttgtgccatgagggctcagcctgggccctggtggaagcaggtaccgggtcgatgctacctgcagcctcatcagagcctagctcttgggcagcgggcgtggttctggcctcttcacagccgaagtgcagacaggggctgtgggccaagctcctgaaatttccgccgacaagggcatctttcatgagtcttccttctgggccccctgttttgaaaccaaacaaggatgcagatttctgccaatcccgatgagctcggcatgagcacaggctctgttcccacgcggaggtgatgtcagccccgagcagagacaggcgcttggcattccacgagcctgggcggccgcgtcagggacagacacagtgtctgacagctggctttgagaaatactgacaccagttcacagactccattcctaccttcagggacccccagaaaggtgaaaggaccccaggttgtgtgaccagtcacctgatccagccccttcttgtcctggttctcccatcacagaggggccagggcagggcaggagtgggcctgagagcccatggctggtttccacatgcgccatgattaagctcctgcactcggcatttcagtaaagccatcttgtggtacagacagtgctgacatcagaaccttccgtggatccagcctcctacctccgggtacctgctgtgtgggagtcactcccctcccccagccctggatgctcctccagtcatcccagtagctcagggccagcccctgggatgtgtctaagaacatgagtggacaaatagatggactgcccagagcagggtttctgagacttcgctgcaggatatgtcatcgccctgcagaaaactacccccaccctaggaccccccgagttttggggtttgtaagaaattacatgtctcatttattttgaacaggtgaattttgcagtcaaattcttgtgttccattttagtacaaaaatagcattatcttttcaaaagtaacattttgaaattactcatcaaataaattgatgcttcaggaagagctgtgtcaatcctgtaggtttatagatctgcgcttcacaggaaaccccagcaggtccccggctgccgggcccaggtgatcctaatgaaactctccactgctcagggccaggtgccttgctgggagcttgcaaagccttcactcccgcggccctcacccagcccctgaagggcagcgatttgtgtctgaaggttcgctgggtcctactgctggcgcccattttacagatgtggaaaagcaagcacagaccagttaaggagcttgggcagagtgactgggagacagttcagctccgtatcagaaagggctttctaagcgtgcgtgctgtcacatgtaagcggctccctgtgggtggtgggcccccttccccaccaccaccctgacatcacaggtgtgagcagccaccgcacacactgggcatcacatgggccggggagcctggctctacagcacagtcctttggccatgaagagggggtggtagtgaagatacagagtccttggcttgataggaggtggggctgacagcctcccatcttccagcctgccccaagaccacgtgacctttcctgacctggtgcttctgtaagtcccacctcccgggtgcccctgggcgaccttggcccataaatctctttgatccccatctcatcttcaaatgaaggtttacagctcagctttttaaaaaaataaaaataactagtaggttctggctgggcacggtggctcacgcctataatcccagcactttgggaggccaaggcaggtggatcacctgaggtcaggagtttgagaccagcctggccaacatggtaaaatcccatctctactaaaaatacaaaaaagtagccaggcgttgtggtgcatgcctgtagtcccagctactcaggaggctgaggcaggagaatcacttgcaccctggaggcggaggttgcagtgagtggagattgtgccactata

SEQ ID NO: 3349 - DNA, 16877 bp, Homo sapiens
gagcagcagccaagctggacagatgacctgcctctctgccacctctctggggttggctcagcctccaaccgcagctactctgctgatggcaagggcactgagagccacccgccagaggacagctggctcaagttcaggtgtgtgtgccagcatttctgtgttgggcccggggagttggttggtttgcaagcaaggaaagacaccgaccttgcagctttctcgtatgggcttgccagtgacatgtggcccgtgagaggtggcctctgctgctgtcttgccaagggcctgctctgatggggtagcgtgagcatggggaggagggtatcccagaatgtcatagccagagtgaaatgatggctaaagcagggggacccaggagggcccctgaagctgcagctgctgtcgctttagtctcccccaattcctttccctttctccctccacctccgtgagaccctggtctcaggcctccctctgccctctccctcttccaggagtgagaacaactgcttcctgtatggggtcttcaacggctatgatggcaaccgagtgaccaacttcgtggcccagcggctgtccgcagagctcctgctgggccagctgaatgccgagcacgccgaggccgatgtgcggcgtgtgctgctgcaggtaatggtgccggggccaacagtgacccagccacatcatgtcccccaccccaaggcttgggccctgcacctctagcatgttgccagggttggtgtgaagatcctgccggccccttcaccccagtagaggagcagctcccagcgtaggcccccccacccaacaggagtccaggaccagccagcgagcagcaggccttcaatggctggcagaggaggtactgctggagacggggggatttagggatgggagcttggagagaggtgtgaggtgggagcagggcaaggcctggtagaaatggggtcatttagagctacccctttctttcctatgtggtcaggtgctcagcctccaggtgcaggagccatccctgggcgtccaggaaggaccttgcctcccctttctgaggggccgccgccctcattgactggttccacctttctgcttgcgctgttggcagttttcctcctggcatctgctttcaggagcatgtctcaggcccatttcagatgagaagatgggcttctgttcccggagaggggtggtgccagccttttcctgcccttcacgacctcaggctccattgccagtgattctcagcagatctcacacagggggagaaggtgtcagtgtcaccagtgtcctggggctggtggggtttgacagaagcctcccagaaagaagttgtagtaatcatacgagctgtcataggcctggcagtttctctgagcagttgccttgctgagtgccaggttggactgtcttacctaacccctggaacaacacttaacctccgttgtgtgagactgagggggccagaggtcacaccagctgggcctacgccaagcctttgctcttagcttccgcactgtctcctgcctcccagccgtctgcagtgctgcctctgcagggtgcacaccccttcgaggctgaagggctttgtcaaagacattgatctgcaggaagcagccggtgccttgcagtgctgggccagaggcaggactgacatgtggaaagctccatcacacaagaacctgcagtgaagacagcaaagctgctgctctgattaatagaggacattttggcaccagtgacagtggtgttttgaaccagcctttgccctgtcctgtgtccccctaggccttcgatgtggtggagaggagcttcctggagtccattgacgacgccttggctgagaaggcaagcctccagtcgcaattgccagaggtaatttccccagccgacacccaggggagtcaagtccaggcccagctttgcaaggagcatggactcatctactttcttgacattactgggccagagcaacaggcgttagggagcagttcctgatgggtgacactggtgtgtggccacaggtgagggacctcgctgctctgctgtgggcagctgcatgctaaagctcagcagtgtctgggcagtggtggacatgaggaagggcttttcccagtccttcgtcctgaatgggtccccgcccttgtcaaccacctgctcacatcgcctactgccacctgcagcgcttacctctgtgctgtgagttcggtcatctccagctttctggaagaaccttagcctggagctgtagcgaaggcttcatcttggctgtgccatggaccatctgtctgtctgtcccccgggccctcggatctttgctcttaagagcaaagggaggccgggcatggtggctcacgcctgtaatcccagcaccttgggaggccgaggcgggcggatcacaaggtcaggagatcaagaccatcctggctaacatggtgaaaccccgtctctactaaaaatacaaaaaattagctgggcgtggtggtgggcgccttgtagtcccagctactctcgaggctgaagcaggagaatggtgtgaacctgggaggcggagcttgtagtgagccgagatcatgccactgcactgtagcctgggggacacagcgagactccatctcaaaaaaaaaaaaaagagtaaagggagtggagagggctaggaagatggtccagagttctgtcctgccctgaccctctgttgatggttgtagggagtccctcagcaccagctgcctcctcagtatcagaagatccttgagagactcaagacgttagagagggaaatttcgggaggggccatggccgttgtggcggtccttctcaacaacaagctctacgtcgccaatgtcggtgagccccctcctgtcccagggcagggaggactggggagaggtcagccacaggggtcggtgcattatttgacaatctgctttccagacacttcacgcactttaaacccagggtctcctgagaccgttgggtatgtccctctccacagtgacgcctcagtcccaactggaagggagaaaggacgggatgggagacaggtgtcctggcctttagtccctattctgcttcttaactcattctggacgagtcgtatcccattctgggtggccttgggggccgctgcttctggaagaggttacctggccatgaataaccaaccagtatccccatgaacagctgcgagatggggctaggtgacagggacattggggtttgtgagaagaccagacaggtgcaggtttcagtagaaaggactctgtagagacccttctgatgatgctgcctttttttaatactccagtggaaaattttccacaatatagaacaatagagtgactgatatttaatgaacattcatgcgcccatccccaatcccagcagttatcaactgtggccagccttctttgtccccacgttctctattttgaagcaaatgccagacactgtatcatgttatctgtaaatatttcagtctgtatctctagagaagaggtctgttttattaagatcataatcctatgattacactgaaaaagttaaacccaattctttcgtatcaccagctgtccctaactggtgactcaccccgttggtctgagcctgttttgcccatttcaggtatttccatgtgtgaaatgcctgccttttccctctctgccttcccggtatgccctatttctctctgtgtgtagtctttgcttagctgttcacattctgccacaggtacaaaccgtgcacttttatgcaaatcgacagtggatgggttgcaggtgacacagctgaacgtggaccacaccacagagaacgaggatgagctcttccgtctttcgcagctgggtgagtggggagagtgggagcggaagctgatccccatgggctcacccttcgcctgcctttggtggtggggtagagaggcgtgtggtagaggggctgtgatcttgggctccccagccagcctgcctggggttcattcccagcactgccgcttactggttggtgattggaacttaagttttctgtgcctcagatcccccgctgtgtaatgaggataatagtaacctacctcgggatgctaggaggattcagttagtgcatgtgaaatgcttcctggagtgcctggcacacagaagacacttactgttattggtggagactgaaagaggccaaagaagtccagggagcccagctgctgctgagctgctccttcccttcccagtgagctccaggcagatgtggggcacacgggatgggcagggagacggcaggcaagctgctccgtgccaggtggtgcctggaggacgggctctgagtgaggtgtgtcgtgatgggcgtggggactgaggacaccagggactttgggtcagctgctctcccaggtgccctggtgttgtcttcatttcctattcagtgggtccttattgccttcttcccatgactgtgtctctgtccccttctttttgttcctctttgtgaacaagaagcaggattgttgcactgtttccctccgtaggcttggatgctggaaagatcaagcaggtggggatcatctgtgggcaggagagcacccggcggatcggggattacaaggttaaatatggctacacggacattgaccttctcaggtaggtgccagcccagctgtcccctgtgcttgaaagaacagaaggtcctagggaggccaagatgggaggattgattgtgctgggaggtcgaggctgcagtgagccgtgatcatgccactgcactccagcctgggcaacagagcaagaccctgtctcaaaaaaaaaaaaaggtccagaaggcctggggcagacgcagactgtaggccccagtgacacatgtgcagtcaaagtagttcagagcccaggcaaactctttcttcctcccagagaggttggtttggggcaggttaggcccagcaggccaggagttgggtactgtagaaacaaggggtggagttgagctgggccaaagctgagggcagcaactagtgccacaagggaggcaggcgaagccagagttggcatgggatggacagaccaggcctgttggtcggtgctgcccatggctgcagcagaggtgtgagatgaattgtgtatttccctctgaggacacctcctctggacatcaccccagcgctcatggcagcagaatgggcagtcatcatcacacggccaagcccgtgcagagctctggatgtaccttcttttatgcattccctactcaggccccctgaggcagtcactgccatcaccccagaggcattttcataagaggaaactgaggcatggagacatcaggcagcccaccctggtcatggggcttgaacacaggcagcctgaatttggaatatgtgtccttaaccgtcaggtaacctgtatgtgaagtgttggttggggagataggcgcgtccacttgcctgatgccaatcatggcatttaatgtcatggccaaggctgttcccaaagccagagttcccatcaacagaggcctcatggcctagaaagtgcatgttagaactccttgccctcacgcgatctaggcaactgagtgtcgaatatttgtccctaatttgtggggtcctgtttcctttattggaaaggacatccatagtttaaaacacttcagacagtgctggggtctatacagggaaaggaagtcttcctacaccacactctaggactcgctgcctccccagaggctgctagtttcttgtgtatcctgttccaaaatctggccacatgcacatatacacacacggtgtctctgtgtgtgtgtgtgtgtgtgtgtgtgtgtgtgtgtgtgtgtgtttgtcctgggggccaaggagcctgcatccttttcggaacacccaggtgctggggtgtctctctctgtgtgtgtgtgtgtgtgtgtgtgtgtgtgtgtgtgtgtgtgtgtttgtcctgggggccaaggagcctgcatccttttcggaacacccaggtgctggtgtgtcctgcccctcccaggtgctggtgtgtcctgcccctcccaggtgctggtgtgtcctgcccctcccaggtgctggtgtgtcctgctcctccttcttttctttttttttaaaccctaaggtgtaattggcatatgcaaagctgtgcctatttcatgcatacaacttgatgagtttggagatatgtttacacacccctcactgctatcattaaaggtgctcatctcttcattctgctcacctgcagttaggatggcgtcattctgtgtaataaccgctcccagggcccagccctggctgacggaccctcaggaagttcttagactccgctcttctggatggtgttgccagcacctcctcatgtacttacctccatgtgcacacacatgtgttggcatgtaatgactctgaccccagtcactaaaggatccctgtacacatggagagtatctggggtctcagccatctgttttggaaaagcccaaataatagcaagaggcttgggctcccagggataatccctccctcttgctgtcccacaccctgccctgccaccaccggaccctgtgaacaggacgtatggaacaggccagaatcgggcattcaacctttgccatcctgacctcagctgcctgccagtttttatggccttccaagctttattttagcagctgctgtaagacgatgggtctatttttctgaccttctctttctctcttttcttttcctcttgtcaggttgtgtgttttattttacattctgggcatagattcctcccctcagcagaatcagcatccacctgcgggctgttccaagcaaagctcttccttccactctctccccatagcgctgccaagtccaaaccaatcatcgcagagccagaaatccatggggcacagccgctggatggggtgacgggcttcttggtgctgatgtcggaggggttgtacaaggccctagaggcagcccatgggcctgggcaggccaaccaggtgagttgggcccagccacgcccatggccggagagcgtggctggcctgcatggtgatgtgctcaccctgccttctagcactgtgattctcggaggccgtcaccagacatctctgggttcaaagctgggggaaggagaatcccagagctctgaaaacacccatcccacccaaaaacttgactcattttaggcttgaagcagtgccagtcctcagggcctgagcaaggtctgaagggaagagggggagatggatgtgaattgctatgggcacggcattactctgagacggccaggaaggggccagggccaggaggagagcacagaaagagatgtgcagagtccttcccacacccatcacttcctgccaagggcctgacggctttactgccctccctgagtggcagacaatttatagtttgcttctcatttcttttttttttttttttttttttttttgagacagcgtctccctctgtcacgcaggctagagtacagtggcatgatctcggctcactgcaatctccgcctcccgggttcaagcagttctctgcctcagcctcccaagtagctgggattacaggtgtctgccaccacgcccagctaatttttgtatttttagtagagacagggtttcaccaggctggtctccaactcctgaccttgtgatccacccacctcagcctcccaaagtgctgggattacaggcgtgagccaccgcgcccggcagttcacttctcatttctacagtgaggatggtaacatctgcctttgtgagatcgcagtgaggttaggcgtggtagacacaggccctcagccaagagttgcttatttttcttataccttggagtcaccaaagtgtgacttcaagacagtcacgttagggatggtctcaaaggaaaactgtctttccctgacctccttggattgctgactggctaagataagttcagtttgtgttcctcctcctttctgtgattcttgtaggaagataaccttttctgctttgacttttttttttttttttttaagacttgctgtgtcacccagactggagtgcagtggcgtgatcacgggtcactgcaccctcaaccttctgggttcaaccgatcctccagccttagcctcctgagtagctggaactataggtgtgtgccaccacacctggctaattttggttgttttctttgttttgtttttttggtagagacagggtctcactgtatcgcccaggttaatctcaaactcctggtctcaagtgatcctcctaccttggcctcccaagatgctgggattgtaggcatgagccactgtgcccagcctgctttgtcctttttaattaaaaatcatgtattggccgggcacagtggctcatgcttgtaatcccaggactttgggaagccgaggcaggcggatcacttgaggtcaggagttcgagaccagcctggccaacatggtgaagccccgtctctactaaaaatacaaaaattagccgggtgtggtggcaggcacctgtaatcccagctactcaggaggctgaggcaggagaatcgcttgaacccgggaggtggaggttgcagtgagccaagatcgcaccactgcactccagcctgagcaacagagcaagactctgtctcaatcaatcaatcaatatcatgaggaaaaagtcttctttaaaatttgaaaattaatttttatttcagtagcttttgaggtaccagtatttttttgttatagggatgaattatgtagtggtgaattctgagatcttagtaaaccagttattccagtagtgtacattgtaagtaatgtatagtgttttatagtgtacattgtaactaatgtatagtgttttatagtgtacattgtaactaatgtatagtgttttatagtgtacattgtaactaatgtatagtgttttatagtgtacattgtaactaatgtatagtgttttatagtgtacgttgtaactaatgtatagtgttttatagtgtacattgtaactaatgtatagtgttttatccctagcaccactgccatcctcccgccttgagtctctaaagttccattatatcactctgtatgcctgtgcattcccatcatttagctcccacttacgagtgagaacatagtttgtggttttccactcctgtgttacttagaataatggccttcatctccatccaagttgctgcaaaagacattcattctttccttttactggctgagtagtattccatagtttatagatacattttctttatctgctcattagtcaatggccacttaggctggttccacatctttgcaattgtgaattgtgctgctataaacatacgtgtgcaagtatctttttcatataatgacttattttcctttaggtagatgcccagactgctggattgaatgcagatctacttcgaaaaagtctcaagtgcctaactatcccctgttccctgtgttctgatttcttttttttttttttttttttttttgagatggagtcttgctctgttggccaagctggagtgcagtggtgcaatctcggctcactgtaacctccacctcccgggttcaagtcattcttctgcctcagcctcctgagtagctgggactacaggcatgtgccaccaccacacccggctaatttttgtatttttagtagagatggggttttgcctttttggccaggcttatcttgaactcgtaacctcagatgatccacctgccttggcctcccaaagttctgggattatagacatgagccactgcgcccagcctgtgttctgatttctttacctgttatataagcttaccattccttccagtagccttataacatagagggacaggggcttatttccaggtagagtagggaatttggggtccacggagttcaggttcttgccagaagtgacgttgctgcttagtgttgaaactgagcccaccaggaccaggtgcaggtcatttcctattacctgtccctgccctcctgccccgcccaaaagaaactttatgatggtgagaaagtgatacatattcagtgggaactgtgctcccatacccctacaaccattctgtttttcactgtcaaaacagtactcaataaattacatgagattcggctgggcgtggtggctcacgcctgtaatcccagcactttgggaggctgaggcgggaagatcactttaggtcaggagatcgagaccatcctggctaatacggtgaaaccccatctctactaaaaatacaaaaaaaaaaaaaaattatctggtgcatagtgacgcacgcctgtaatcctagctactcgggaggctgaggcgggagaattcttgaacctgggagatggaacttgcagtgagctgagatcacagcactgcactccagcctggtcaacacagtgagactctgtctcaaaaaaaaaaaaattacatgggattcaacattttcttatataataatgaaaataggctttgtgctagatgattttgcccagccgtaggctaatagaagtgttctgagcacatttaaggtaggctaggctaagtgatgatgttcagtagattaggtgcattaaatgctttttcttttctttttttttttttgagatggagtctcgctctgtcacccaggctggagtgcagtggctcgatctgggcttactgatcacctcccgggttcacgccattctgcctcagcctcccgagtagctgggactacaggcacccgccaccacgcccggctaattttttgtatttttagtagagatggggtttcaccgtattagccaggatggtctcgatctcctgacctcatgatcggcctgcctcagaatcccaaagtgctgagattacaggtgtgagccaccacgcccggccaaatgctttttcaacttacgatattttctttttttttttttttttgagacagagtcttgccctgttggccaggctggtctcggctccctgcaacctccgtctcctgggctcaagcaattctcctgcctcagcctctcaagttgctgggattacaggcatgtgccaccatgcccagctaatttttgtatttttaagtagagacggggtttcaacatgttggccaagctggtctcgatctcctgacctctggcagtcctcccacctcagcctcccaaagtgctgggattacaggcgcaagccactgtgcccggtcaacttatgatattttcaacttacagtgggtttgtcaggacatagtcccatcctaaattgaggaacatctgtatactagacagggacttctctgaggtcagggaccctgttttcattctgtatccccagttcctgacaaaatcctagcatgtataacatcgcctacaacaagtttgttccaggaaagagtgtttcataataatgacacttgctactaggctttttagtggctggcagagtgctctcacaccactgttagttaatactcgtattcacccagtcaaatggatgttctccccatcctagaggtgtgcacccaacaattagagcaatcacaagagcacacacttcctaatgagaaagttccagaaggattatcctgaataccttgaaaggctcagattgcaaacttggctggcaggcatttccttcacctgctgggctgttgaccactgaatctcctgattttaggctccaagattatggcccatgccccccaggccgcacctcgttccttaccaggttcttcctaccccctcccccaggagattgctgcgatgattgacactgagtttgccaagcagacctccctggacgcagtggcccaggccgtcgtggaccgggtgaagcgcatccacagcgacaccttcgccagtggtggggagcgtgccaggttctgcccccggcacgaggacatgaccctgctagtgaggaactttggctacccgctgggcgaaatgagccagcccacaccgagcccagccccaggtacgtgtgctgtgcagacaggcagtgcctggggatgccatctgggggccagaggtgggtgcagagcccccgaggctgcttgaaacggagatggagtcaggaggcctggctctgagtggctctaattcaggttctctgatttttagcctctctgagctgagtgttgatttttgctcttttgtctgtaaaatgaggttaataccacctgccccggcaacctcccagaacctgagtgccccagcaagcaattcacagagccctgaagccacataatagagatgatggccaccactgattgagtgcctcccttgtgccaggcacacagcctgccttattcccttcagtcctcatgggcaaccctaaagacaggtggtacccctgttttccagagagggaaactgaggctgaagaatgaagggacctggaagagattaggcatgtggacagatggtcaggccccaaggcctgtctgtccctgggctgcactggagcagggcagggagaaggacgttttgctttttacctatgtcattcttcaaccaagttctcaggaaaagaggtggctgctctttcccgtgctccccccagtgctgctcagcactaagaccttcggttcctgagggctgcatttctttttctttgctttaaacaagcaaatcttagataaagctcaggcatccacagacagatttgttctcccatggacaccagggttattggagtttctctggcctgtttttattgcaaccatatttttattgggtcagcctcaactgggagcaaacttatcctctgaattaaagcatccatgggaagccaggcagtaaccctttccttgaggcaactcgagcaccagcaggatttactgctataaggagttctcagcccggcctggaagagtctctgacaagggacactcctcctgagctgtcccaaggggcagggggccccactgggcttggggagccaggcatggccgccacccacactcagccctcaggcaccaccccatcaggccatggagcagctatgcccctgctaccctgggtttctcctcagctgctgcctgaggcccccactctcttcctcccaaagctgcaggaggacgagtgtaccctgtgtctgtgccatactccagcgcccagagcaccagcaagaccagcgtgaccctctcccttgtcatgccctcccagggccagatggtcaacggggctcacagtgcttccaccctggacgaagccacccccaccctcaccaagtaagtcccttccccactgagccacccccagccctgtcacccccgtgtgtgtcctgtggcaccaggacagaaatggccatggggccaaggcttgtggatgagatgccctggggtctggaattccccagctccgtgcctggtgagggaggtctccctagaaactgaggcaggtgcgatttttggtcaggtggctgatggtcccagcctacttctcgtattttcttgtgggcccatctgctggtttcattcagtggaaggtttcctttcattcctcacctcggtgtgatgtggggtggcttcctgtggtgtccttgcttgaggacattgtctggcctgtactggcttgtcagagcccatgctttctggctaatgtgcttgattttagctttgaagtgagttctctggttttggggcagggggcgaggtagaggcaacagcctgagggggatgcggccaggccccctccagccgcagacctgcctgacaggtctggagtacaccccacccccttcacttccttagaatgtgcactccccacaccaggggacccagatctggtttccacattccagccctgcatggaatgatagagatgccacacccagcccactctgaggatggagtgcgcaggatgtggccaattagaaaggccctggaggggggtgggcggcctgcatgcctctgccccatcagggggccttcctttccctctgcctctgggttgtggatgctgcgactgctgccacggggctagaaaggcctgccaggccgagcaagctccttgggcatcctgagtgcagtaggggtggcctctccagcacccctgccgggctgcctggaggagtcctccagctgtgtccacaaagcagagtgtgagcgctgtggccctagacaaggcaggacaacccactctcctcccctgcctgtgttcctcactcctttcagcgtctgagccatagttggtcccaccatgggctggccctgtgctggtgctgggcagcgctaacaggcagttccagctgtgatagaaggtgggtgcccgtccccacccagctgatgagaagagattgaaggggaggggggcgaaggaaggttttctagaagaagacaccttgcccgccctgctgagtaggtcctgggttgggacgggtttagagagatggtaatggacagtcggtggttcagcttcacccgaggaacttcctgtgatgacgggagtgctcgcgtgggtgctgtcctgtcacggcgtctctagccacttgtggctattagacgcttgaactgagtgttccattttctttccatttttttgagacggagtttcactcttgttgcccaggctggagtgcaatggcaaaatcttggcccactgcaacctctgcctcccaggttcaaccaattctcctgcctcaacctcccgagcagctgggattacaggcacacgccaccatgcctgggtaaattttttttgtatttttagtagagatggggtttcaccgtgttggccaggctgatctcgaactcctgacctcaggtgatccacccgtcttggcctcccaaagtgctgggattacaggcatgagccaccgcgcccagccccattttctttacctttagttcatttaagtagccacatgcatctggtgctttaaaatttgactttttatctgttcctaagatcatctggctgggccagctcctatggtcacctctgccagaaaggcctgtggcccaagaggctggtagaggcaggggccattctgtccccactctgccccaggccccttgacccggctgcttctgattgactccctcccctgttgtcctgcagccaaagcccgaccttaaccctgcagtccaccaacacgcacacgcagagcagcagctccagctctgacggaggcctcttccgctcccggcccgcccactcgctcccgcctggcgaggacggtcgtgttgagccctatgtggactttgctgagttttaccgcctctggagcgtggaccatggcgagcagagcgtggtgacagcaccgtagggcagccggagaatgcagcccaagcagggcctggcatggggcaggacagggtccagccttttcctaacatctgcctgtgccacaacggccagcaggtgccccatcctctgcccacagcagactctgtcccatggctctccgggcagtagagtgtgtgagtgcagactggacctgtggttcataccttgtcaccacccgggaagctgaaggccacttcctcccagatggcctcagccaggaccatcgccctttctcagagcagagggccaggtatagaaaccgcagtgggcctgcaagccgcccgagcctccccagcagcctcctacagagcaggaagaggcgccctgtgaaccctgagtgttgcaggcccagcagaccctgctgtcccaagcccacccctcctcccaccatcacctccctcacctcgggacagtagccctccacttctccagcctctcagccctgtgctcctgcatccagagtggaacccaggctggtgtccgcatctgtccctgggccccacccctggacctgccttggttgtgtcatctgttgtaaacgttcaggaggaccagggcagcatctggggcctgggatggccacagaaggggcaggccaggtggaaaggagccagggggaagtggtctaagagacctggaactgccagaggatggcggcctgggcttccccagagccaggcgtgcgggagaggtgaggactggccccggtgggctgaggcaggggccgctgtcgtcaggcctgagccagggtgagctggtgcctgccttgcattttccttctggtgctgtgaagaccataggctggcaggcagctgagatgaactgtctttaccactgatgaggggcctctgccggctgagggtagcaagcaggggttgtgagtcaggctgggggacttgtttgaaagaaagaggagtggaaaatggttccaggagggaagaggttctttgagacacagtaccctgggaggcataggagaagggtcgggccagcccagcccagggcctgagttagactatttcccacatgttctctgccttcagtggggagggggtgccaccagggctgtcggccaggattgccactcctgtttcagaggaagcaggccgagagacttgcaccttggccaagccacacaatcagtggggcagccagagctcagacctgagccattttgtcagtatccaggaccccccggattctccacgccctccccatctcccagtctccctgccccccatgccccagaccggcccaccagggactagccgctgtcgcacagcctctggggtgcttggtctctgcgaagtcaaaggcctgacagctctgtggcctgggaatccattttcctgcggcagagcagggcctggtgtggaaccagggagctgtgggaagccacagcagaaatggaagaaaaacaggtctcagcccagggtcctcgctcactccctcactccccactttgaagccatctctgttctgcaggtgagaggatttaaagtcagtcacaaaggcttgggaacaaaaggaattctcttccaagaatgcctctgtggtgctgtttggtctctagaaacagggtcacttttttaatgtagtaaagaagtaataaatggtggcattacacattgtgatattaa

SEQ ID NO: 3350 - DNA, 684 bp, Homo sapiens
ctggacttttcttcatgtgtcatgaagtttcctcctgattttcagagacccttccaggcctgcaagcgatttgacagccatccctcagtgccaactaaacctcctgggcagcctgaccccagggtaggaaggaagcgcctacaccaaggggccctctgggagctgagatcatcctggggttttgtcgcctggtctgacttgtgcactgggatcttctcgtgccaggccaggccccgccccctccccgggactgggcagaccccctccctcatgcatctgtgtccactgaggcttccctcacctagaatggcccatccttcaggacccagctcactctcatcttctttccagggacttatcccccaaggctgtcctctgttctggtgagctcagggctcttggaacttggtctgcagtgactctggggttcctggttaggacccatgttctctaggtcccagcaccctgcacggggcagtgtttgtgacactgggcccagctattctgagagaaggactccaaccttccatcaggtgtggcccgagatgtgggtggccctgggcatggggcatggatgcattgtgactttcatgggcctcttctgcaaaaaaaaaattaaaattatactttatgactattggtagaaagataaatatattaatacattaaaatttctctttgagt

SEQ ID NO: 3351 - DNA, 13808 bp, Homo sapiens
ggtcccctcagctcggcctatgaccacgtgcgcaagactcgcgtggccatcaagaagatcagccccttcgaacatcagacctactgccagcgcacgctccgggagatccagatcctgctgcgcttccgccatgagaatgtcatcggcatccgagacattctgcgggcgtccaccctggaagccatgagagatgtgtatccttcaccttggccagtcggctggtcaggcacggcctcgcagctgggctggggacccgttgcttggtttctgtttccatcttacccaccaccctccaaaacaaacccagtaaaataaactttcctgcagaggggaagccacagtgtaacaggacttggagacctctgatgaacccaggcctgcagcggcccaggcagtatggcctcgagcaagtgggttctctgctctgtgccccagggggaagggctaggcaggatggtctctatgggagtggtgtcttctgacgtcggcagttctgagacatgacctggcctctgcccacagtcacttcttgctaaggaatggatgattctttcctctctttcctccttgcccagaccggaagggagacagggagaaagaaaactgtcagctgggcgtggtggctcacgcctgtaatcccagcactttgggaggctgaggtgggagattacctgaggtcagtagttggagaccagcctggccaacatggttaaaccccatctctactaaaaatacaaaaaaattagcggggcatggtggtgcaagcctgtaatcccagctacttgggaggcagaggtaggagaatcgcttgaacccaggagctggaggttgcagtgagccaagatcgtgccactgcactccagcctgggtgacagagcgagactctgtctcaaaactaaacaaaaacaaaaaactgcctttcttgagggcctgctgtgtgtcaggtactatacatgcccaatgcttttttttttctattacacctcccaactaccctatgagatgggcttttcagcttcatttcaaagatgaggggtggagtgcaatggctcacatctgtagtcccaacactttgggaggctaagaccagaggatcactggaggccaggagttcaagaccagcctgggcagcatagtgagaccccacctctacaaaaaatttaaaaattatccaggtttggtggtacacgactatagtcccagctacttgggaggctgaggcaggaggatggcttgagcttaggagttcgaggctgcagtgagctatgattgtgctactgcactctagcctgggggacagagcgtgaccctgtcaaaaaaaaaaaaaaaaaaaaagatgaggaagctaaggctcagaaaacctaaaatcaagtgtttctgttgctgtctcctcctctcctcccccagatgggaacttgtccttcttcttaggacttctcactcagagccacaccctaatcacctgtggacttgcaccttgcccagggagggacagcctagccttggctgtcctcccccaatactgctttcctagtttgctgtccacttcctgtctggctctccttagcaacttatgacacctgtcacttcttccctgccccacccacccactctcagtcccagccctccacccaagagtggggatttgtactgaggtgtctgcaacccccaccacaaactgtggacaggaaatctccgtgctcacccccagctcgctgtgtgatctgaagcaagtcactgcgtctcgctgggcctccccagccctaaaacagcagggctggtccacatattctctgaagaccctttcaaggctgattcttgttttctttgttttttgtttgtttgtttttagatggagtctccctctgttgcccaggctagagtgcagtggctcaatctcagctcacggcaacctccacctcccaggttcaagctattctcctgcctcagccttccaagtagctgggactacaggcgcctgccaccacgcccggctaatttttgtattttcagtagatgcggggtttcgccctgttcaccaggctggcgtcaaactcctgacctcaggtcatcaacccaccttggcctcctgaagagctgggattacaggcatgagccaccatgcctggtctcaaggcagattctaaaagacagccctgacttatttttctagagacaagccaaacagcatttgtggatttatttatttatttacgcataagcttttttgtatcttcaaatagaaaaagacattttactcctccatcttctgaggtatggccaagcactctcctttgagtgggagtgtgctgttgggagtgtctcctcatttttcttgcacaaaccattcccataaggcaggcatttatttttaagcaaacatttattgcatgccagatggtgttcatacattatctcatttaactccctcaacagccatgtgactcaggcattcatattagtaataatagttcatgtttgcctagcactcacaacttgccaagcactgggctgacagctttacatgcgccatctcatctagtcttcacaaccaccctcaaaagaaccattatttcatggcttgcacctgtaatttccagcactttgggaggccgaggtggaaggaacacttgaacccatgagttcaagacctgcctgggcaacagagcaagagcccatctccacaaaaagaaaacaaacaaacaaacaaaaaaacattatttcccctacataccagatgagaaagttgaggcacagacaggttgagatcctaaagccagtgagtagtagagaggagatttcagacatccatgggttaactccagagttgctgctctttttgtaggtttttttttttttttaatttatttatttttgagacagagtctcactctgtcatccgggctgcagtgcagtgacacaatcttggctcactgcaacatctgcctcctgggttcaagtgattctcgtgctgcagcctcctgagtagctgggattacaggcacatgccgccgtgcccagttaattttgctatttttagtagagacagggttttgccatgttgcccaggctggtggtctcaaactcctggcctcaagcagtcctcccgcctcagcctcccaaagtgctgggattacaggtgtgagccaccactcctggcccaagttgctgctcttaactgtgaagttctcctgcctcccacagtttattattatccccgtttccccggtagggaaactgaggcctcagaaatgaagccccttgctcaggatcagcaactgtgatgcaacagaggctcagagccctgccgctgggtaatggcagcagcttccccagctggtggtgcaggttggcagatctattgagtcccaggggccctggctggaggaggtgtgcagcctcgccttcagagcctgttttccttaaccaagtgcctcccactgccccctgcctgggggggtctgcggaaccatcctcagctacattgtgcaggacctgatggagactgacctgtacaagttgctgaaaagccagcagctgagcaatgaccatatctgctacttcctctaccagatcctgcggggcctcaagtacatccactccgccaacgtgctccaccgagatctaaagccctccaacctgctcatcaacaccacctgcgaccttaaggtcagagggttgggcacctgtcccctcctcccccagggtctggggcttccagtgaccagtagaagaagccttgggcaggagaacattgcaagcaaagggaacagtggaggcaaagacaagggggcgtgactgcttaggctgcagaggccttgagcgccgagcttagcagctaggtctgattccagatttgtgatttcggcctggcccggattgccgatcctgagcatgaccacaccggcttcctgacggagtatgtggctacgcgctggtaccgggccccagagatcatgctgaactccaaggtaggaggggctgcccactcctgaaaggaacggaccagttcccaggaagccctggagctacctctgagccagacactgacccccatgacacaggaattctaccctctgggccttgggctctgcaaggaagctgagcattgagccctccaggcctctgccttctgcctggtgttggatctaacttggaggtggtggcctggcgcagacaacaggaccctgttgaggctggcccaggagctcaccacttcctcctctcccccagggctataccaagtccatcgacatctggtctgtgggctgcattctggctgagatgctctctaaccggcccatcttccctggcaagcactacctggatcagctcaaccacattctgggtgagggaggcccggctggctgagttggggatgattagcttttccgaggtgagatttctcgagagtccaagtcagggataccaccacgtgtggggtgcctccagcatctcatggtatctcaatgaggtatagatattatccccattggatagatgggaaaagcaaggctaagtcccacacctgaggaggcaccagacctaggatttgagcctcggtctgcctgaacccagcccccttgctctgcaccaccatgctaatgactaggaggtgactgagggattggcatgggttgctgggctggggggtcttgttcttgccttgttgcctattctgttcccagaaagaaagaggtgatcatttaccaagtcacctccttatccacaggcatcctgggctccccatcccaggaggacctgaattgtatcatcaacatgaaggcccgaaactacctacagtctctgccctccaagaccaaggtggcttgggccaagcttttccccaagtcagactccaaaggttcgagagacatgagggtgggtgtgggataaaccttgggtgtcgtggagggtgtgtgagcccagcagccgctggaggagacaggcaaagcaatgcttctcggagctcctccagtcttccctgtgacccctgactcctgcccttccatagcccttgacctgctggaccggatgttaacctttaaccccaataaacggatcacagtggaggaagcgctggctcacccctacctggagcagtactatgacccgacggatgaggtgggccagtccccagcagcagtggggctgggggcaggggagcaggggggcacgtaggcatcccccatgccaggcctgagccttgctgtctctaccaccccagccagtggccgaggagcccttcaccttcgccatggagctggatgacctacctaaggagcggctgaaggagctcatcttccaggagacagcacgcttccagcccggagtgctggaggccccctagcccagacagacatctctgcaccctggggcctggtgagtgtctccatggcccacacatggacaccctgatactaaatatctatatctgtatatctatatctatatctatctgtacatgcctccatacagcagcaagcttaccccacacccatggtcaatgtgtctggtgacaacagaagtgcccagggggctgggtgtggtggctcatgcctggaatcccagcactttgggagactgagactgagaggagtggatcacctgagggtcaggagtttgagaccagcctggcctgcatggtgaaatcccatctatactaaaaatacaaaaattagccgggcacagtgggtcactctggtaatcccagcactttgggaggctgaggcaagtggatcacctgaggtcaggagtccgagaccagcctgcctggccaacgtggtgaaaccctgtctctactaaaaatacaaaaattagccgggcacgtaggcatgcgcttctagtcccagctactcaggaggctgtggtgggaggactgcttgaacctgggaggcggaggttgcaccactgtactccagcctgggcaacagtgagactctctcaaaaaaaaaaaaaaaagggctgggcacagtggctcatgcctgtaatcccagcactttgggaggccgaggtgggtggatcacaaggtcaagagttgagaccagcctggccaacatggtgaaacccggtctctactgtaaagaatacaaaaatgagctgggtgtggtggcacatgcctataatcccagctactcaggaggctgaggcaggagaattgcttgaacccaggaggcagaggttgcagtgagccgagatcgcaccactgcactccagcctggactacagagcaagactccatctcaaaaaaaaaaaaaaaaatgcccaaggctgcccagactggtggcccaccgagtcctccagccccaaatgtctctgcctgtcaacaccttgcatcctccagccccacaagccattctaatctccttctaggaacagaactggcaaagaggcaagaggtcactgagggcctctgtcacccaggtgaggacctgagccaagcttcagctctgggtgtggcagaagcaggtggggccatgattgctttgggaggggcccagcagcgcccagcctgacccagattgccaggcctcctcacacctgctgccagatcagcagttcacatagctgtggggaccccactggcctgcccccacccacgctgcctccttgcctcctccggtctcttcctgtcttcagccaggtgtggcctgatagaaagaaggcatgcgcacctgggctcaaactccagctgtgccacttagtaagtgctgtgtgatattgggcaaggcacctcacctctcggcgcctcagtttccggagtcaatctatttatctttttttttggttttgtttttttgagacagtgtctcgctctgtcacccaggctggaatgcagtggtgcaatcatagctcactgcagcctcaaaactcctgggtgcaagggatcctcccagctagctggacgagccattgcaaccggctaattttttttttttttttttgtggagctggggtcttgctatgttgcccaggccagtctcaaactcctgggctcaagcgatccaccacctcagcttctcaaagtgctgggattataggcgtgagccactgtgcccggccgagacagttctaataatgaaagcataaagccctaagcattgttctaagaggtttacatgtattaattcctttaatcttacagcagtacctcaagctaggtactattattatctccatttacagataaggaaactgagacccagcctatccagctgtgagggtgaaatgagagatgttgaggtcagggctccagtgggtctgcccggggggtgctaacgactcctcttctgcctgcttctctctttaggacctgcctcctgcctgcccctctcccgccagactgttagaaaatggacactgtgcccagcccggaccttggcagcccaggccggggtggagcatgggcctggccacctctctcctttgctgaggcctccagcttcaggcaggccaaggccttctcctccccacccgccctccccacggggcctcgggacctcaggtggccccagttcaatctcccgctgctgctgctgcgcccttaccttccccagcgtcccagtctctggcagttctggaatggaagggttctggctgccccaacctgctgaagggcagaggtggagggtggggggcgctgagtagggactcagggccatgcctgcccccctcatctcattcaaaccccaccctagtttccctgaaggaacattccttagtctcaagggctagcatccctgaggagccaggccgggccgaatcccctccctgtcaaagctgtcacttcgcgtgccctcgctgcttctgtgtgtggtgagcagaagtggagctggggggcgtggagagcccggcgcccctgccacctccctgacccgtctaatatataaatatagagatgtgtctatggctgaccctggctctgtctgtgttcgcgacgcccccgccctgccccgtgcggctctgaggacagacttgacttgggctttcaggggcctggtgcccttcactcccagctgcccagggctggggacggggctctggagagctccagactcctagaaagaagggggtcagttttccccttagtcactgtcctgtcctctcgctaatggcttcctgtctaactggctgggggtgattcggggtgactcaggagcaccctacacacccctggatcctctgaaatggcaaggggtaggcatgttggatgcgctggctacaagtaccagtgagagggagaggtcctgacagtcctgggtggtttttactcccctcatgtagcccaggacggggctgctgggggctgggaagggcctggggatatgagagccagggctacttgcctcacctcctgacactaccccagcttcagccgaaccctgcagcctggctccaagccagcccagcggcaggctcagcaggtcccaggggcgtggcagtggccagtagtagagccggcccacactggctaggcaggcagcacagtcccgcggacggctgagcgtgtggctgcaggagcttctgtgggagtacggtcatgagccttttgctgtactatgccctccctgccctgggcagctatgccatgctctccatcttcttcctgcgccggcctcatctgctgcacacgcccagggctcccaccttccgcatccgcctgggggcccaccgaggaggtgagccgggtaggggtgagaacaggtgccaaagtggacagcacagaggggtaggtccaagggggcatgctagaaacggggcagggaccaagagagaaggagagcgaagtggcagggcagggtgtggacgaggaagaagatgctggcgcagcctgggctggctggggaggtgaggccagagggaggatggagcccagagagggaatgtgggtgatgaggttgggccaggcccctagaccccaagccccagaggcccactccagtgccccccacaggatctggagagctgctggagaacaccatggaggccatggagaagtgagtgtatctgcccctgcccaggctgccatgtgagggtgtgcaggtcgtggactgcatcacagcaagggacgccattcacttcctagctgggtgactggcgccccctggaggtggcctgcacatcccgccacgaactccgctctcacattcccggccacctcccagccaccatgcccctcatcccagtcccctgcccctgccccccgctgaccttcacccccacagctccatggcccagcgctcggacctcctggagctcgactgtcagctgacacgggacagagtggtggtggtgtcacatgatgagaacctgtgccgccagtcgggcctaaacagggatgtgggcagcctggacttcgaggtgggccctgccctgacaccccaacccccaccctgagagtcaccatgcccaatgcgggcctctagtgacatccttcctgtcctccccaggacctgcccctctacaaggagaagctggaggtttacttctctccaggtgagagcaagggcttcgagccctgcctgggccatgcctgccttccttggacctccgccttggcttccctctgaccccttttcccacaccacccccaggccactttgctcacgggtcagaccggcgcatggttcgtctggaggacctgttccagaggtttccaaggacacccatgagcgtagagatcaaagggaagaacgaagagctcatccgtgaggtggtgctgcaggcagggctagggcggccaccgggggcgtgagagaggcctggctctcccttcacctccttctcctcctcccagatagcaggcttggtgagacgctatgaccgtaatgaaatcaccatctgggcctcggagaagagctcggtcatgaagaaatgcaaggctgccgtgagtccccccacccctcccccgtcctcttcctcctccaggggcccctcctccccagagctggagcccacccagcatggggacccgagctagaggggtctgggagagttcccagtggcgtggcggtggcaatgaaaagggtgtgaactcaggcctcgaacacagagccaagatgtgacttttgttttttttcttttttgaaacacagtctctctctgtcgcccaggctggagtgcggtggtgcgacctcggctcactgcaacctctgcctcctgggttcaagcgattctcatgcttcagcctcccgagtagctgggattacaggtgcacgccaccacgcccagctaatttttgtatttttagtagagatggggttttaccatgttagccaggctggtcttgaactcctgatctcaggtgatccacctgcctcagcctcccaaactgctgaggttacaggcgtgagccaccacacccagccccaagatgtgacttggatcctgcaggtagtagggcctctggaatgcccaccacggctcccctgcagctcatgcctcctctctgcttccccagagcagacagattctcatgcctctccttgcctccccagaaccccgagatgcccctgtccttcacaataagccgaggattctgggtgctgctttcctactacctggggctgctgcccttcatcccaatccctgagaagttcttcttctgcttcctgcccaacatcatcaacaggtaccagtggggggcggacctcagaaaaactccccactgcttagggtctccgtggagaaggagcccagatcttcccagctccccagctcccctcagagataacccccaaggtcttttaaggacagtggttcttacccagcattcatgaatactaagggaactgtgaacaccctgaaattctgtgcatatgtggagttttaggatagagaggtaatttatccatctcaggccatctagcatattttattgaatgtctactctgtcccaggtgcagttataatgtgtaaatgagaccagtgagggtggggagaggtccttggtgagcttacagtctggctggggagacattcgttcattaattatagcacggctgtctcagaccctcagcaggaaaaggccaagtcagtgttctgcaggaaggcaggggttaacaaagtaacagctggggaaaggatcaggaatttggatacttcgctggcacttaagcctagtccctccctttgctttacaattttttttttttttttgagacagtcttgctcgggctggaatgcagtggccagatcatgactcactgcgcctcgacctcctgggctcaggagatcctcctgcctcagcctcctaagtagctgggagtataggcgtgcaacactgcacctggctaattgttaaattatttgtagagacaaggtctcactatgttgaccaggctgctcttgaactcctcagctcaagcgagcctcccaccttggtctcccaaagtgctgggattacatacctgagcccctgggcccggtctccctttgctttctgacagcttctctgtggtagtcccagagctctctgctcccctctgttgtccagaaggaagtcccactcagcccccacaataccttgctacaaagagatcaatgatatttgtgtaccacctttttataccggattttttttgtgttttttgaggagtcttcccctgttgcccaggctgcagtgcagtggcgtgatctcggctcactgcaagctctgcctccctggttcacgccattctcctgcttcagcctcccgagtagctgggactacaggcgcccgccaccacacccggctaatttttttgtgtttttagtagagatggggtttcaccgtattagccaggatggtaatctgacctcatgatccgcctgcctcggcctcccaaagtgctgggattacaggcgtgacccactgcgcccggccttatacaagatttataaagtgttttaacatattttgggttgacttttaccttgcagcacccccaggaggtataagaatcatgactcccatggtaccctagagaatctgaggcccagagaggttctgtaatttgcccaaggacacacagctggaaatccagagcttaggttttccctgggtctgactccagagcctgccctaggacactgtcaagggtctctaaagtcacccctggagtgggataattaggggtcgtcccactaagtgctgtctggtctcaagaagctggccaatgggcacagtggctcacgaggttttttgtgggttttttgtttgtttgtttgtttttgagacggagttttgctctttttgcccaggctggagtgcaatggtgccatcttggctcaccgcaacctccgcctcccagattcaagcgattctcctgcttcagcctcccaagtagctggcattacaggcatgcaccaccatcctggctaattttgtatttttagtagacacagggtttctccatgttggtcagggtggtcttgaactccggacctcaggtgatccacccgcctcggcctcccaaagtgttgggattacaggcgtgaaccaccgcgcccggccattgttttttgtttttgagaaggagtctcactctgtggcccaggctggagtgcagtagtgcgatcttggctcactgaaacctccgcctcctgggttcaagcaattctcctgcctcagcctcccaagtggctgggactacagggtctgccaccacgcccggctaatttttgtatttttagtagagacggcgtttcgccatgttggccacgctggtctcctcccacctcagactttcaaagtgctgcgattacaggtgtgagccaccacacttggctggctcgtgcttattatcctggcacttttgggaggctgaagcgggaggattgcttgagtccaggagttcaagaccagcctgggcaacatagtgagacatgtctctacaaaaattttttaatggccgggcacggtggctcacgcctgtaatcccagcactttgggaggccaaggcgggcggatcacaaagtcaggagatcgagaccatcctggctaacagggtgaaaccctgtctctactaaaaatacaaaaaattagcaggcgtggtggcgggcacctgtagtcccagctactcaagaggctgaggcaggagaatggtgtgaacccaggaggcggagcttgcagtgagctgtgatcgcaccacggcactccagcctgggcgacagagcaagactctgtctcaaaaaaaaaaaaattaatttaaattaataataagataaatagataaataagaagctggccaggcccaaccaggagggcctgcagcctggatgtccagctttggaaccaagcgaggccctggcccagccccaccaccactctgctttgggtctggcaagtccctttcgttctctaaggcccagattccttatctggtgaatggtgactggagggccacacccttgaagcgtggtggtcagagtaggctctctgaacaatgggtgaattgttcactggggcaactacaaaggttattctgggggattctggggggtgggagggcagcgctaccctagttggcgggggcactaccagcccaccccacctctgggacaggggagaccctaggagctaacccccacttccttctctctgcaggacctatttcccattttcctgctcttgcctgaaccagttattggctgtggtttcgaaatggtgaggtgggcaagatggctgggtggcgtgtccccatagagacctactgctgcccttctcccaggtcccctctcatcatcacctcccacgtccccaccccacccccaggctgatcatgaggaagagtctgatccgacacttggaggagcgaggggtgcaggtg

SEQ ID NO: 3352 - DNA, 102 bp, Homo sapiens
aggctggagtgcagtggtgcaatctcggctcactgcaacctccacctcccgggttcaagcgattctcctgcttcagcctccccagtagctgggactacaggt

SEQ ID NO: 3353 - DNA, 377 bp, Homo sapiens
accccaggggcccagagagagatgaggcggccaggagtgccacctgcatgttttgggaggggtctgtgagtgcccccggccccaccgtgtgctctgggcctctatccctctgggacagccccgctgcccggatccctcaccctgggaccctcccctgccctgtccattctctcctgcccctcccctggctgccaccttcccagtatttgccccatggtgtgtccccagcatctgcacccccggacctgtcttgggttaaggagcctttcctgggaatgggggcgaagggttcagggccagtagaatggaaggggattgaggagaggggaagtcagtgagcggtcagtctcttcctctgtttgtaaagtcaccgaagg

SEQ ID NO: 3354 - DNA, 16747 bp, Homo sapiens
  SITE (14037): n equals a,t,g, or c
  SITE (14038): n equals a,t,g, or c
  SITE (14039): n equals a,t,g, or c
  SITE (14040): n equals a,t,g, or c
  SITE (14041): n equals a,t,g, or c
  SITE (14042): n equals a,t,g, or c
  SITE (14043): n equals a,t,g, or c
  SITE (14044): n equals a,t,g, or c
  SITE (14045): n equals a,t,g, or c
  SITE (14046): n equals a,t,g, or c
  SITE (14047): n equals a,t,g, or c
  SITE (14048): n equals a,t,g, or c
  SITE (14049): n equals a,t,g, or c
  SITE (14050): n equals a,t,g, or c
  SITE (14051): n equals a,t,g, or c
  SITE (14052): n equals a,t,g, or c
  SITE (14053): n equals a,t,g, or c
  SITE (14054): n equals a,t,g, or c
  SITE (14055): n equals a,t,g, or c
  SITE (14056): n equals a,t,g, or c
  SITE (14057): n equals a,t,g, or c
  SITE (14058): n equals a,t,g, or c
  SITE (14059): n equals a,t,g, or c
  SITE (14060): n equals a,t,g, or c
  SITE (14061): n equals a,t,g, or c
  SITE (14062): n equals a,t,g, or c
  SITE (14063): n equals a,t,g, or c
  SITE (14064): n equals a,t,g, or c
  SITE (14065): n equals a,t,g, or c
  SITE (14066): n equals a,t,g, or c
  SITE (14067): n equals a,t,g, or c
  SITE (14068): n equals a,t,g, or c
  SITE (14069): n equals a,t,g, or c
  SITE (14070): n equals a,t,g, or c
  SITE (14071): n equals a,t,g, or c
  SITE (14072): n equals a,t,g, or c
  SITE (14073): n equals a,t,g, or c
  SITE (14074): n equals a,t,g, or c
  SITE (14075): n equals a,t,g, or c
  SITE (14076): n equals a,t,g, or c
  SITE (14077): n equals a,t,g, or c
  SITE (14078): n equals a,t,g, or c
  SITE (14079): n equals a,t,g, or c
  SITE (14080): n equals a,t,g, or c
  SITE (14081): n equals a,t,g, or c
  SITE (14082): n equals a,t,g, or c
  SITE (14083): n equals a,t,g, or c
  SITE (14084): n equals a,t,g, or c
  SITE (14085): n equals a,t,g, or c
  SITE (14086): n equals a,t,g, or c
  SITE (14087): n equals a,t,g, or c
  SITE (14088): n equals a,t,g, or c
  SITE (14089): n equals a,t,g, or c
  SITE (14090): n equals a,t,g, or c
  SITE (14091): n equals a,t,g, or c
  SITE (14092): n equals a,t,g, or c
  SITE (14093): n equals a,t,g, or c
  SITE (14094): n equals a,t,g, or c
  SITE (14095): n equals a,t,g, or c
  SITE (14096): n equals a,t,g, or c
  SITE (14097): n equals a,t,g, or c
  SITE (14098): n equals a,t,g, or c
  SITE (14099): n equals a,t,g, or c
  SITE (14100): n equals a,t,g, or c
  SITE (14101): n equals a,t,g, or c
  SITE (14102): n equals a,t,g, or c
  SITE (14103): n equals a,t,g, or c
  SITE (14104): n equals a,t,g, or c
  SITE (14105): n equals a,t,g, or c
  SITE (14106): n equals a,t,g, or c
  SITE (14107): n equals a,t,g, or c
  SITE (14108): n equals a,t,g, or c
  SITE (14109): n equals a,t,g, or c
  SITE (14110): n equals a,t,g, or c
  SITE (14111): n equals a,t,g, or c
  SITE (14112): n equals a,t,g, or c
  SITE (14113): n equals a,t,g, or c
  SITE (14114): n equals a,t,g, or c
  SITE (14115): n equals a,t,g, or c
  SITE (14116): n equals a,t,g, or c
  SITE (14117): n equals a,t,g, or c
  SITE (14118): n equals a,t,g, or c
  SITE (14119): n equals a,t,g, or c
  SITE (14120): n equals a,t,g, or c
  SITE (14121): n equals a,t,g, or c
  SITE (14122): n equals a,t,g, or c
  SITE (14123): n equals a,t,g, or c
  SITE (14124): n equals a,t,g, or c
  SITE (14125): n equals a,t,g, or c
  SITE (14126): n equals a,t,g, or c
  SITE (14127): n equals a,t,g, or c
  SITE (14128): n equals a,t,g, or c
  SITE (14129): n equals a,t,g, or c
  SITE (14130): n equals a,t,g, or c
  SITE (14131): n equals a,t,g, or c
  SITE (14132): n equals a,t,g, or c
  SITE (14133): n equals a,t,g, or c
  SITE (14134): n equals a,t,g, or c
  SITE (14135): n equals a,t,g, or c
  SITE (14136): n equals a,t,g, or c
  SITE (14137): n equals a,t,g, or c
  SITE (14138): n equals a,t,g, or c
  SITE (14139): n equals a,t,g, or c
  SITE (14140): n equals a,t,g, or c
  SITE (14141): n equals a,t,g, or c
  SITE (14142): n equals a,t,g, or c
  SITE (14143): n equals a,t,g, or c
  SITE (14144): n equals a,t,g, or c
  SITE (14145): n equals a,t,g, or c
  SITE (14146): n equals a,t,g, or c
  SITE (14147): n equals a,t,g, or c
  SITE (14148): n equals a,t,g, or c
  SITE (14149): n equals a,t,g, or c
  SITE (14150): n equals a,t,g, or c
  SITE (14151): n equals a,t,g, or c
  SITE (14152): n equals a,t,g, or c
  SITE (14153): n equals a,t,g, or c
  SITE (14154): n equals a,t,g, or c
  SITE (14155): n equals a,t,g, or c
  SITE (14156): n equals a,t,g, or c
  SITE (14157): n equals a,t,g, or c
  SITE (14158): n equals a,t,g, or c
  SITE (14159): n equals a,t,g, or c
  SITE (14160): n equals a,t,g, or c
  SITE (14161): n equals a,t,g, or c
  SITE (14162): n equals a,t,g, or c
  SITE (14163): n equals a,t,g, or c
  SITE (14164): n equals a,t,g, or c
  SITE (14165): n equals a,t,g, or c
  SITE (14166): n equals a,t,g, or c
  SITE (14167): n equals a,t,g, or c
  SITE (14168): n equals a,t,g, or c
  SITE (14169): n equals a,t,g, or c
  SITE (14170): n equals a,t,g, or c
  SITE (14171): n equals a,t,g, or c
  SITE (14172): n equals a,t,g, or c
  SITE (14173): n equals a,t,g, or c
  SITE (14174): n equals a,t,g, or c
  SITE (14175): n equals a,t,g, or c
  SITE (14176): n equals a,t,g, or c
  SITE (14177): n equals a,t,g, or c
  SITE (14178): n equals a,t,g, or c
  SITE (14179): n equals a,t,g, or c
  SITE (14180): n equals a,t,g, or c
  SITE (14181): n equals a,t,g, or c
  SITE (14182): n equals a,t,g, or c
  SITE (14183): n equals a,t,g, or c
  SITE (14184): n equals a,t,g, or c
  SITE (14185): n equals a,t,g, or c
  SITE (14186): n equals a,t,g, or c
  SITE (14187): n equals a,t,g, or c
  SITE (14188): n equals a,t,g, or c
  SITE (14189): n equals a,t,g, or c
  SITE (14190): n equals a,t,g, or c
  SITE (14191): n equals a,t,g, or c
  SITE (14192): n equals a,t,g, or c
  SITE (14193): n equals a,t,g, or c
  SITE (14194): n equals a,t,g, or c
  SITE (14195): n equals a,t,g, or c
  SITE (14196): n equals a,t,g, or c
  SITE (14197): n equals a,t,g, or c
  SITE (14198): n equals a,t,g, or c
  SITE (14199): n equals a,t,g, or c
  SITE (14200): n equals a,t,g, or c
  SITE (14201): n equals a,t,g, or c
  SITE (14202): n equals a,t,g, or c
  SITE (14203): n equals a,t,g, or c
  SITE (14204): n equals a,t,g, or c
  SITE (14205): n equals a,t,g, or c
  SITE (14206): n equals a,t,g, or c
  SITE (14207): n equals a,t,g, or c
  SITE (14208): n equals a,t,g, or c
  SITE (14209): n equals a,t,g, or c
  SITE (14210): n equals a,t,g, or c
  SITE (14211): n equals a,t,g, or c
  SITE (14212): n equals a,t,g, or c
  SITE (14213): n equals a,t,g, or c
  SITE (14214): n equals a,t,g, or c
  SITE (14215): n equals a,t,g, or c
  SITE (14216): n equals a,t,g, or c
  SITE (14217): n equals a,t,g, or c
  SITE (14218): n equals a,t,g, or c
  SITE (14219): n equals a,t,g, or c
  SITE (14220): n equals a,t,g, or c
  SITE (14221): n equals a,t,g, or c
  SITE (14222): n equals a,t,g, or c
  SITE (14223): n equals a,t,g, or c
  SITE (14224): n equals a,t,g, or c
  SITE (14225): n equals a,t,g, or c
  SITE (14226): n equals a,t,g, or c
  SITE (14227): n equals a,t,g, or c
  SITE (14228): n equals a,t,g, or c
  SITE (14229): n equals a,t,g, or c
  SITE (14230): n equals a,t,g, or c
  SITE (14231): n equals a,t,g, or c
  SITE (14232): n equals a,t,g, or c
  SITE (14233): n equals a,t,g, or c
  SITE (14234): n equals a,t,g, or c
  SITE (14235): n equals a,t,g, or c
  SITE (14236): n equals a,t,g, or c
  SITE (14237): n equals a,t,g, or c
  SITE (14238): n equals a,t,g, or c
  SITE (14239): n equals a,t,g, or c
  SITE (14240): n equals a,t,g, or c
  SITE (14241): n equals a,t,g, or c
  SITE (14242): n equals a,t,g, or c
  SITE (14243): n equals a,t,g, or c
  SITE (14244): n equals a,t,g, or c
  SITE (14245): n equals a,t,g, or c
  SITE (14246): n equals a,t,g, or c
  SITE (14247): n equals a,t,g, or c
  SITE (14248): n equals a,t,g, or c
  SITE (14249): n equals a,t,g, or c
  SITE (14250): n equals a,t,g, or c
  SITE (14251): n equals a,t,g, or c
  SITE (14252): n equals a,t,g, or c
  SITE (14253): n equals a,t,g, or c
  SITE (14254): n equals a,t,g, or c
  SITE (14255): n equals a,t,g, or c
  SITE (14256): n equals a,t,g, or c
  SITE (14257): n equals a,t,g, or c
  SITE (14258): n equals a,t,g, or c
  SITE (14259): n equals a,t,g, or c
  SITE (14260): n equals a,t,g, or c
  SITE (14261): n equals a,t,g, or c
  SITE (14262): n equals a,t,g, or c
  SITE (14263): n equals a,t,g, or c
  SITE (14264): n equals a,t,g, or c
  SITE (14265): n equals a,t,g, or c
  SITE (14266): n equals a,t,g, or c
  SITE (14267): n equals a,t,g, or c
  SITE (14268): n equals a,t,g, or c
  SITE (14269): n equals a,t,g, or c
  SITE (14270): n equals a,t,g, or c
  SITE (14271): n equals a,t,g, or c
  SITE (14272): n equals a,t,g, or c
  SITE (14273): n equals a,t,g, or c
  SITE (14274): n equals a,t,g, or c
  SITE (14275): n equals a,t,g, or c
  SITE (14276): n equals a,t,g, or c
  SITE (14277): n equals a,t,g, or c
  SITE (14278): n equals a,t,g, or c
  SITE (14279): n equals a,t,g, or c
  SITE (14280): n equals a,t,g, or c
  SITE (14281): n equals a,t,g, or c
  SITE (14282): n equals a,t,g, or c
  SITE (14283): n equals a,t,g, or c
  SITE (14284): n equals a,t,g, or c
  SITE (14285): n equals a,t,g, or c
  SITE (14286): n equals a,t,g, or c
  SITE (14287): n equals a,t,g, or c
  SITE (14288): n equals a,t,g, or c
  SITE (14289): n equals a,t,g, or c
  SITE (14290): n equals a,t,g, or c
  SITE (14291): n equals a,t,g, or c
  SITE (14292): n equals a,t,g, or c
  SITE (14293): n equals a,t,g, or c
  SITE (14294): n equals a,t,g, or c
  SITE (14295): n equals a,t,g, or c
  SITE (14296): n equals a,t,g, or c
  SITE (14297): n equals a,t,g, or c
  SITE (14298): n equals a,t,g, or c
  SITE (14299): n equals a,t,g, or c
  SITE (14300): n equals a,t,g, or c
  SITE (14301): n equals a,t,g, or c
  SITE (14302): n equals a,t,g, or c
  SITE (14303): n equals a,t,g, or c
  SITE (14304): n equals a,t,g, or c
  SITE (14305): n equals a,t,g, or c
  SITE (14306): n equals a,t,g, or c
  SITE (14307): n equals a,t,g, or c
  SITE (14308): n equals a,t,g, or c
  SITE (14309): n equals a,t,g, or c
  SITE (14310): n equals a,t,g, or c
  SITE (14311): n equals a,t,g, or c
  SITE (14312): n equals a,t,g, or c
  SITE (14313): n equals a,t,g, or c
  SITE (14314): n equals a,t,g, or c
  SITE (14315): n equals a,t,g, or c
  SITE (14316): n equals a,t,g, or c
  SITE (14317): n equals a,t,g, or c
  SITE (14318): n equals a,t,g, or c
  SITE (14319): n equals a,t,g, or c
  SITE (14320): n equals a,t,g, or c
  SITE (14321): n equals a,t,g, or c
  SITE (14322): n equals a,t,g, or c
  SITE (14323): n equals a,t,g, or c
  SITE (14324): n equals a,t,g, or c
  SITE (14325): n equals a,t,g, or c
  SITE (14326): n equals a,t,g, or c
  SITE (14327): n equals a,t,g, or c
  SITE (14328): n equals a,t,g, or c
  SITE (14329): n equals a,t,g, or c
  SITE (14330): n equals a,t,g, or c
  SITE (14331): n equals a,t,g, or c
  SITE (14332): n equals a,t,g, or c
  SITE (14333): n equals a,t,g, or c
  SITE (14334): n equals a,t,g, or c
  SITE (14335): n equals a,t,g, or c
  SITE (14336): n equals a,t,g, or c
  SITE (14337): n equals a,t,g, or c
  SITE (14338): n equals a,t,g, or c
  SITE (14339): n equals a,t,g, or c
  SITE (14340): n equals a,t,g, or c
  SITE (14341): n equals a,t,g, or c
  SITE (14342): n equals a,t,g, or c
  SITE (14343): n equals a,t,g, or c
  SITE (14344): n equals a,t,g, or c
  SITE (14345): n equals a,t,g, or c
  SITE (14346): n equals a,t,g, or c
  SITE (14347): n equals a,t,g, or c
  SITE (14348): n equals a,t,g, or c
  SITE (14349): n equals a,t,g, or c
  SITE (14350): n equals a,t,g, or c
  SITE (14351): n equals a,t,g, or c
  SITE (14352): n equals a,t,g, or c
  SITE (14353): n equals a,t,g, or c
  SITE (14354): n equals a,t,g, or c
  SITE (14355): n equals a,t,g, or c
  SITE (14356): n equals a,t,g, or c
  SITE (14357): n equals a,t,g, or c
  SITE (14358): n equals a,t,g, or c
  SITE (14359): n equals a,t,g, or c
  SITE (14360): n equals a,t,g, or c
  SITE (14361): n equals a,t,g, or c
  SITE (14362): n equals a,t,g, or c
  SITE (14363): n equals a,t,g, or c
  SITE (14364): n equals a,t,g, or c
  SITE (14365): n equals a,t,g, or c
  SITE (14366): n equals a,t,g, or c
  SITE (14367): n equals a,t,g, or c
  SITE (14368): n equals a,t,g, or c
  SITE (14369): n equals a,t,g, or c
  SITE (14370): n equals a,t,g, or c
  SITE (14371): n equals a,t,g, or c
  SITE (14372): n equals a,t,g, or c
  SITE (14373): n equals a,t,g, or c
  SITE (14374): n equals a,t,g, or c
  SITE (14375): n equals a,t,g, or c
  SITE (14376): n equals a,t,g, or c
  SITE (14377): n equals a,t,g, or c
  SITE (14378): n equals a,t,g, or c
  SITE (14379): n equals a,t,g, or c
  SITE (14380): n equals a,t,g, or c
  SITE (14381): n equals a,t,g, or c
  SITE (14382): n equals a,t,g, or c
  SITE (14383): n equals a,t,g, or c
  SITE (14384): n equals a,t,g, or c
  SITE (14385): n equals a,t,g, or c
  SITE (14386): n equals a,t,g, or c
  SITE (14387): n equals a,t,g, or c
  SITE (14388): n equals a,t,g, or c
  SITE (14389): n equals a,t,g, or c
  SITE (14390): n equals a,t,g, or c
  SITE (14391): n equals a,t,g, or c
  SITE (14392): n equals a,t,g, or c
  SITE (14393): n equals a,t,g, or c
  SITE (14394): n equals a,t,g, or c
  SITE (14395): n equals a,t,g, or c
  SITE (14396): n equals a,t,g, or c
  SITE (14397): n equals a,t,g, or c
  SITE (14398): n equals a,t,g, or c
  SITE (14399): n equals a,t,g, or c
  SITE (14400): n equals a,t,g, or c
  SITE (14401): n equals a,t,g, or c
  SITE (14402): n equals a,t,g, or c
  SITE (14403): n equals a,t,g, or c
  SITE (14404): n equals a,t,g, or c
  SITE (14405): n equals a,t,g, or c
  SITE (14406): n equals a,t,g, or c
  SITE (14407): n equals a,t,g, or c
  SITE (14408): n equals a,t,g, or c
  SITE (14409): n equals a,t,g, or c
  SITE (14410): n equals a,t,g, or c
  SITE (14411): n equals a,t,g, or c
  SITE (14412): n equals a,t,g, or c
  SITE (14413): n equals a,t,g, or c
  SITE (14414): n equals a,t,g, or c
  SITE (14415): n equals a,t,g, or c
  SITE (14416): n equals a,t,g, or c
  SITE (14417): n equals a,t,g, or c
  SITE (14418): n equals a,t,g, or c
  SITE (14419): n equals a,t,g, or c
  SITE (14420): n equals a,t,g, or c
  SITE (14421): n equals a,t,g, or c
  SITE (14422): n equals a,t,g, or c
  SITE (14423): n equals a,t,g, or c
  SITE (14424): n equals a,t,g, or c
  SITE (14425): n equals a,t,g, or c
  SITE (14426): n equals a,t,g, or c
  SITE (14427): n equals a,t,g, or c
  SITE (14428): n equals a,t,g, or c
  SITE (14429): n equals a,t,g, or c
  SITE (14430): n equals a,t,g, or c
  SITE (14431): n equals a,t,g, or c
  SITE (14432): n equals a,t,g, or c
  SITE (14433): n equals a,t,g, or c
  SITE (14434): n equals a,t,g, or c
  SITE (14435): n equals a,t,g, or c
  SITE (14436): n equals a,t,g, or c
  SITE (14437): n equals a,t,g, or c
  SITE (14438): n equals a,t,g, or c
  SITE (14439): n equals a,t,g, or c
  SITE (14440): n equals a,t,g, or c
  SITE (14441): n equals a,t,g, or c
  SITE (14442): n equals a,t,g, or c
  SITE (14443): n equals a,t,g, or c
  SITE (14444): n equals a,t,g, or c
  SITE (14445): n equals a,t,g, or c
  SITE (14446): n equals a,t,g, or c
  SITE (14447): n equals a,t,g, or c
  SITE (14448): n equals a,t,g, or c
  SITE (14449): n equals a,t,g, or c
  SITE (14450): n equals a,t,g, or c
  SITE (14451): n equals a,t,g, or c
  SITE (14452): n equals a,t,g, or c
  SITE (14453): n equals a,t,g, or c
  SITE (14454): n equals a,t,g, or c
  SITE (14455): n equals a,t,g, or c
  SITE (14456): n equals a,t,g, or c
  SITE (14457): n equals a,t,g, or c
  SITE (14458): n equals a,t,g, or c
  SITE (14459): n equals a,t,g, or c
  SITE (14460): n equals a,t,g, or c
  SITE (14461): n equals a,t,g, or c
  SITE (14462): n equals a,t,g, or c
  SITE (14463): n equals a,t,g, or c
  SITE (14464): n equals a,t,g, or c
  SITE (14465): n equals a,t,g, or c
  SITE (14466): n equals a,t,g, or c
  SITE (14467): n equals a,t,g, or c
  SITE (14468): n equals a,t,g, or c
  SITE (14469): n equals a,t,g, or c
  SITE (14470): n equals a,t,g, or c
  SITE (14471): n equals a,t,g, or c
  SITE (14472): n equals a,t,g, or c
  SITE (14473): n equals a,t,g, or c
  SITE (14474): n equals a,t,g, or c
  SITE (14475): n equals a,t,g, or c
  SITE (14476): n equals a,t,g, or c
  SITE (14477): n equals a,t,g, or c
  SITE (14478): n equals a,t,g, or c
  SITE (14479): n equals a,t,g, or c
  SITE (14480): n equals a,t,g, or c
  SITE (14481): n equals a,t,g, or c
  SITE (14482): n equals a,t,g, or c
  SITE (14483): n equals a,t,g, or c
  SITE (14484): n equals a,t,g, or c
  SITE (14485): n equals a,t,g, or c
  SITE (14486): n equals a,t,g, or c
  SITE (14487): n equals a,t,g, or c
  SITE (14488): n equals a,t,g, or c
  SITE (14489): n equals a,t,g, or c
  SITE (14490): n equals a,t,g, or c
  SITE (14491): n equals a,t,g, or c
  SITE (14492): n equals a,t,g, or c
  SITE (14493): n equals a,t,g, or c
  SITE (14494): n equals a,t,g, or c
  SITE (14495): n equals a,t,g, or c
  SITE (14496): n equals a,t,g, or c
  SITE (14497): n equals a,t,g, or c
  SITE (14498): n equals a,t,g, or c
  SITE (14499): n equals a,t,g, or c
  SITE (14500): n equals a,t,g, or c
  SITE (14501): n equals a,t,g, or c
  SITE (14502): n equals a,t,g, or c
  SITE (14503): n equals a,t,g, or c
  SITE (14504): n equals a,t,g, or c
  SITE (14505): n equals a,t,g, or c
  SITE (14506): n equals a,t,g, or c
  SITE (14507): n equals a,t,g, or c
  SITE (14508): n equals a,t,g, or c
  SITE (14509): n equals a,t,g, or c
  SITE (14510): n equals a,t,g, or c
  SITE (14511): n equals a,t,g, or c
  SITE (14512): n equals a,t,g, or c
  SITE (14513): n equals a,t,g, or c
  SITE (14514): n equals a,t,g, or c
  SITE (14515): n equals a,t,g, or c
  SITE (14516): n equals a,t,g, or c
  SITE (14517): n equals a,t,g, or c
  SITE (14518): n equals a,t,g, or c
  SITE (14519): n equals a,t,g, or c
  SITE (14520): n equals a,t,g, or c
  SITE (14521): n equals a,t,g, or c
  SITE (14522): n equals a,t,g, or c
  SITE (14523): n equals a,t,g, or c
  SITE (14524): n equals a,t,g, or c
  SITE (14525): n equals a,t,g, or c
  SITE (14526): n equals a,t,g, or c
  SITE (14527): n equals a,t,g, or c
  SITE (14528): n equals a,t,g, or c
  SITE (14529): n equals a,t,g, or c
  SITE (14530): n equals a,t,g, or c
  SITE (14531): n equals a,t,g, or c
  SITE (14532): n equals a,t,g, or c
  SITE (14533): n equals a,t,g, or c
  SITE (14534): n equals a,t,g, or c
  SITE (14535): n equals a,t,g, or c
  SITE (14536): n equals a,t,g, or c
  SITE (14537): n equals a,t,g, or c
  SITE (14538): n equals a,t,g, or c
  SITE (14539): n equals a,t,g, or c
  SITE (14540): n equals a,t,g, or c
  SITE (14541): n equals a,t,g, or c
  SITE (14542): n equals a,t,g, or c
  SITE (14543): n equals a,t,g, or c
  SITE (14544): n equals a,t,g, or c
  SITE (14545): n equals a,t,g, or c
  SITE (14546): n equals a,t,g, or c
  SITE (14547): n equals a,t,g, or c
  SITE (14548): n equals a,t,g, or c
  SITE (14549): n equals a,t,g, or c
  SITE (14550): n equals a,t,g, or c
  SITE (14551): n equals a,t,g, or c
  SITE (14552): n equals a,t,g, or c
  SITE (14553): n equals a,t,g, or c
  SITE (14554): n equals a,t,g, or c
  SITE (14555): n equals a,t,g, or c
  SITE (14556): n equals a,t,g, or c
  SITE (14557): n equals a,t,g, or c
  SITE (14558): n equals a,t,g, or c
  SITE (14559): n equals a,t,g, or c
  SITE (14560): n equals a,t,g, or c
  SITE (14561): n equals a,t,g, or c
  SITE (14562): n equals a,t,g, or c
  SITE (14563): n equals a,t,g, or c
  SITE (14564): n equals a,t,g, or c
  SITE (14565): n equals a,t,g, or c
  SITE (14566): n equals a,t,g, or c
  SITE (14567): n equals a,t,g, or c
  SITE (14568): n equals a,t,g, or c
  SITE (14569): n equals a,t,g, or c
  SITE (14570): n equals a,t,g, or c
  SITE (14571): n equals a,t,g, or c
  SITE (14572): n equals a,t,g, or c
  SITE (14573): n equals a,t,g, or c
  SITE (14574): n equals a,t,g, or c
  SITE (14575): n equals a,t,g, or c
  SITE (14576): n equals a,t,g, or c
  SITE (14577): n equals a,t,g, or c
  SITE (14578): n equals a,t,g, or c
  SITE (14579): n equals a,t,g, or c
  SITE (14580): n equals a,t,g, or c
  SITE (14581): n equals a,t,g, or c
  SITE (14582): n equals a,t,g, or c
  SITE (14583): n equals a,t,g, or c
  SITE (14584): n equals a,t,g, or c
  SITE (14585): n equals a,t,g, or c
  SITE (14586): n equals a,t,g, or c
  SITE (14587): n equals a,t,g, or c
  SITE (14588): n equals a,t,g, or c
  SITE (14589): n equals a,t,g, or c
  SITE (14590): n equals a,t,g, or c
  SITE (14591): n equals a,t,g, or c
  SITE (14592): n equals a,t,g, or c
  SITE (14593): n equals a,t,g, or c
  SITE (14594): n equals a,t,g, or c
  SITE (14595): n equals a,t,g, or c
  SITE (14596): n equals a,t,g, or c
  SITE (14597): n equals a,t,g, or c
  SITE (14598): n equals a,t,g, or c
  SITE (14599): n equals a,t,g, or c
  SITE (14600): n equals a,t,g, or c
  SITE (14601): n equals a,t,g, or c
  SITE (14602): n equals a,t,g, or c
  SITE (14603): n equals a,t,g, or c
  SITE (14604): n equals a,t,g, or c
  SITE (14605): n equals a,t,g, or c
  SITE (14606): n equals a,t,g, or c
  SITE (14607): n equals a,t,g, or c
  SITE (14608): n equals a,t,g, or c
  SITE (14609): n equals a,t,g, or c
  SITE (14610): n equals a,t,g, or c
  SITE (14611): n equals a,t,g, or c
  SITE (14612): n equals a,t,g, or c
  SITE (14613): n equals a,t,g, or c
  SITE (14614): n equals a,t,g, or c
  SITE (14615): n equals a,t,g, or c
  SITE (14616): n equals a,t,g, or c
  SITE (14617): n equals a,t,g, or c
  SITE (14618): n equals a,t,g, or c
  SITE (14619): n equals a,t,g, or c
  SITE (14620): n equals a,t,g, or c
  SITE (14621): n equals a,t,g, or c
  SITE (14622): n equals a,t,g, or c
  SITE (14623): n equals a,t,g, or c
  SITE (14624): n equals a,t,g, or c
  SITE (14625): n equals a,t,g, or c
  SITE (14626): n equals a,t,g, or c
  SITE (14627): n equals a,t,g, or c
  SITE (14628): n equals a,t,g, or c
  SITE (14629): n equals a,t,g, or c
  SITE (14630): n equals a,t,g, or c
  SITE (14631): n equals a,t,g, or c
  SITE (14632): n equals a,t,g, or c
  SITE (14633): n equals a,t,g, or c
  SITE (14634): n equals a,t,g, or c
  SITE (14635): n equals a,t,g, or c
  SITE (14636): n equals a,t,g, or c
  SITE (14637): n equals a,t,g, or c
  SITE (14638): n equals a,t,g, or c
  SITE (14639): n equals a,t,g, or c
  SITE (14640): n equals a,t,g, or c
  SITE (14641): n equals a,t,g, or c
  SITE (14642): n equals a,t,g, or c
  SITE (14643): n equals a,t,g, or c
  SITE (14644): n equals a,t,g, or c
  SITE (14645): n equals a,t,g, or c
  SITE (14646): n equals a,t,g, or c
  SITE (14647): n equals a,t,g, or c
  SITE (14648): n equals a,t,g, or c
  SITE (14649): n equals a,t,g, or c
  SITE (14650): n equals a,t,g, or c
  SITE (14651): n equals a,t,g, or c
  SITE (14652): n equals a,t,g, or c
  SITE (14653): n equals a,t,g, or c
  SITE (14654): n equals a,t,g, or c
  SITE (14655): n equals a,t,g, or c
  SITE (14656): n equals a,t,g, or c
  SITE (14657): n equals a,t,g, or c
  SITE (14658): n equals a,t,g, or c
  SITE (14659): n equals a,t,g, or c
  SITE (14660): n equals a,t,g, or c
  SITE (14661): n equals a,t,g, or c
  SITE (14662): n equals a,t,g, or c
  SITE (14663): n equals a,t,g, or c
  SITE (14664): n equals a,t,g, or c
  SITE (14665): n equals a,t,g, or c
  SITE (14666): n equals a,t,g, or c
  SITE (14667): n equals a,t,g, or c
  SITE (14668): n equals a,t,g, or c
  SITE (14669): n equals a,t,g, or c
  SITE (14670): n equals a,t,g, or c
  SITE (14671): n equals a,t,g, or c
  SITE (14672): n equals a,t,g, or c
  SITE (14673): n equals a,t,g, or c
  SITE (14674): n equals a,t,g, or c
  SITE (14675): n equals a,t,g, or c
  SITE (14676): n equals a,t,g, or c
  SITE (14677): n equals a,t,g, or c
  SITE (14678): n equals a,t,g, or c
  SITE (14679): n equals a,t,g, or c
  SITE (14680): n equals a,t,g, or c
  SITE (14681): n equals a,t,g, or c
  SITE (14682): n equals a,t,g, or c
  SITE (14683): n equals a,t,g, or c
  SITE (14684): n equals a,t,g, or c
  SITE (14685): n equals a,t,g, or c
  SITE (14686): n equals a,t,g, or c
  SITE (14687): n equals a,t,g, or c
  SITE (14688): n equals a,t,g, or c
  SITE (14689): n equals a,t,g, or c
  SITE (14690): n equals a,t,g, or c
  SITE (14691): n equals a,t,g, or c
  SITE (14692): n equals a,t,g, or c
  SITE (14693): n equals a,t,g, or c
  SITE (14694): n equals a,t,g, or c
  SITE (14695): n equals a,t,g, or c
  SITE (14696): n equals a,t,g, or c
  SITE (14697): n equals a,t,g, or c
  SITE (14698): n equals a,t,g, or c
  SITE (14699): n equals a,t,g, or c
  SITE (14700): n equals a,t,g, or c
  SITE (14701): n equals a,t,g, or c
  SITE (14702): n equals a,t,g, or c
  SITE (14703): n equals a,t,g, or c
  SITE (14704): n equals a,t,g, or c
  SITE (14705): n equals a,t,g, or c
  SITE (14706): n equals a,t,g, or c
  SITE (14707): n equals a,t,g, or c
  SITE (14708): n equals a,t,g, or c
  SITE (14709): n equals a,t,g, or c
  SITE (14710): n equals a,t,g, or c
  SITE (14711): n equals a,t,g, or c
  SITE (14712): n equals a,t,g, or c
  SITE (14713): n equals a,t,g, or c
  SITE (14714): n equals a,t,g, or c
  SITE (14715): n equals a,t,g, or c
  SITE (14716): n equals a,t,g, or c
  SITE (14717): n equals a,t,g, or c
  SITE (14718): n equals a,t,g, or c
  SITE (14719): n equals a,t,g, or c
  SITE (14720): n equals a,t,g, or c
  SITE (14721): n equals a,t,g, or c
  SITE (14722): n equals a,t,g, or c
  SITE (14723): n equals a,t,g, or c
  SITE (14724): n equals a,t,g, or c
  SITE (14725): n equals a,t,g, or c
  SITE (14726): n equals a,t,g, or c
  SITE (14727): n equals a,t,g, or c
  SITE (14728): n equals a,t,g, or c
  SITE (14729): n equals a,t,g, or c
  SITE (14730): n equals a,t,g, or c
  SITE (14731): n equals a,t,g, or c
  SITE (14732): n equals a,t,g, or c
  SITE (14733): n equals a,t,g, or c
  SITE (14734): n equals a,t,g, or c
  SITE (14735): n equals a,t,g, or c
  SITE (14736): n equals a,t,g, or c
  SITE (14737): n equals a,t,g, or c
  SITE (14738): n equals a,t,g, or c
  SITE (14739): n equals a,t,g, or c
  SITE (14740): n equals a,t,g, or c
  SITE (14741): n equals a,t,g, or c
  SITE (14742): n equals a,t,g, or c
  SITE (14743): n equals a,t,g, or c
  SITE (14744): n equals a,t,g, or c
  SITE (14745): n equals a,t,g, or c
  SITE (14746): n equals a,t,g, or c
  SITE (14747): n equals a,t,g, or c
  SITE (14748): n equals a,t,g, or c
  SITE (14749): n equals a,t,g, or c
  SITE (14750): n equals a,t,g, or c
  SITE (14751): n equals a,t,g, or c
  SITE (14752): n equals a,t,g, or c
  SITE (14753): n equals a,t,g, or c
  SITE (14754): n equals a,t,g, or c
  SITE (14755): n equals a,t,g, or c
  SITE (14756): n equals a,t,g, or c
  SITE (14757): n equals a,t,g, or c
  SITE (14758): n equals a,t,g, or c
  SITE (14759): n equals a,t,g, or c
  SITE (14760): n equals a,t,g, or c
  SITE (14761): n equals a,t,g, or c
  SITE (14762): n equals a,t,g, or c
  SITE (14763): n equals a,t,g, or c
  SITE (14764): n equals a,t,g, or c
  SITE (14765): n equals a,t,g, or c
  SITE (14766): n equals a,t,g, or c
  SITE (14767): n equals a,t,g, or c
  SITE (14768): n equals a,t,g, or c
  SITE (14769): n equals a,t,g, or c
  SITE (14770): n equals a,t,g, or c
  SITE (14771): n equals a,t,g, or c
  SITE (14772): n equals a,t,g, or c
  SITE (14773): n equals a,t,g, or c
  SITE (14774): n equals a,t,g, or c
  SITE (14775): n equals a,t,g, or c
  SITE (14776): n equals a,t,g, or c
  SITE (14777): n equals a,t,g, or c
  SITE (14778): n equals a,t,g, or c
  SITE (14779): n equals a,t,g, or c
  SITE (14780): n equals a,t,g, or c
  SITE (14781): n equals a,t,g, or c
  SITE (14782): n equals a,t,g, or c
  SITE (14783): n equals a,t,g, or c
  SITE (14784): n equals a,t,g, or c
  SITE (14785): n equals a,t,g, or c
  SITE (14786): n equals a,t,g, or c
  SITE (14787): n equals a,t,g, or c
  SITE (14788): n equals a,t,g, or c
  SITE (14789): n equals a,t,g, or c
  SITE (14790): n equals a,t,g, or c
  SITE (14791): n equals a,t,g, or c
  SITE (14792): n equals a,t,g, or c
  SITE (14793): n equals a,t,g, or c
  SITE (14794): n equals a,t,g, or c
  SITE (14795): n equals a,t,g, or c
  SITE (14796): n equals a,t,g, or c
  SITE (14797): n equals a,t,g, or c
  SITE (14798): n equals a,t,g, or c
  SITE (14799): n equals a,t,g, or c
  SITE (14800): n equals a,t,g, or c
  SITE (14801): n equals a,t,g, or c
  SITE (14802): n equals a,t,g, or c
  SITE (14803): n equals a,t,g, or c
  SITE (14804): n equals a,t,g, or c
  SITE (14805): n equals a,t,g, or c
  SITE (14806): n equals a,t,g, or c
  SITE (14807): n equals a,t,g, or c
  SITE (14808): n equals a,t,g, or c
  SITE (14809): n equals a,t,g, or c
  SITE (14810): n equals a,t,g, or c
  SITE (14811): n equals a,t,g, or c
  SITE (14812): n equals a,t,g, or c
  SITE (14813): n equals a,t,g, or c
  SITE (14814): n equals a,t,g, or c
  SITE (14815): n equals a,t,g, or c
  SITE (14816): n equals a,t,g, or c
  SITE (14817): n equals a,t,g, or c
  SITE (14818): n equals a,t,g, or c
  SITE (14819): n equals a,t,g, or c
  SITE (14820): n equals a,t,g, or c
  SITE (14821): n equals a,t,g, or c
  SITE (14822): n equals a,t,g, or c
  SITE (14823): n equals a,t,g, or c
  SITE (14824): n equals a,t,g, or c
  SITE (14825): n equals a,t,g, or c
  SITE (14826): n equals a,t,g, or c
  SITE (14827): n equals a,t,g, or c
  SITE (14828): n equals a,t,g, or c
  SITE (14829): n equals a,t,g, or c
  SITE (14830): n equals a,t,g, or c
  SITE (14831): n equals a,t,g, or c
  SITE (14832): n equals a,t,g, or c
  SITE (14833): n equals a,t,g, or c
  SITE (14834): n equals a,t,g, or c
  SITE (14835): n equals a,t,g, or c
  SITE (14836): n equals a,t,g, or c
  SITE (14837): n equals a,t,g, or c
  SITE (14838): n equals a,t,g, or c
  SITE (14839): n equals a,t,g, or c
  SITE (14840): n equals a,t,g, or c
  SITE (14841): n equals a,t,g, or c
  SITE (14842): n equals a,t,g, or c
  SITE (14843): n equals a,t,g, or c
  SITE (14844): n equals a,t,g, or c
  SITE (14845): n equals a,t,g, or c
  SITE (14846): n equals a,t,g, or c
  SITE (14847): n equals a,t,g, or c
  SITE (14848): n equals a,t,g, or c
  SITE (14849): n equals a,t,g, or c
  SITE (14850): n equals a,t,g, or c
  SITE (14851): n equals a,t,g, or c
  SITE (14852): n equals a,t,g, or c
  SITE (14853): n equals a,t,g, or c
  SITE (14854): n equals a,t,g, or c
  SITE (14855): n equals a,t,g, or c
  SITE (14856): n equals a,t,g, or c
  SITE (14857): n equals a,t,g, or c
  SITE (14858): n equals a,t,g, or c
  SITE (14859): n equals a,t,g, or c
  SITE (14860): n equals a,t,g, or c
  SITE (14861): n equals a,t,g, or c
  SITE (14862): n equals a,t,g, or c
  SITE (14863): n equals a,t,g, or c
  SITE (14864): n equals a,t,g, or c
  SITE (14865): n equals a,t,g, or c
  SITE (14866): n equals a,t,g, or c
  SITE (14867): n equals a,t,g, or c
  SITE (14868): n equals a,t,g, or c
  SITE (14869): n equals a,t,g, or c
  SITE (14870): n equals a,t,g, or c
  SITE (14871): n equals a,t,g, or c
  SITE (14872): n equals a,t,g, or c
  SITE (14873): n equals a,t,g, or c
  SITE (14874): n equals a,t,g, or c
  SITE (14875): n equals a,t,g, or c
  SITE (14876): n equals a,t,g, or c
  SITE (14877): n equals a,t,g, or c
  SITE (14878): n equals a,t,g, or c
  SITE (14879): n equals a,t,g, or c
  SITE (14880): n equals a,t,g, or c
  SITE (14881): n equals a,t,g, or c
  SITE (14882): n equals a,t,g, or c
  SITE (14883): n equals a,t,g, or c
  SITE (14884): n equals a,t,g, or c
  SITE (14885): n equals a,t,g, or c
  SITE (14886): n equals a,t,g, or c
  SITE (14887): n equals a,t,g, or c
  SITE (14888): n equals a,t,g, or c
  SITE (14889): n equals a,t,g, or c
  SITE (14890): n equals a,t,g, or c
  SITE (14891): n equals a,t,g, or c
  SITE (14892): n equals a,t,g, or c
  SITE (14893): n equals a,t,g, or c
  SITE (14894): n equals a,t,g, or c
  SITE (14895): n equals a,t,g, or c
  SITE (14896): n equals a,t,g, or c
  SITE (14897): n equals a,t,g, or c
  SITE (14898): n equals a,t,g, or c
  SITE (14899): n equals a,t,g, or c
  SITE (14900): n equals a,t,g, or c
  SITE (14901): n equals a,t,g, or c
  SITE (14902): n equals a,t,g, or c
  SITE (14903): n equals a,t,g, or c
  SITE (14904): n equals a,t,g, or c
  SITE (14905): n equals a,t,g, or c
  SITE (14906): n equals a,t,g, or c
  SITE (14907): n equals a,t,g, or c
  SITE (14908): n equals a,t,g, or c
  SITE (14909): n equals a,t,g, or c
  SITE (14910): n equals a,t,g, or c
  SITE (14911): n equals a,t,g, or c
  SITE (14912): n equals a,t,g, or c
  SITE (14913): n equals a,t,g, or c
  SITE (14914): n equals a,t,g, or c
  SITE (14915): n equals a,t,g, or c
  SITE (14916): n equals a,t,g, or c
  SITE (14917): n equals a,t,g, or c
  SITE (14918): n equals a,t,g, or c
  SITE (14919): n equals a,t,g, or c
  SITE (14920): n equals a,t,g, or c
  SITE (14921): n equals a,t,g, or c
  SITE (14922): n equals a,t,g, or c
  SITE (14923): n equals a,t,g, or c
  SITE (14924): n equals a,t,g, or c
  SITE (14925): n equals a,t,g, or c
  SITE (14926): n equals a,t,g, or c
  SITE (14927): n equals a,t,g, or c
  SITE (14928): n equals a,t,g, or c
  SITE (14929): n equals a,t,g, or c
  SITE (14930): n equals a,t,g, or c
  SITE (14931): n equals a,t,g, or c
  SITE (14932): n equals a,t,g, or c
  SITE (14933): n equals a,t,g, or c
  SITE (14934): n equals a,t,g, or c
  SITE (14935): n equals a,t,g, or c
  SITE (14936): n equals a,t,g, or c
  SITE (14937): n equals a,t,g, or c
  SITE (14938): n equals a,t,g, or c
  SITE (14939): n equals a,t,g, or c
  SITE (14940): n equals a,t,g, or c
  SITE (14941): n equals a,t,g, or c
  SITE (14942): n equals a,t,g, or c
  SITE (14943): n equals a,t,g, or c
  SITE (14944): n equals a,t,g, or c
  SITE (14945): n equals a,t,g, or c
  SITE (14946): n equals a,t,g, or c
  SITE (14947): n equals a,t,g, or c
  SITE (14948): n equals a,t,g, or c
  SITE (14949): n equals a,t,g, or c
  SITE (14950): n equals a,t,g, or c
  SITE (14951): n equals a,t,g, or c
  SITE (14952): n equals a,t,g, or c
  SITE (14953): n equals a,t,g, or c
  SITE (14954): n equals a,t,g, or c
  SITE (14955): n equals a,t,g, or c
  SITE (14956): n equals a,t,g, or c
  SITE (14957): n equals a,t,g, or c
  SITE (14958): n equals a,t,g, or c
  SITE (14959): n equals a,t,g, or c
  SITE (14960): n equals a,t,g, or c
  SITE (14961): n equals a,t,g, or c
  SITE (14962): n equals a,t,g, or c
  SITE (14963): n equals a,t,g, or c
  SITE (14964): n equals a,t,g, or c
  SITE (14965): n equals a,t,g, or c
  SITE (14966): n equals a,t,g, or c
  SITE (14967): n equals a,t,g, or c
  SITE (14968): n equals a,t,g, or c
  SITE (14969): n equals a,t,g, or c
  SITE (14970): n equals a,t,g, or c
  SITE (14971): n equals a,t,g, or c
  SITE (14972): n equals a,t,g, or c
  SITE (14973): n equals a,t,g, or c
  SITE (14974): n equals a,t,g, or c
  SITE (14975): n equals a,t,g, or c
  SITE (14976): n equals a,t,g, or c
  SITE (14977): n equals a,t,g, or c
  SITE (14978): n equals a,t,g, or c
  SITE (14979): n equals a,t,g, or c
  SITE (14980): n equals a,t,g, or c
  SITE (14981): n equals a,t,g, or c
  SITE (14982): n equals a,t,g, or c
  SITE (14983): n equals a,t,g, or c
  SITE (14984): n equals a,t,g, or c
  SITE (14985): n equals a,t,g, or c
  SITE (14986): n equals a,t,g, or c
  SITE (14987): n equals a,t,g, or c
  SITE (14988): n equals a,t,g, or c
  SITE (14989): n equals a,t,g, or c
  SITE (14990): n equals a,t,g, or c
  SITE (14991): n equals a,t,g, or c
  SITE (14992): n equals a,t,g, or c
  SITE (14993): n equals a,t,g, or c
  SITE (14994): n equals a,t,g, or c
  SITE (14995): n equals a,t,g, or c
  SITE (14996): n equals a,t,g, or c
  SITE (14997): n equals a,t,g, or c
  SITE (14998): n equals a,t,g, or c
  SITE (14999): n equals a,t,g, or c
  SITE (15000): n equals a,t,g, or c
  SITE (15001): n equals a,t,g, or c
  SITE (15002): n equals a,t,g, or c
  SITE (15003): n equals a,t,g, or c
  SITE (15004): n equals a,t,g, or c
  SITE (15005): n equals a,t,g, or c
  SITE (15006): n equals a,t,g, or c
  SITE (15007): n equals a,t,g, or c
  SITE (15008): n equals a,t,g, or c
  SITE (15009): n equals a,t,g, or c
  SITE (15010): n equals a,t,g, or c
  SITE (15011): n equals a,t,g, or c
  SITE (15012): n equals a,t,g, or c
  SITE (15013): n equals a,t,g, or c
  SITE (15014): n equals a,t,g, or c
  SITE (15015): n equals a,t,g, or c
  SITE (15016): n equals a,t,g, or c
  SITE (15017): n equals a,t,g, or c
  SITE (15018): n equals a,t,g, or c
  SITE (15019): n equals a,t,g, or c
  SITE (15020): n equals a,t,g, or c
  SITE (15021): n equals a,t,g, or c
  SITE (15022): n equals a,t,g, or c
  SITE (15023): n equals a,t,g, or c
  SITE (15024): n equals a,t,g, or c
  SITE (15025): n equals a,t,g, or c
  SITE (15026): n equals a,t,g, or c
  SITE (15027): n equals a,t,g, or c
  SITE (15028): n equals a,t,g, or c
  SITE (15029): n equals a,t,g, or c
  SITE (15030): n equals a,t,g, or c
  SITE (15031): n equals a,t,g, or c
  SITE (15032): n equals a,t,g, or c
  SITE (15033): n equals a,t,g, or c
  SITE (15034): n equals a,t,g, or c
  SITE (15035): n equals a,t,g, or c
  SITE (15036): n equals a,t,g, or c
  SITE (15037): n equals a,t,g, or c
  SITE (15038): n equals a,t,g, or c
  SITE (15039): n equals a,t,g, or c
  SITE (15040): n equals a,t,g, or c
  SITE (15041): n equals a,t,g, or c
  SITE (15042): n equals a,t,g, or c
  SITE (15043): n equals a,t,g, or c
  SITE (15044): n equals a,t,g, or c
  SITE (15045): n equals a,t,g, or c
  SITE (15046): n equals a,t,g, or c
  SITE (15047): n equals a,t,g, or c
  SITE (15048): n equals a,t,g, or c
  SITE (15049): n equals a,t,g, or c
  SITE (15050): n equals a,t,g, or c
  SITE (15051): n equals a,t,g, or c
  SITE (15052): n equals a,t,g, or c
  SITE (15053): n equals a,t,g, or c
  SITE (15054): n equals a,t,g, or c
  SITE (15055): n equals a,t,g, or c
  SITE (15056): n equals a,t,g, or c
  SITE (15057): n equals a,t,g, or c
  SITE (15058): n equals a,t,g, or c
  SITE (15059): n equals a,t,g, or c
  SITE (15060): n equals a,t,g, or c
  SITE (15061): n equals a,t,g, or c
  SITE (15062): n equals a,t,g, or c
  SITE (15063): n equals a,t,g, or c
  SITE (15064): n equals a,t,g, or c
  SITE (15065): n equals a,t,g, or c
  SITE (15066): n equals a,t,g, or c
  SITE (15067): n equals a,t,g, or c
  SITE (15068): n equals a,t,g, or c
  SITE (15069): n equals a,t,g, or c
  SITE (15070): n equals a,t,g, or c
  SITE (15071): n equals a,t,g, or c
  SITE (15072): n equals a,t,g, or c
  SITE (15073): n equals a,t,g, or c
  SITE (15074): n equals a,t,g, or c
  SITE (15075): n equals a,t,g, or c
  SITE (15076): n equals a,t,g, or c
  SITE (15077): n equals a,t,g, or c
  SITE (15078): n equals a,t,g, or c
  SITE (15079): n equals a,t,g, or c
  SITE (15080): n equals a,t,g, or c
  SITE (15081): n equals a,t,g, or c
  SITE (15082): n equals a,t,g, or c
  SITE (15083): n equals a,t,g, or c
  SITE (15084): n equals a,t,g, or c
  SITE (15085): n equals a,t,g, or c
  SITE (15086): n equals a,t,g, or c
  SITE (15087): n equals a,t,g, or c
  SITE (15088): n equals a,t,g, or c
  SITE (15089): n equals a,t,g, or c
  SITE (15090): n equals a,t,g, or c
  SITE (15091): n equals a,t,g, or c
  SITE (15092): n equals a,t,g, or c
  SITE (15093): n equals a,t,g, or c
  SITE (15094): n equals a,t,g, or c
  SITE (15095): n equals a,t,g, or c
  SITE (15096): n equals a,t,g, or c
  SITE (15097): n equals a,t,g, or c
  SITE (15098): n equals a,t,g, or c
  SITE (15099): n equals a,t,g, or c
  SITE (15100): n equals a,t,g, or c
  SITE (15101): n equals a,t,g, or c
  SITE (15102): n equals a,t,g, or c
  SITE (15103): n equals a,t,g, or c
  SITE (15104): n equals a,t,g, or c
  SITE (15105): n equals a,t,g, or c
  SITE (15106): n equals a,t,g, or c
  SITE (15107): n equals a,t,g, or c
  SITE (15108): n equals a,t,g, or c
  SITE (15109): n equals a,t,g, or c
  SITE (15110): n equals a,t,g, or c
  SITE (15111): n equals a,t,g, or c
  SITE (15112): n equals a,t,g, or c
  SITE (15113): n equals a,t,g, or c
  SITE (15114): n equals a,t,g, or c
  SITE (15115): n equals a,t,g, or c
  SITE (15116): n equals a,t,g, or c
  SITE (15117): n equals a,t,g, or c
  SITE (15118): n equals a,t,g, or c
  SITE (15119): n equals a,t,g, or c
  SITE (15120): n equals a,t,g, or c
  SITE (15121): n equals a,t,g, or c
  SITE (15122): n equals a,t,g, or c
  SITE (15123): n equals a,t,g, or c
  SITE (15124): n equals a,t,g, or c
  SITE (15125): n equals a,t,g, or c
  SITE (15126): n equals a,t,g, or c
  SITE (15127): n equals a,t,g, or c
  SITE (15128): n equals a,t,g, or c
  SITE (15129): n equals a,t,g, or c
  SITE (15130): n equals a,t,g, or c
  SITE (15131): n equals a,t,g, or c
  SITE (15132): n equals a,t,g, or c
  SITE (15133): n equals a,t,g, or c
  SITE (15134): n equals a,t,g, or c
  SITE (15135): n equals a,t,g, or c
  SITE (15136): n equals a,t,g, or c
  SITE (15137): n equals a,t,g, or c
  SITE (15138): n equals a,t,g, or c
  SITE (15139): n equals a,t,g, or c
  SITE (15140): n equals a,t,g, or c
  SITE (15141): n equals a,t,g, or c
  SITE (15142): n equals a,t,g, or c
  SITE (15143): n equals a,t,g, or c
  SITE (15144): n equals a,t,g, or c
  SITE (15145): n equals a,t,g, or c
  SITE (15146): n equals a,t,g, or c
  SITE (15147): n equals a,t,g, or c
  SITE (15148): n equals a,t,g, or c
  SITE (15149): n equals a,t,g, or c
  SITE (15150): n equals a,t,g, or c
  SITE (15151): n equals a,t,g, or c
  SITE (15152): n equals a,t,g, or c
  SITE (15153): n equals a,t,g, or c
  SITE (15154): n equals a,t,g, or c
  SITE (15155): n equals a,t,g, or c
  SITE (15156): n equals a,t,g, or c
  SITE (15157): n equals a,t,g, or c
  SITE (15158): n equals a,t,g, or c
  SITE (15159): n equals a,t,g, or c
  SITE (15160): n equals a,t,g, or c
  SITE (15161): n equals a,t,g, or c
  SITE (15162): n equals a,t,g, or c
  SITE (15163): n equals a,t,g, or c
  SITE (15164): n equals a,t,g, or c
  SITE (15165): n equals a,t,g, or c
  SITE (15166): n equals a,t,g, or c
  SITE (15167): n equals a,t,g, or c
  SITE (15168): n equals a,t,g, or c
  SITE (15169): n equals a,t,g, or c
  SITE (15170): n equals a,t,g, or c
  SITE (15171): n equals a,t,g, or c
  SITE (15172): n equals a,t,g, or c
  SITE (15173): n equals a,t,g, or c
  SITE (15174): n equals a,t,g, or c
  SITE (15175): n equals a,t,g, or c
  SITE (15176): n equals a,t,g, or c
  SITE (15177): n equals a,t,g, or c
  SITE (15178): n equals a,t,g, or c
  SITE (15179): n equals a,t,g, or c
  SITE (15180): n equals a,t,g, or c
  SITE (15181): n equals a,t,g, or c
  SITE (15182): n equals a,t,g, or c
  SITE (15183): n equals a,t,g, or c
  SITE (15184): n equals a,t,g, or c
  SITE (15185): n equals a,t,g, or c
  SITE (15186): n equals a,t,g, or c
  SITE (15187): n equals a,t,g, or c
  SITE (15188): n equals a,t,g, or c
  SITE (15189): n equals a,t,g, or c
  SITE (15190): n equals a,t,g, or c
  SITE (15191): n equals a,t,g, or c
  SITE (15192): n equals a,t,g, or c
  SITE (15193): n equals a,t,g, or c
  SITE (15194): n equals a,t,g, or c
  SITE (15195): n equals a,t,g, or c
  SITE (15196): n equals a,t,g, or c
  SITE (15197): n equals a,t,g, or c
  SITE (15198): n equals a,t,g, or c
  SITE (15199): n equals a,t,g, or c
  SITE (15200): n equals a,t,g, or c
  SITE (15201): n equals a,t,g, or c
  SITE (15202): n equals a,t,g, or c
  SITE (15203): n equals a,t,g, or c
  SITE (15204): n equals a,t,g, or c
  SITE (15205): n equals a,t,g, or c
  SITE (15206): n equals a,t,g, or c
  SITE (15207): n equals a,t,g, or c
  SITE (15208): n equals a,t,g, or c
  SITE (15209): n equals a,t,g, or c
  SITE (15210): n equals a,t,g, or c
  SITE (15211): n equals a,t,g, or c
  SITE (15212): n equals a,t,g, or c
  SITE (15213): n equals a,t,g, or c
  SITE (15214): n equals a,t,g, or c
  SITE (15215): n equals a,t,g, or c
  SITE (15216): n equals a,t,g, or c
  SITE (15217): n equals a,t,g, or c
  SITE (15218): n equals a,t,g, or c
  SITE (15219): n equals a,t,g, or c
  SITE (15220): n equals a,t,g, or c
  SITE (15221): n equals a,t,g, or c
  SITE (15222): n equals a,t,g, or c
  SITE (15223): n equals a,t,g, or c
  SITE (15224): n equals a,t,g, or c
  SITE (15225): n equals a,t,g, or c
  SITE (15226): n equals a,t,g, or c
  SITE (15227): n equals a,t,g, or c
  SITE (15228): n equals a,t,g, or c
  SITE (15229): n equals a,t,g, or c
  SITE (15230): n equals a,t,g, or c
  SITE (15231): n equals a,t,g, or c
  SITE (15232): n equals a,t,g, or c
  SITE (15233): n equals a,t,g, or c
  SITE (15234): n equals a,t,g, or c
  SITE (15235): n equals a,t,g, or c
  SITE (15236): n equals a,t,g, or c
actgcacagtcaataagtcagtaagtcattgatgcccgctcggaatttccaagtttggcggggattgttcaggctagggtttcatcatgggacaacagttatcagctcaacaggaacagtatataaaagtattgaagcagctgcttaaaactagtggagcctcattttcacaggctcaattaagggacctaatgcaaactgttgtctcacataacccatagttcccagaaaaaggaacgctagacgtagagctctgggaacaagtggggagaaatcttaatcagcatcatgtgcaagggcaatgggtcccagtatcatctttaatgctatgggccttagtcagggcagccctggctccattatacacagaagagcctaaaaaggggaaggaggaggaaccgtcacctgctttaccacctccttttccctcagccccaatatcgccaggccaaaataacaaagaggaaatggaggttttgcctgagccccctcctccaataaataggaaaaaagacaagagctatgctacagctatgggaccctttcttaggcaagaggcattaagtggggagctcttagcctgcctggtaatacaagattgacagggcaattgggtatataaacccatttcttttaacatttataaaaagttaagaaaaagcattagaggctgaaaccgcgtggccaaatgggtggtaggcagaaggaaatacttggcagcaaaggaagctcgcagacctggagccagcaagtgcttccaggaactcagcctgcacagaggcagcagtgacaaggagccaggcgcagcacaccagagctggcctgatagggaggggcaggaggcgtgcacgaaggtccgcccagcggcagcagggtgagggagcagcacagacaaaaggtggcacagacaaaaagcagcgcctgagcaagcgcaacatgaccgccgccccgggacccgccggctagactctctggctccgcgggtggcccatggcaaaatttcatgtgttccttgtatacaagcgacatcccagattataattctctgctaagatttaagtacaatttaagaatttaaaacacctctttctaataatggccactgttgcttttacactattcccctggcaaagcaagacagaaaaatttgcatttacaataccagctatcaatattgaaaggtcagcttgccgatttcattggaaagtgcttcctcaaggaatgctaaacagtgctgccatgtgtcagtatcatgtaaatcaagctttgttccccagtagaaaagaatttcctcattgcaaggttattcattttatggatgatattctactagcagccccagtggagccagtgcttttaagtttatatacctctgtcataaagaatgcacagctaagtggtttaatcattgcacctgaaaaagcacaaatgtcctctccttggaagtatcttgggtacatacttcctggtcagtaagacctcaaaaggttaaattaaatactagcaacttacacaccttaaatgattatcagaaattactaggtaattttaactggcttcaccccaccttgggcattcctacttataagctgcaaaacctgttttctatcttaaagggtaacacagccctggattctcccagatatttaacccctgcagcaaaaaaaaaaaaaaaaaaaaaaaaaagatggaagaaatagaacaggctatttctcaaagacaactaaatctcatagatccagaatattctgttcaattgtttatttttattttccccactaaacactcccctacagggttaataggacaaatggccccagagctatgctttctagaatggattttttgctcacataccgagaccaaaacactatctccctatatccagttaatcagtaaagtcatatattcaggccaccgatagttcactcccccatacctaatgctttaacactgtttacggatggttctagtaaacatggaaaagtggcagtctggtggagaccacataattccatcaatcgatctggatttactaacactcagagagctgagggtggggccttgatattggctttggaaactttttccactcagcccctcaatattgttagttacttggcttactctgtttatttactgcagaaccttgagacagccctaattaagtccactctggagcccaccctgtgtgctctttgacttcagcaattgctagatcagtgtacacatcctatttttattatattcagggccacagctgactgcctggcccactggcttatggcaatgatgaagcagaccttcaggttatgacatcagtgcttgaccaagccacacaatcgcatcaatttttccaccaaaactggagaaacttgtctaaacaatttcaacttacccagaggctggctaaacaaattatcctgcaatgccgagattgccagctcacaggcacataccctccttcaaccctagaggatgggaacctaataagttatggcaaacagacgttacacacatccctgaatttggaaaacttagatacgtacatgtatccattgatttaattagtgcaaatgcccttcctggagagtctactggatatgtcactaaacatcttcttttaacttttgcatttatggggcaacccacaaaaattaaaactaataatgatctagcttatgccagctcacaatttcaacaattttgtcacatgtggaacatccaacattccacaggcatcccgtataacccccaaggacaagccatagtagaatgtgcccactccacccttaaaaatatgctcaaaaaacaaaaaaggggagtatgggtaaggaccctgcagcattattggcacaagccttatttacccttaatttttaaaatttagatgacaaatttcagtccattgtagaaaagcactttgctaaaacctctcaagacataaaactgcagttttatggaaatatgtgaacagtaatgtatgatgtggtccaaatgaattgttaacttggggaagaggatatgcttgtgttcacaccccctcaggtcctctttggattccagcacgacgcatcaaaccataccatgacgtgactaggacccaacctagaaatgaaggaactgaccctacaggactcacaaccctggataatgcagtgtcctcggacggcaacaagctctggacattacctgggggatgctgaaggcggcaactgaggaggctgaatgaatcctgctccagacacagacaccattcactccagataatttgttgcttgctatgctctctgttgtacattgcaactcgcatagggtattgatacttcatatgctcttgctttgtctgcaacctgtacctggtgcactctattgggctcatattttagatccacctttctttcaccctgtcacctgggcagacacctccttctcagcctttaataacataactgcttggctaggagggatagatttacccccagtggggtccctcattaatggcacacattaaactaaggtgccaggtaacactacatatcattccactatcctcccactgtgtgtaagttataaaggttctaaccctgtgtacctgcccaaacacaattatggctacatcatggcaaaggagatgccttaacattcctagctgcaggtagcctcaaaccgggcgatgcaatcaatgccactttcccaaacattccttcctgtgttaaagaacaaagccgggaaagtaatggattccactttagctgggaggtctgtcatggggaataagcccatatgctccagttaggcaattataacatcttagactggagcccccacagccacttgcagggcagccttactaatgtcctcatccatcatggcaccaatcacagtttcatagccacgtcccattcccctatgatttgggcctatggggggataggatattccagaccccaagtaaagtccatgccaccccaagacactttgtggtgcctgggacatcttagcacctcctttgacacctggcattggacatatcataattccagtcacaactatactacaacctttattcataatcacactgatcagtgcctgatttgcactacccatccatatgttttccttgtgggaactaatatttctgttataccccaaaactccatgtttgtgacccaggtgcagggacagccttggttcacctcatgtattactaattacaatatatctaattataaatattactagagtcgtggtattaaggagacaatctgaggcattcccaccagtcaatttgacatgcggttggcaaggttcctcttcccttcccactttagatcgtgccctgtcccaggtcagacccgaaagattcataggcacacttacagccttcatagtctcagccatagtcatcctagcaactgctagtgtggctgtagcatctattactgaatcagtacaaacagctgcttttgtagataatttggccagaaatgtttctaatgaacttctcttacagcaaggtatagatcaaaagattcttgcacatctgcaagccctcgaggctgcctttggaatatgtgggggagcgacaagatgcactggcattccaacagcaattaaactgtgactgggagcataaacatatctgtgtcacttctctaccatggaatcagtcaatgcatagttgggatgaggtgaaacaacacctctggggaacctttcatgacaatttaacagcagacataaggcaacttaaaaatacaattttagaatcccttcaaactgtagatctacacacccaacaaacagccatatggaagggtgtgtgagattatctctcctggatagaccaccgctcctgggggcggggggtggtgggtcactccttgattagaaaagaatgttgctaattatactcatgtttgtcttatgttatttactaattttaggatgcaaagccggaataagagcaatgaccaccatgcctgacagacctgttgctgcgcacacctgtactctccaatgaacaagactgaatgcaaaaaaaacagaaaatggggagatttaggggatcagtcagtgtggttggaaaattgtaagatgaagttacaggatatagacacaaaccttcttggaaggccagaaggtttgcatagcttcagtaaaggatttggctgaaatcctttttacctctaatcccctttaccttgagttgatagcaatagagcaaataacatgggaatgtgggggagtttatctgaatagcttgtttactcatgtggtcctaagaccaacctttgattatccgcaggtgcatgattgctctctacctgggggcagggggagttaattacccacaggtgtgttgactcaaagcctttgtcattaagtctgtgctgaataaatgccatgagggccagccagttaaggcctgtggccgccacaactctttctgtgcatggcccggccccttagctgctctgtcactgaatatcggtgtgagtatgttattcatctgctgtgcggctggggtctgcaggacagacccctgcagctggggaaggaggcatgggactctgggaaagggaggcagtcatttaggcctggagccaaggggccaggggcctgggtaggcaacagagccacacagtgaccttgctaccctatttatgggccagccaccacctgccctcatgcccagggtctttctgcaggtggagctgaagagccaggaggctcagagtctgcagcagcagcaggaccagtacctgggtcatctgcagcagtatgtggccacctatcagcagcaggtggtcacctatcagcagctgacctctgaggaggaggagctgcacaaccagttactgctgcagacccagctcgtggaccggctgcagcagcagaaagctcaaagcaaagctgtggccaagatgggctgccaagagttgcgggagacccaggtgagggagttgctcagggcagggccctgagggtaacgacctggcaacctttgtgccttctcactccctttcttggccccttaggagcacctggaagctatcagccagcagaaccagcagcctcaggcccagttgagcctcatggctctccctggggaaggtaccggagactgctcacaggaagaggagagagccccaggaggaaacgggaactgttagcagcataggattgaggagctgaaacagacttttagaacagctggtcattatgccaaccaggtgtccacactaagtttggcaccaatatggtgaccttctgggagcaggggaccaccaggttaggttgcctaagggtgggtgaactggcccaggtcagaaatggagcaggtcggaactcccatgcctattggtagtgggactgcacctgggcaacatagcaagatcttggctctttaaaaaataaagaggccgggcacggtggctcatgcctgtaatctcagcactttgggagcctgaggtgggtggatcacgaggtcaggagttcaatcaagaccgacctggccaagatggtgaaaccccgtctctactgaaaacacaaaaattagccgggtgtggtggcgggcgcctataatcccagccactcgggaggctgaggcagagaattgcttgaacccaggaggcagaggtttcagtgagctcagatcatgccactgcactccagcctggatgatagaatgagactgtttcaaaataaagaacagctgctcattccccactagggaggggctggcctagggttacacagtgagggtgggggcagaggtgggcccactctgcccttgttgggttgtctgaggacctctctggccacccccaacaggagatggacagtgaggaggaggaggaggtgcctcagcccatgccaagcatcccggaggatctagagagccagaaggccatggtgagcctgactccccctgccccacctttgctgcctccctctgtggtccctcccagacccccttctgctcttgggttcctggccttctgatttctctggtccctcaccccttccctgggagccagtggtcagacaccatttcacctgtgactaacaggtgcatcctctgaggccccccaaggcaaggcctgctctccacctccctgccccgttcatcctgtgtatcccccataagaatgcgtacctcttgcctgcaggtggcatttttcaactcagctgtagctagtgccgaggaggagcaggcacggctatgtgggcagctgaaggagtgcactgccagcgcctggctcatctgttggcctcggcccagaaggaacctgaggcagcagccccagccccaagaactgggggtgatcccatgtgtggggagacccaccaggccctgcagggggccatggagaagctgtgggtgagtctttcctggcatgggccaagaagggttggggcaggaaggtcgctgccttaatgtgaccccattattttggctccagagccgctttatggagctcatgcaggagagaaggtggacttgaaggagagggttgaggaactggaacattgctgcatctagctgtctggagagagacagacaccatcggggagtgggaagccagggcacggcaaagagagctgcacattggtcagaggggccccagcgtctgagtcctgtcctcctgcaggagagtacatcgcactgtaccagagccagagggcagtgcggaaggaggaggagtgcatcagcaggctggcccaggacaagggagaggtgaaggtagggcgtggaacatctctgtaggggtggagggtggagggtagagggggtggggttggggatggtctcagacacaggcagagcagctgagcacccctccctccaggtgaagctgctggagctggcgtggcttgtggacgactgcaacaagtggcatagcagattcctggcagctgcccagaaccctgctgatgagcccactccaggggcccccgccccccagtagcttggggctactgacaagccagggtagtgagtagagtcctcaggcacagtgggcacgcaggagcaggggagggctcccacagcaccctgcctccctctctccaaagatctttgtgaggtgagccttgccagcagtggggagtctgcacaaggagaggcggggaagcattctccctgtgacaaccccactgagcagcagatcatgcaactgcttcatgagatgcagaacctccaggagcacccaggcttgggcagcagcccttgcattccttttttgtaccagactgatgagaacaatgaggtgaagatcaccatcatctaaaagccggccactgtcagcaaaacctggggaagtggggctggaggctctgcccctaccatgtccctaccaccccttcccagtcaaccctttaccctcacagtagcaagcataagacccctgtctaatgtggggagacaggtggagatgaggtgaagatcaccataatctaaaaggccactaaataaaaaaataaaaaattttaaaaaggtatgggattttaaaaaaaatgtatgggattataaaaagttataggattaaaaatgttatgggataaaagttatggtataaaagttatgagaagttatgaagccagacatggtggctcacgcctataatcccagcactttgggaggctgaggtgggtggatcacctgaggtctggagtttgagagcagtctgaccaacacggagaaaccccgtctctactaaaaatacaaaattagccaggcgtggtggtgcatgcctctaatcccagctactggggaggctgaagcaggagaattgcttgaaccagggaggcagaggttgcagtgggccgagattgtgccattgcactccagcctgggcaacaagagtgaaactgtctcaaaaaaaaagttatgaaaagtataaaaaaggataaaagtgtgaataaaataaaagcgggcagctgtcagcaaagcctggagaagtgtggggccagaggctccgtccccatcatgtcccagccaccccttcccagtcacccctttaccctcacaatagcaaaataagacccgtgtctaatcagggggaggcaaacatgcagaccctttgccaccttggccagagctgactccttaaatttctggacgatgattattgttttaagagtcagaggcttatagaattggcttgtttggaggaggcctaatggcctccttaactctcaccaaagcaattttttcctcaggggggctcccatcttcttactcagagaggcggctgaggcaggacaatggggctaatgtagaccaggtgagggcacaggctctggagtggccccccttagtgtacatactatatccgtgtaacattttgtatattccagtggtagggccacctcctgtgtcatacatagcagaggttggagctggcatatgggtaggaagttctgatagttatttggggctggaaaacttatttattgatagcataggccaggggaaggggcagagatggggtcgtggcactgtggtgatgcgactcctgtttattttgctttttattttggaatgtatttagccatatactgcttggcctggtgtattcctgtttccctcactgggtcatggagtttgtgccactgaacagggagccccaaagtgagcatgtccagctggggtattggggaccttccaggcctgttacctgtatgctgcctggtaacacctggggaattccacaggaactgccatggcacctatgggtgaccatggggcctggacggctaacaggctcggaagcctgatctagcagtggcaagtaaggcaggtgccagcatccaaggtcactgacttccatccagcccagttgtcttccattttgttctcctgcctccctcgcctgtctgcacctggtggcctgttctgtctgtccctctagattgccagctgccccacaggcttcctccaatctgagttcatggccctgccccctagtggccagagccggcttcacaggatgagagcctgctaagctccggaggctttccaggaagcgtcccttggaaaggatgtggcctttttaccactcccaatagcaccctggtaatgggttgacccttcccctcccctgagctccacagagaacgcaaccagcagaggacacattccccgtcacttagaaatgggttttattcccagccaagggacagcaggactggtagagactgtcgggccacacagctgtctgcacagcacccccaagcttgtcgggcggcaggagggatggtggggactggctgtccacaggccaggcatgacagggaggctcactggaggtgatggactttggatggggattgttgggggacagtgttctcttgtagttgggtcacaagactccacaaggacagcacggtgactgattcccagcgctagaggcgaggcagtcggccatgtgtaggagtgtatacatatatgtacacacacacacacgtatatatacacatatgtgtgtatgtatatatatgcatatatatacatatatgtgtgtgtgtatatgtatatatatatgagtatttatagaacagggcaggggtgtaccacagagggggcacaagttttcaccaaaggttatgcctggatgtgtcagctcaccactacaacagaccatcacagatgaagggggctggttttggggctaggggagccactgtcaagtcacagaacagtcgtccaggcaggcttggaaaggaaggtctctgagaagaggagggatctgtttagaggtagaagagggccctggggctctcaggatgggatggatttgcctgaccccattggctggcagttggagagaaagcagagagaaaacgggagagagaaaagtgaggagagagctggtaaggcaagcgcaacgcactgcagcagtggtgggagggccagggaggggaggacacaagtgtggatgtggcaagattcctggaaaagaggggctaaaagggaaaggggaggaagatggaggagccggagcttcacaggtaatgcctgggggctgcggcggccctccccaccccacacatgctggcctgtcacacggcatctaggcagtgcacccacagttcagaccgaaactcagccccctcgggcttcccacttgtcaccctgtcttccaacccactggcccagggccacccctcgctttggggagccctacacaacagccaccaggcctgacagacaaagaacattgcttgaaccaagaggatgaagctaaaagggatgcatggctggagggagtgcccaagtcccccctgggtggtcagaaagcccaggaccctgggggaagcagggagtgcaggcagccagatgccagtggccatagatttacaagtctaagaggggagcctcagctggttggggggctacaggtcgcatagatgaggctgggcccttcctgccaggaaaagaagagcgagagtcagtggtgggggaagcctggctggagctcagccaagccagcaggcactgtcatccccttggctgaatagcataggcgacccctaggagcaacaggccaaggtgcctgagcccactggctggctatggtccttcagctggggccagggacactgccttcagtcacacgctagcaggtatgacggtacccgggagggaggcaagaccccacactagcaggtatgatggtacccgggagggaggcaagaccccatctctactaagaaaaaaaaaaagaccgggctctgtggctcacgcctgtaatcccaacacttcgggaggctgaggccggtggatcacctgagatcaggagttcaagaccagcctgggcaacatggtgaaaccccatctctactaaaaatacaaaaattagctgggcacggtggcacgtgcctgtaatcccagctacttgggaggccgaggcaggataatcacttgaacctgggaggcggaggttacagtgagccgagatcgcgccactgcactccagcctgggcgacaagggtgaaactctgtctcaaaatttaaaaaaattaataaatctttaaaaatcagccaggtgtggtggtgcacacctgtggttccagctacttaggaggctgaggtgggaggattgcttgagcccaggaggttgaggctgcagtgagccatgattgtgccactgcactccagcctgggcaacagagcaagaccatgcctaaaaataaataaaaaataatttaaaaaattgagaaagatgggaggagggtgattgcatcttgattttctctaaactttaattgaaattgagcttttccttccatggcgaatgttgctaggaacaaacctcattagtgttagcagcacctgttactttgttaccaacagaaatcacagatattttcatattacactgcagctgttgcagacatctcgggatagcatttttgctcatcattacctcaaaattatagtaattagacctaactttggatcttgttatttaatgtgccaataaagcatatcatgtaatatcacaaatattttcataaactttattttgatataatttatttccattgctctctgtattttattttgtgcacttaaaaaaaaaaatctattctgagcagtccatgggcttcctcagataccaaagaaggccacggcacaaaaaggctaaggatgctggggtctaacccagagtaggtttgctgacaaagtgaggtactggaagcattcagatgcaaagaaatgtgtttctgtgattttccatgaggcactctctctccacctccctttcaggtaggatacttttatgggcagaacctggtcattttcctaagaagacaaaggctttgtgtacaaaagggggcagagcccaggatggctgtgggccagaggtaaagattccaaagtcagacaaataaggggggtatctctttataatcagtagaagtgtggggctgaggcggggcaaggcccaggtgagctccatgaagaagggttggggtaggaaggtagagggacaatcctgggaattggaggttgcaatgagaagagattgtgccactgcactccagcctgagtgacagagcgagaccctgtctcaaacaaacaaacaaataaagaggcttccctggagctctttagttatttacaacattttacaaaacaatgtaggtaaagaataaggctaatctataatcagagaaacaaaggctacagctgcctaggttataattgccctttttttttttttttttgactcaggtgctgtaatcccattcctttaaggctaagaatattttaaagttccaacaattcatatttggagttattttattttttaaaaaactgagacagggtctttctctgatgcccaggctgaattgcagtggcatgatctcaactcactgcagcctgtgagatcaagtgatcctcctgcctcagcctccccagtagttgggacctcaggtgtgagtcgccacacctaattttttttttattgtttgtagagactaggtttcaccgagttgcccaggctggtcttcaactcctgtgttcaagcaatcctcctgcctcattctctcagagtggtgggattacaggcatgggccaccacgtacagccagagttacttattttcacagtggaaagtttctttgagccaagtttgagaactgcaaccctgaagacatagatttaagtttccttgaatgtatgttccaactagtagcagttacaattggtttgttttgttggttttttgggtttttattgagacagtgtctcactgtcgctcaagctggagtgcagtggcttgatcattgttcactgcagccttgacctgccggactcaagcaatcctccctcctcagcctcctaagtagctgggtctacaggatcaaaccaccactcctggctaatttttgtatttttttatagagtcaggcagggtttcaccatattgcccaagctggtcttgaacccctgggctcaagaaatccacccacctcagcctcccaaagtgttgggattataggcctgagccaccnnnnnnnnnnnnnnnnnnnnnnnnnnnnnnnnnnnnnnnnnnnnnnnnnnnnnnnnnnnnnnnnnnnnnnnnnnnnnnnnnnnnnnnnnnnnnnnnnnnnnnnnnnnnnnnnnnnnnnnnnnnnnnnnnnnnnnnnnnnnnnnnnnnnnnnnnnnnnnnnnnnnnnnnnnnnnnnnnnnnnnnnnnnnnnnnnnnnnnnnnnnnnnnnnnnnnnnnnnnnnnnnnnnnnnnnnnnnnnnnnnnnnnnnnnnnnnnnnnnnnnnnnnnnnnnnnnnnnnnnnnnnnnnnnnnnnnnnnnnnnnnnnnnnnnnnnnnnnnnnnnnnnnnnnnnnnnnnnnnnnnnnnnnnnnnnnnnnnnnnnnnnnnnnnnnnnnnnnnnnnnnnnnnnnnnnnnnnnnnnnnnnnnnnnnnnnnnnnnnnnnnnnnnnnnnnnnnnnnnnnnnnnnnnnnnnnnnnnnnnnnnnnnnnnnnnnnnnnnnnnnnnnnnnnnnnnnnnnnnnnnnnnnnnnnnnnnnnnnnnnnnnnnnnnnnnnnnnnnnnnnnnnnnnnnnnnnnnnnnnnnnnnnnnnnnnnnnnnnnnnnnnnnnnnnnnnnnnnnnnnnnnnnnnnnnnnnnnnnnnnnnnnnnnnnnnnnnnnnnnnnnnnnnnnnnnnnnnnnnnnnnnnnnnnnnnnnnnnnnnnnnnnnnnnnnnnnnnnnnnnnnnnnnnnnnnnnnnnnnnnnnnnnnnnnnnnnnnnnnnnnnnnnnnnnnnnnnnnnnnnnnnnnnnnnnnnnnnnnnnnnnnnnnnnnnnnnnnnnnnnnnnnnnnnnnnnnnnnnnnnnnnnnnnnnnnnnnnnnnnnnnnnnnnnnnnnnnnnnnnnnnnnnnnnnnnnnnnnnnnnnnnnnnnnnnnnnnnnnnnnnnnnnnnnnnnnnnnnnnnnnnnnnnnnnnnnnnnnnnnnnnnnnnnnnnnnnnnnnnnnnnnnnnnnnnnnnnnnnnnnnnnnnnnnnnnnnnnnnnnnnnnnnnnnnnnnnnnnnnnnnnnnnnnnnnnnnnnnnnnnnnnnnnnnnnnnnnnnnnnnnnnnnnnnnnnnnnnnnnnnnnnnnnnnnnnnnnnnnnnnnnnnnnnnnnnnnnnnnnnnnnnnnnnnnnnnnnnnnnnnnnnnnnnnnnnnnnnnnnnnnnnnnnnnnnnnnnnnnnnnnnnnnnnnnnnnnnnnnnncaaaaaaaaaaaaaaaaaatgctctttccatcttgtctctcctgtttatccaccctttctcatttaagcttctttttcctttcctcatgacttacataccctttgatcaagattattcttgttcttggcttcagctaccacgattcgtaaaccagaatttccacccaaaactataaccttacaaaatttccactgagaaatcctcagaaagccttaacagcaagaaattcaacaggatcttatctccaaaactgcctgtccaactatattacttaactagtggcgtgccccgagcaaaaacctcaattaccttcaatatttatccttgatttaatctttggcatgtgtcctttaccttctttcacctctactgatactgtcttacctctcacctgaaataatgccaccaccttctcaatgccctttctgcctccattctgttctccatcctctgaactgacagcaaaattgtctgtaaatatttttctgactcagaaatatgaacatcttccccaattaacccatcatagaggtcttcaggactcactatttcctataaaatgatgtctatatatttacatttacaatctcatctccctccaatttttttttttttttttgaggcggagttccgctcgtgttgcccaggctagagtgcagtggcgcagtcttggctcactacaacctccatctcttgggttcaggcaattcttctgcctcagcctcccaagtagctgggattacaggcacccgccaccatgcccagctaattttttgtaattttagtagagacagagtttcaccatgttggccaggctggtctctaactcctgacctcaagtgatccaccagcctcggcctcccaaagtgttgggattataggcctgagccaccgcgcccagcctaaactcattttatagtcttgtgctggtgaatgcttaacaactagatctctaggggaaaaagccctgctttctatgttgtaaatactgtcatcatggctgatttcaaactatccttgtggacaaaaagaatcaaagtctataaactatttgaagagatttattctgagcgaaatgagtgaccatggcccatgacacagcgctcaggaggtcctgagaacatgtgcccaaggtggtaggagtgcagcttggttttatacattttagggaggcacagacatcaatcaaatacatttaagaaatacattggtttggccgggcgcggtggctcatgcctgtaatcccagcactttgggaggctgaggcgggcagatcatgaggtcaggagatcgagaccatcctggctaacacggtgaaaccccgtcgctactaaaaatacaaaaaaaattagctgggcatggtggcgggcgcctgtagtcccagctacgtaggaagctgaggcaggagaatggcgtgaacccgggagacggaggttgcagtgagctgagatcgtgccactgcactccagcctggggacagagcgagactccatctcaaaaaaaaaaaaaa

SEQ ID NO: 3355 - DNA, 1330 bp, Homo sapiens
caagctcaaagagcagctgtctccgctgcagaacggattcataaagctggtgcgtgaccccatctggaaagcctgctctcctccctagcactcccggcctttgttttcccacccataaaatgaggcagtgtacccctaatgtgagatggtaattctgaaggtacctgtgaaccagagccctgctctgatggctgtggggaagagggaatgatttttctaacctgcctccacccttccaggtgccacgggaggcagacaccaagttctggggtctccagctgcagtgggtggccgccaattgcttctctctgtccagactaatgagaacatggagatcaccagtgcactgcagttggaatagcacgtaaagagggagctgggaaagaagctgggcaagctaaaggacatggtaaccctgccccatccaagaagagctggaaggcgggcaccagcctctggggaggggaggtgtgaagccagaggcagctccagcctgggggacaggtgaccccagcaccctccagggcagtcctgtgactgtttcttgcttcccgccctctgacatttagtggtgggttcgttcttcctaggtctggacatcatcatcccagctggagtcatggagcctcccaaacatagggaaagagatggtggtataagaggttccttagagtcaaactagattccggccttggctccactggtcacctacttttcatctctaagtctcggtttctttaacttaaaagggaagttagcaccttcctcttggaggtgctgaggattaaatgagataatacgtggaaagcattaggcatgtagcacagttagcagatggtggttggctccctctgcttttccatcagtctgtggcctagtttaaatggtgggaggaagggtgtgagatttaaggctggttgtaagggatcagtcagtgtagttggaaaaattgtaagatgaagttataggatatagacacaaaccttcctggaaggccagaaagtctgcatagcttcaataaaggatttggctgaaagcagcgtaatcccctttaccttgagttgatagcaatagagcaaataacatgggaacgtgggggagtttattgaatagcttgtttactcatgtggtcctaagaccaacctttgattatccacgggtgcatgattgctctctactcggtggtcggcaaatttaattacccacaggtgtgttgactcaaagcctctgtcattaaatctatgctgaataaatgccgtcagggccagctagtcaaggtgcacaactctttttgtgcgtggtgtggccccttagctgctctgtcactgaa

SEQ ID NO: 3356 - DNA, 101 bp, Homo sapiens
agatgcaaattttcccccacaaagaatggctttgcaggaccatttcaaaatatggcaaagaaacatgttttggggtaaaatattttgactttctcctttgt

SEQ ID NO: 3357 - DNA, 1623 bp, Homo sapiens
ctagagatcatgccactctaaatggagcactgcaatttgccaccaaacagctaagccgaacattgagtagagccactcccatacctgaatacctaaaacagatccctaattcatgtgtttctgggtgttgctgtggctggctgactaaaacagttaaggaaacaactcgtactgaacccatcaacactacttattcttacactgacttccaaaaggcagttaacaaactcctaactgcatcactgtaaagatctaccatttgctctgatatctctgatgttgctaattgagaaagtggtacaaagttagtcattacacagcccactaatgccttctcagtcaaactctcttatgccctggcaagccaatgaggataccctttgacaaaccctgtggataaaatgataatatcaaggtcaggcatggtggctcacacctgtaatcccagcactttgggaggctgaggcgggtggatctgctgaagtcagaagtttgagaccagccttgccaacacagtgaaaccctgtctctactaaaaataaaaaaattagccgggcgcagcagtgcacgcctgtaatccctgctactcgggaggctgaaacaggagaatcacttgaacccaggagacggaggttgcggtgagttgagattatgccactgtactccagcctgggtgacagagcgagactcagtctcaaaaaaaaaaaaggagaattagttaaggggaccatattacaaaagatagttgaatattcttcacactcacttctcaccctccccaccccaatttactctgcctttctgaatggctttaatgagatacctgattattaatgaagaaaagtagaccaccaccccttttgttatccagactttagaacagccattgttgaaagcaagaagttagctacccacaataatacctttctgagcatactcttctctaacatacatttctgtggaagtagttgaattaaattgagtaactacacaaaggaaaatggcagggctatgaatttctttcccagcttttatatagatgtgcctacatatgacactctttagggttccttttattttttctttttttttttttttgaggtagttgaattaaactgggtaactacacaaaggaaaatggcagggatatgaatttctttcccagcttttatatagatgtgcctgcatatgacactctttagagttcctttcactttttcttttttttggaagggggcggggaggcaggaggagtgcagttttaagcctagcctatactactacaaacttattatggtacttaaaattacagcatgaacgttctatatcggagtctcccaccaggctgtctctgactaaatcagcctataagatcatcccttgggattaaacaaacacctgttctgtagggaatgtgtttcctgaatcttggtactcagacttttgtcaagagtaaataacatttcaaaagatgaatggaaaaatgattaagagagcatttctgctttcagcattaactgctaatggattaaaattttaatctgtatagcatttcctggagtaaaagctcaagtactttccacatccattgcaaacttttcaggaacccttctaatttttttt

SEQ ID NO: 3358 - DNA, 4033 bp, Homo sapiens
ctagagatcatgccactctaaatggagcactgcaatttgccaccaaacagctaagccgaacattgagtagagccactcccatacctgaatacctaaaacagatccctaattcatgtgtttctgggtgttgctgtggctggctgactaaaacagttaaggaaacaactcgtactgaacccatcaacactacttattcttacactgacttccaaaaggcagttaacaaactcctaactgcatcactgtaaagatctaccatttgctctgatatctctgatgttgctaattgagaaagtggtacaaagttagtcattacacagcccactaatgccttctcagtcaaactctcttatgccctggcaagccaatgaggataccctttgacaaaccctgtggataaaatgataatatcaaggtcaggcatggtggctcacacctgtaatcccagcactttgggaggctgaggcgggtggatctgctgaagtcagaagtttgagaccagccttgccaacacagtgaaaccctgtctctactaaaaataaaaaaattagccgggcgcagcagtgcacgcctgtaatccctgctactcgggaggctgaaacaggagaatcacttgaacccaggagacggaggttgcggtgagttgagattatgccactgtactccagcctgggtgacagagcgagactcagtctcaaaaaaaaaaaaggagaattagttaaggggaccatattacaaaagatagttgaatattcttcacactcacttctcaccctccccaccccaatttactctgcctttctgaatggctttaatgagatacctgattattaatgaagaaaagtagaccaccaccccttttgttatccagactttagaacagccattgttgaaagcaagaagttagctacccacaataatacctttctgagcatactcttctctaacatacatttctgtggaagtagttgaattaaattgagtaactacacaaaggaaaatggcagggctatgaatttctttcccagcttttatatagatgtgcctacatatgacactctttagggttccttttattttttctttttttttttttttgaggtagttgaattaaactgggtaactacacaaaggaaaatggcagggatatgaatttctttcccagcttttatatagatgtgcctgcatatgacactctttagagttcctttcactttttcttttttttggaagggggcggggaggcaggaggagtgcagttttaagcctagcctatactactacaaacttattatggtacttaaaattacagcatgaacgttctatatcggagtctcccaccaggctgtctctgactaaatcagcctataagatcatcccttgggattaaacaaacacctgttctgtagggaatgtgtttcctgaatcttggtactcagacttttgtcaagagtaaataacatttcaaaagatgaatggaaaaatgattaagagagcatttctgctttcagcattaactgctaatggattaaaattttaatctgtatagcatttcctggagtaaaagctcaagtactttccacatccattgcaaacttttcaggaacccttctaattttttttttttttttttttttgagacggagtcttgctctgtcgcccaggctggagtgtagtggcatgatctcagctcactgcaagctctgcctcccgggttcgtgccattctcctgccctgcctcccgaatagctgggactacaggcgtccaccaccactcctggctatttttttgtatttttagtagagacagggtttcaccgtgttagccaggatggtcttgatctcctgacctcgtgatccacctgcctcggcctcccaaagtgctgggattgaacccttctaattttaaagaaccttgttattagaaaatctcagcctaatacaatctgaagttaagagttttagcagcattgtttttctaagtagatttagctatagattttcttctggccaaacaaggaagagtatatgcccttgtaaatgagtcttgttttgtttatttaaatagtcagtcaaaacgtagaaatcagtatacgtaaaataaaatgcatgagactattaaatcttttcatatactctacaaataaaatgaaatctgtgtgtggtcctggttgactgggcatctaaagggaatcagaaaagagattgtgaaaagttatatatatatcctcttccttattttagttttgctttttcctattttccataattaagtgccgtttacaaagtggcatcaaaaaattgaagcaggccaggcatggtggctcatgcctgtaatcccaacagtttgggaggctgagggcaggtggatcacttgagatcaggagttcgtgaccagcctggccaacatggtgaaagcccatctctactaaaaatataaaaatagccgggcgtggtggcatgtgcctgtaatcgcagctacttgggaggctaagacaggagaattgcttgaacctgggaggtggaggttgcaatgagctgagatcgcgccactgcactccagcctgggcaacagtgagacaccgtctcaaaaaaaaaaaaggttaggaatcacaaattgtgtaaatatatagcaactttaagaagagagaagaatgcttataacctagtgaatatttctgctgagccttagttgtcttgtctaaaggaaaaaagagggaattgtagaataaaagtatttgttagtggaaattattgacctgaaaccatatcatattgttagtgtaactgaatgtatcagaaattgttcctatgtaggtattctgtgaaactggtttctaaaatgttacaggaaactgtttcctttttttttgtttgtttgtttaagtggaggtgggagtaggtagggaagaggtctgaatattaaaatatgtttatgttcatgtgttcataatacgttcctttttctctctgtgtgtgtataaaagtgccttgctcatgaatgcatttttgctattcgcttcgaaaggaagcctttccccagcttggcagctgaataaaccaatagctttgtacatgctgaacagagtatggtcatttgtcctcaacaaatgaaatagatcctactttgcttaaggcatattctacattcactaagtactgaatagagttaatagatacagtacctgaatctatatagtatgtctgacaggagatgacttggcgtctctagagaagaaacacacttgaagaagaaaatgtctgatattcagtcaagattcaaagtgagcttatttgtttatgtattttaagtaattccaggttgcacaaaataacaggtacctaaataagccttaagttaactttttgtgtggcataaacactgggtttgggaatgaatttactacctttgcactccctatgttggcttctgttaaatgcagtcaccataattaagataaaaagattattttatcctctatttatagaaatatttatcaaaggagtaaggaaactatttctaaaccagtggacattaactgtcttttactttctcagtgcagataggcaactttttttttttttttttttttgagatggagtttcgctcttgttgcccaggctggagtgcaatggcgcaatctcggctcactgcaacctccacctcccgggttcaagcaattctgcctcagcctcccgagtagctggaattacaggcatgtgccaccacgcccagctaattttgtatttttagtaaagatggggtttctcaattggccaggctggtctctaactcctgacttcaggcaatccacccaccttggcctcccaaagggctgggattacaggcatgagccaccgtgcccagccataggcaacatttttattaaaacagtccagataccttgagcctcaaagaccataatcacgtcttttaatcccatctgcttcctaagaaaagaaaaaaatccatacatgcatggcaggagggcatatgataggtcccctctaggggatagaagcccttcctgct

SEQ ID NO: 3359 - DNA, 1734 bp, Homo sapiens
ctagagatcatgccactctaaatggagcactgcaatttgccaccaaacagctaagccgaacattgagtagagccactcccatacctgaatacctaaaacagatccctaattcatgtgtttctgggtgttgctgtggctggctgactaaaacagttaaggaaacaactcgtactgaacccatcaacactacttattcttacactgacttccaaaaggcagttaacaaactcctaactgcatcactgtaaagatctaccatttgctctgatatctctgatgttgctaattgagaaagtggtacaaagttagtcattacacagcccactaatgccttctcagtcaaactctcttatgccctggcaagccaatgaggataccctttgacaaaccctgtggataaaatgataatatcaaggtcaggcatggtggctcacacctgtaatcccagcactttgggaggctgaggcgggtggatctgctgaagtcagaagtttgagaccagccttgccaacacagtgaaaccctgtctctactaaaaataaaaaaattagccgggcgcagcagtgcacgcctgtaatccctgctactcgggaggctgaaacaggagaatcacttgaacccaggagacggaggttgcggtgagttgagattatgccactgtactccagcctgggtgacagagcgagactcagtctcaaaaaaaaaaaaggagaattagttaaggggaccatattacaaaagatagttgaatattcttcacactcacttctcaccctccccaccccaatttactctgcctttctgaatggctttaatgagatacctgattattaatgaagaaaagtagaccaccaccccttttgttatccagactttagaacagccattgttgaaagcaagaagttagctacccacaataatacctttctgagcatactcttctctaacatacatttctgtggaagtagttgaattaaattgagtaactacacaaaggaaaatggcagggctatgaatttctttcccagcttttatatagatgtgcctacatatgacactctttagggttccttttattttttctttttttttttttttgaggtagttgaattaaactgggtaactacacaaaggaaaatggcagggatatgaatttctttcccagcttttatatagatgtgcctgcatatgacactctttagagttcctttcactttttcttttttttggaagggggcggggaggcaggaggagtgcagttttaagcctagcctatactactacaaacttattatggtacttaaaattacagcatgaacgttctatatcggagtctcccaccaggctgtctctgactaaatcagcctataagatcatcccttgggattaaacaaacacctgttctgtagggaatgtgtttcctgaatcttggtactcagacttttgtcaagagtaaataacatttcaaaagatgaatggaaaaatgattaagagagcatttctgctttcagcattaactgctaatggattaaaattttaatctgtatagcatttcctggagtaaaagctcaagtactttccacatccattgcaaacttttcaggaacccttctaattttttttttttttttttttttgagacggagtcttgctctgtcgcccaggctggagtgtagtggcatgatctcagctcactgcaagctctgcctcccgggttcgtgccattctcctgcc

SEQ ID NO: 3360 - DNA, 1467 bp, Homo sapiens
gtttgggatttatttttattatctttataaaagtagctggtcagttttcatgcttttttcttttttgtggaacagcttatatagaattggtgataggatcacaacttctgaggtcccagcaagagtcctaacatctagcagctctaccaccaggacaggccccctaaaactaattccaacaagcacctctgaaggtaaaaaaaaaaaaaaaaaaaacttttatagctctctatttggagtttggggcataagggatcagcttttgcaaaagtaattttctaggctaaaactgcatacaaactggcccagttatgtaccaacaaagaattaaaatggccccagactttgctccccaatattgtgattgtaagagctattaccaacaggtaaattggcctaagtctgtgagatagagagggaagagtctgtaagacttcttgctcagcatttgttctgattttagatatcttgaagttaggtaggcaataatgttatccagtgctttcaggctttaatatcatgtctctagtcttctcattcacaggttaaggctacctttccagataatccaacagctaaatcaccagtttccaagggcatttgcatcacctatggaaagcatcggatccttatacaccagatgttcttgacagctcatcccgtcattcccccctgcacaaaagttgctataccagcggacaagcaagacaactactgagcttcttttgattgtcaagtagatataatatcactgccagcaaacagcacaaaagtgtctcttcacagtatcactaccagttgggactatgctaagtaaatcagcttgcctagatgaggaccccttctattcttgggtagccaggatttgaaggagatactctgacctgtgccagtggtaagtgactaatacttttacacactgaactggtcctggaaactgagatgtcttctttgtaagtgaagaatatacaacataatcttgaagaacggcacagtggtatgggccacaagcatactttatgtgtgtaacggactgaaagacaaattaatcttggtgaaaggatttttcatctcttatttctatttgccagtgttagtcagtgttctgctggcttagattattacctttttctggttccttactgtgttttattctgatgggtcctagaaatccctctcctgaccacttgtcagaatcagaaagtgaggaagaagaaaatattagttacctaaatgagagttctggggaagagtgggattcctctgaagaagaggactctatggtgcccaacttatcgcctcttgagagtcttgcctggcaggttaagtgccttttaaaatattccacaacttggaaacctttaaatcctaattcctggttgtatcatgctaaactgttggatccaagcacaccagtccatatacttcgagagataggtctaagactctcccattgttcccattgtg

SEQ ID NO: 3361 - DNA, 759 bp, Homo sapiens
aagatcagggccaaaagtgttttgctcaggtagctaggacatatagaacagcctgagaagtatggataacttctcagacttcatgagttaactgtgcaagctggtaacgtatctgtccgccagtgatacccattggactgagggagttacattagctggaccaaccaccagtacttctatgtcaacttgctgttgctaaaagaaaaatgtctatgatgtgtctcaaataattttaaatacagttgagttaatgactacatatttgagtctgctaattccatgcagtttgccaagctcttcctttcaattagcagccgcagtgagacttaagtttgcaactgagaccaagaaatggaaaggatgaggatataccacagtgacctgacacttgctggcttcccatcttctgtgagagctatgaccagctattctcaatgagctctggaaaatgaatgcctggttttcttttattattattattatttttttatttttttgacacagggtttcgctcttgcctaggctggagtgcaggggcataatcttggctcaccgcagcctcgacctcctgggctcaagccatcctcccacctcagcctcatcagtagctgtggactacaggtgcacaccaccacacaggccaatttttgtatttctttgtagaggcagtttcactcaggctggtcaggaactcctgagctcaagtgatcctcccacatcagcctcccaaagtgctggtgttacactggtacctggtat

SEQ ID NO: 3362 - DNA, 300 bp, Homo sapiens
gaaatccctctcctgaccacttgtcagaatcagaaagtgaggaagaagaaaatattagttacctaaatgagagttctggggaagagtgggattcctctgaagaagaggactctatggtgcccaacttatcgcctcttgagagtcttgcctggcaggttaagtgccttttaaaatattccacaacttggaaacctttaaatcctaattcctggttgtatcatgctaaactgttggatccaagcacaccagtccatatacttcgagagataggtctaagactctcccattgttcccattgtg

SEQ ID NO: 3363 - DNA, 6883 bp, Homo sapiens
ccggaggggaagggctgctggcgttaggcctggctgggtcgtgcggctgagcgtgaggctagaaagaaaaagcgatcctccaagagtgagaacgggagatctgccgaggataacaacctcccttgtggccgaagggcgggggatccccacacgagggctccgcttcgagagacggcgacaaaggaaagttcgtagcgcgttccggaggcccggccacctctgagaagggagacgacgctgctgggtccgctgagcggggcgacccgaggttagtggagacggatgctgtcttttgaaggccttagtccctgccctggtgaagccgactgcgaggttccacagggcgtgcaggcagtccggggatcgttgcgaaggggggtgcgggctaacttagctgctgccgtttctagatgtgcagctgtgtaggccctgtttacaagtgtgcataaggacagtgtattaagggagaactcaagagaatggaaaggtctttcgggtagtggttaaaataaagaagagtaggaactaggtttttaaattttaaatgaaattatatcagacagaacttctgttggatctcaggatgcaccatccaaaaataggactgtaggagaccaaaatatgccaccctacaatatacttctagagtatattttgagctggtattctgataaaatgcagacacaggagtcgctctgaaaatctgtcctgttgtaaaagaaattgacatctacagaggaaatatacatcagtaaaggatctgtatcagaaagagggcagctctgcgataatttttgttacctgggagatcttatctgcataccaagacaacttttattcaccgtatatttcctcccctcacctttccacaactttgtggccaccatcccccagaaagccgcaagcccccatttcttgagtagcgtaggatgctgtataatattcaatcatctgaccatggtgggactcctctgcgtatgtaattaagtacgggttttttttcttgttaatgtctatgtcaggttaatttgtaacccagccaaagaacctaggaggatggagggaagccgtttttccctctcctacacctcagtaacctactgccagctgaagaaatagaacattactaaagccacctgtacatctttctccttttgaattacctgccctccgaagaagtaatggattttctgaatttactgttaacttttaccatgcagctttctatatcttaatgacatattttaatatattaatgacatgaataaatccctgaatgaggatattgtactattttgcatgttttaaccgttaaatgaataattatatgtgcatctggcttttttcaatcaatattgctgtggttcatattgatatgttcataatagtaacttgcacttaattaacctttattatgtgccagacaccatgctaagcactttacttcgtttactgctcacaaaccctgtaggataactttgatcttcttttaagatgaggaaactacggcacagacaggttgctatagtactccattgtattaatatgccataccttatccattctcctgcttaattcctcaaactttgtagatattcagctgctagttaagaatgtggtaacatttgtgttgcccataattttgctttgtgacgtttctaatatatatttttttatttttattttgagacagagtcttgctctgtcgcccaggctggagtgcaatggcgcgatctcggctcactgcaacctctgcctcccgggttgaagcgattctcccgcctcagtctcccaagtagctgggttacaggcatgcaccaccacacctggctaatcttttgtattcttaatagagacggggtttcgccatgttggccaggctggtctcgaactcctgacctcaggtgatccacccgcctttgcctcccaaactgttgggattacaggcgtgagccaccgcgcccggctagtatttctttactatattctatttggctgtctcaccaacagagacatcacaccattttgtcagttacagaagaatgagacatctggccgccagaggtcagcctaactatatttcggttagtttttttttttgttttgttttgttttaatggttaaagccatgggggtattggttcagtattttttgatattataatctgaaaatattttttcaaaggtgctagattaaatttaaacaacatagtatactgccttaaagcttacatttttcctgacttttgtactgtgaaacagaacaaaaacaattatgggaaagtaagagcctttttaaaaattttctgagtaacataataactgaagtatagccaattagtaatctcacaggtgcaatctggttgaagtgaaaatagtaaaaatattagaggacagcacaattaaaagccaacagcttctcctgtctcagttaataaagacttacggtccacgacaaagaatgaatactctttttcagattgaacaaggtaatagtactataatctaaacttagaagtattacattgtttcttcttaaagttataagcagtttcctttatattgctgtagtagcatcatatatgttgatcctgccttaaaaaaattatctcatttgtctttgtctaacattaccaaatcaccaagatataacttggaactgttctctccctggagtaaaatagaacatgcttgtggtagttacttactgcaggcctttgccattctctgactcttttatttactgagccactcatatatgccagacactgtgctaggagtgtgtgaaagccagagaaatactcattagaggaaaattgctgacctgaagccataccatatgaccttattagcacaactcagtgtattcgataatgaaaatgttcactgactttgattttggaaatcccccctacagagtagcataaacgagacattgatattgtctcttttctcatttaaagctatgcctttaaaggccacccatgttgctgtatatacttggaatgtgtttccacattttaccagtccgcttctccagcgataggaacctagaatgcttctaattcctgtcatcacagatgtagcttcagggtatatcttcatacatgttgttcatacgggaatttctttgctatctatgcccaaaagtaggattgctagatcatgagatgtgcaaatagtttgcctaagtagtgctgccggactgttcttccgaacagttactccactctgcaatcccaccagcagtgccagttccaaaaaagaactcactgacacttggtgttatccagctttcttattctaccaaactgatagcataatgtgatcatattgttcatgccttgggattttctcttctataatttggatatctttgtccattgctcatttctttattgaagttgctttcttaaaaattgatttaactttgtccttggtatctttagttcagtccagaaatgattaattgtgatgtgattaaattcattttttggtctggtgctttatgcttttttgtttaagaagtctttccctggcctcatttcacaaagatattctgtattatatttaactaactatatagttttaccatccccatttaggtctttaatccatcatgaatcctcccttatacatgtcattatatgtatatgtattaaatggttttacttttcatttttttcttaaccttgttcttaattttttcttaattcttattccaatacagttttactttttttcatataatgagccagttgtaccaataatatgtactaaacatatccattcacccttagtttatgtgccaaccttattttatattacattcccaaattatatatagctctgtttctaagctctattctgctctattggactattgtctgttcttatgctaatcctaccttattttaatgtctgtgactttagtcataggacataccttgaagaataggaactcccttactgtttaaacagttcatttggctatatgtggaattttattctttctatataaactttaaggtttgtttatagagttccttaaaaatttgattggaattgtataaattaatagggagaaagttgatatctttatgatatttgttccatccaagagcatggaatgtctgtattttaaattatcatctatattgtttattaggtcttacatattcatgattagttcctaggttctttataggattaggtttttgttgtttgtttttccttctgtgaaatgtctttatatatggtctagttagtattgctggtataaaagttagtattgctggtataaaagttaacagtgcctgagttgaaacactggccccgtgacttactagatgaatggctttgatcacgtaacttaatccacaggtaagatggggacaataaaagtaccaacttttagggttgttagaagaattttaaaatagttaacatttgtgcagttactagagtagtacatggcaaatagtgttatatgagtaattaaattaatgaatattcataggttaatttcagatcaggaacattgttgaactctaatagtttgtatggttttttaaattggatgatatcatctgtaagctaatagttttatctcttccaattcttaacgtatctttttccaaaaagagaaaaatgttgattagaactttcagtactgtgtcagacagtatcagtctcagtcaacatggttatctttagctaatttcactttttgctgttgttgttgttgtagagaagagtctcattctgtcacccagactggagtacagtggtgtgatcatagctcaccacacagcctccaactcctgggctcaagcagtccgcctgcctcagcctcccaagtagctagaactaaaggcacacaccaccacgcctggctaaatttttaaaatttttttgtagagacagggtcttgccatattgcccaggctggtcttgaactcctgatctcaagtgatcctccacccttggcctcccaaaatgctaggattacaagcatgagccactgtgtcctgcccctgacttcacttttaaaggaaatgtatctcatcttattcaggataatgtttgcttaaagattttggtagataacctttaccaagttgagaaagttacattctctttctagtttggtaaaaatgttttgtcttttaaataataaatacatggtggtcaggaactaacaaaagttatccacattcaataaaattctctctttttttcctttagttctggtaatttatacttttttttaatttgagctattcttactttcctgggataggccatatttgataataacattctttttaatgtactgttggattctgttaagtgatatttaggattttgcaagtgaagtgagcctatacttttcttgtttggttcatctctaagtttgggatttatttttattatctttataaaagtagctggtcagttttcatgcttttttcttttttgtggaacagcttatatagaattggtgataggatcacaacttctgaggtcccagcaagagtcctaacatctagcagctctaccaccaggacaggccccctaaaactaattccaacaagcacctctgaaggtaaaaaaaaaaaaaaaaaaaacttttatagctctctatttggagtttggggcataagggatcagcttttgcaaaagtaattttctaggctaaaactgcatacaaactggcccagttatgtaccaacaaagaattaaaatggccccagactttgctccccaatattgtgattgtaagagctattaccaacaggtaaattggcctaagtctgtgagatagagagggaagagtctgtaagacttcttgctcagcatttgttctgattttagatatcttgaagttaggtaggcaataatgttatccagtgctttcaggctttaatatcatgtctctagtcttctcattcacaggttaaggctacctttccagataatccaacagctaaatcaccagtttccaagggcatttgcatcacctatggaaagcatcggatccttatacaccagatgttcttgacagctcatcccgtcattcccccctgcacaaaagttgctataccagcggacaagcaagacaactactgagcttcttttgattgtcaagtagatataatatcactgccagcaaaacagcacaaaaagtgtctcttcacagtatcactaccagttgggactatgctaagtaaatcagcttgcctagatgaggaccccttctattcttgggtagccaggatttgaaggagatactctgacctgtgccagtggtaagtgactaatacttttacacactgaactggtcctggaaactgagatgtcttctttgtaagtgaagaatatacaacataatcttgaagaacggcacagtggtatgggccacaagcatactttatgtgtgtaacggactgaaagacaaattaatcttggtgaaaggatttttcatctcttatttctatttgccagtgttagtcagtgttctgctggcttagattattacctttttctggttccttactgtgttttattctgatgggtcctagaaatccctctcctgaccacttgtcagaatcagaaagtgaggaagaagaaaatattagttacctaaatgagagttctggggaagagtgggattcctctgaagaagaggactctatggtgcccaacttatcgcctcttgagagtcttgcctggcaggttaagtgccttttaaaatattccacaacttggaaacctttaaatcctaattcctggttgtatcatgctaaactgttggatccaagcacaccagtccatatacttcgagagataggtctaagactctcccattgttcccattgtg

SEQ ID NO: 3364 - DNA, 2264 bp, Homo sapiens
accactcctggctatttttttgtatttttagtagagacagggtttcaccgtgttagccaggatggtcttgatctcctgacctcgtgatccacctgcctcggcctcccaaagtgctgggattgaacccttctaattttaaagaaccttgttattagaaaatctcagcctaatacaatctgaagttaagagttttagcagcattgtttttctaagtagatttagctatagattttcttctggccaaacaaggaagagtatatgcccttgtaaatgagtcttgttttgtttatttaaatagtcagtcaaaacgtagaaatcagtatacgtaaaataaaatgcatgagactattaaatcttttcatatactctacaaataaaatgaaatctgtgtgtggtcctggttgactgggcatctaaagggaatcagaaaagagattgtgaaaagttatatatatatcctcttccttattttagttttgctttttcctattttccataattaagtgccgtttacaaagtggcatcaaaaaattgaagcaggccaggcatggtggctcatgcctgtaatcccaacagtttgggaggctgagggcaggtggatcacttgagatcaggagttcgtgaccagcctggccaacatggtgaaagcccatctctactaaaaatataaaaattagccgggcgtggtggcatgtgcctgtaatcgcagctacttgggaggctaagacaggagaattgcttgaacctgggaggtggaggttgcaatgagctgagatcgcgccactgcactccagcctgggcaacagtgagacaccgtctcaaaaaaaaaaaaggttaggaatcacaaattgtgtaaatatatagcaactttaagaagagagaagaatgcttataacctagtgaatatttctgctgagccttagttgtcttgtctaaaggaaaaaagagggaattgtagaataaaagtatttgttagtggaaattattgacctgaaaccatatcatattgttagtgtaactgaatgtatcagaaattgttcctatgtaggtattctgtgaaactggtttctaaaatgttacaggaaactgtttcctttttttttgtttgtttgtttaagtggaggtgggaggaggtagggaagaggtctgaatattaaaatatgtttatgttcatgtgttcataatacgttcctttttctctctgtgtgtgtataaaagtgccttgctcatgaatgcatttttgctattcacttcgaaaggaagcctttccccagcttggcagctgaataaaccaatagctttgtacatgctgaacagagtatggtcatttgtcctcaacaaatgaaatagatcctactttgcttaaggcatattctacattcactaagtactgaatagagttaatagatacagtacctgaatctatatagtatgtctgacaggagatgacttggcgtctctagagaagaaacacacttgaagaagaaaatgtctgatattcagtcaagattcaaagtgagcttatttgtttatgtattttaagtaattccaggttgcacaaaataacaggtacctaaataagccttaagttaactttttgtgtggcataaacactgggtttgggaatgaatttactacctttgcactccctatgttggcttctgttaaatgcagtcaccataattaagataaaaagattattttatcctctatttatagaaatatttatcaaaggagtaaggaaactatttctaaaccagtggacattaactgtcttttactttctcagtgcagataggcaactttttttttttttttttttttgagatggagtttcgctcttgttgcccaggctggagtgcaatggcgcaatctcggctcactgcaacctccacctcccgggttcaagcaattctgcctcagcctcccgagtagctggaattacaggcatgtgccaccacgcccagctaattttgtatttttagtagagatggggtttctcaattggtcaggctggtctctaactcctgacttcaggtgatccacccacctcagcctcccaaagtgctgggattacaggcatgagccaccgtgcccagccataggcaacatttttattaaaacagtccagataccttgagcctcaaagaccataatcacgtcttttaatcccatctgcttcctaagaaaagaaaaaaatccatacatgcatggcaggagggcatatgataggtcccctctaggggatagaagcccttcctgct

SEQ ID NO: 3365 - DNA, 2635 bp, Homo sapiens
atggtcacgtgaccataggcaaccacgtggaaaccctctgtgaccacttttccagggacttaggggaaggtacctttcttccaatgtgtcttcctaggcagcccctgaggaggagggctgaatagatccctgaggttttggagagacccccatcactgactcctgctccctaaccctaccctcactttcgtccccgctcttcccagtgaaggatggtatgtagactcctgtacagacatagtggcttgcagaccctgacccagcccctgtggtcttagacaaatgtttttatttttgtcaccagccacccctgtcctgccgccttctctcgactccagagacctgttgcctcatctcttttggggaagagccggcagctcctcctcatcccctgccttaagtccagttctttgcctcaggggtctcgtttccttggccttccagggtccccaccccttttctccctgcctgattctctgagctctgggctccgtctgtattgggttgaggggcaaggattactgccttttgtaggtacttcacccctcaccccattttagcttccatagtctttgcaccaaatccaaattcttgataatttagatctcattttgagcaaaatttgctggccctctaataaatattttcaatataaatctgagcctttgactcagacatttttgccaaggagagtagaattaggaagtacccatatacatccagccaggatccacatggaggacctttctgatggctgcaatgactaggccattcctctgagtaactcacagtgtccttttgtaggcccttcttttccctgaaagactggttggtacttaccttgcagagcacatcctgggataagatccccagtgtctcccctgggaggctccccctctgtgtagcaccagccctgggaatgatggagcctagtgatcggggtttctcctgctgtcctttctgcaaaagttcacttgtttacccaccgcatgctagagaggagctcattggccaatgcttaccttgtccccaaaggggtgggttgtggagctcacttaggcagggcctctggctggggccagggttatgagataggcctgtatgaaatatgtcctgttctgggggtctgtctcttttcttctcttcaaaaactttgtgtcagagagtcccttctgagtcacataaatacctcactatcctggaaaacagggcctggatggtgactggggtcattgcctttgtggacaggatggagtgtggtgtggtctgaggagcaggttggggtgggggagagggaaaggatttgggatcttagttgctgccctaggttaggggctggggagtgtttattttaagatcctgccatgtttttaatcactgtgattttattttcattcccctttcctaaaaaaaattttttgcctccaactctctaagcactaagggctgtgcctgagaatggtagcattttggtcttttgcttcagaactgtggtatctttgtcttttttcattattattattattattattattattattactattgttttttaaaatgtcaggatgaattgtcagacatatggccatgtgtttgtcctctgcttctcccctgtgggaagttgtctccatgctgtgaactgctgtggggtgtgcagctgactcagtccctctgagcagtttccccactgtgtctgtcccatcatgcgctggatctgctcattctcctgctgtgggggtatgcccacctcttacccccttgacaccatagggctgctgtggctgggcctcaccagcactgtcttttgtgtgactcatggcatcctcgttcatccccaccgtgcctagcaggccttccttttcaccacctcggaacgcttgcctttcctccctccacaacaggacgctgtgcctcagtccttcacctacctcgccactctgccactgtccccattggtcctttctcctaaactggtctttgtgctctctttgttttttcttatttccctcttgtctctcattttttcttcccattcccctcccatttcagcccttaacttttctctttcccatctccactcagtattccaatggcaaaccctgatgatgtaacacctgcgatgagacatcggactctccggaactttctcatctgacacgtctttttcccagggttcgtacttctcctccattggtcccaggctaactcccctgttcctctgtggtgtctgtcagtccgtctgtcttctctttcctctgcccttcccacagggcagtatctgctgatggattcagtcctggtgtgtgattgttgtgatttgttcttccgtgcgcaaaaggaagagggctttttgagtcccttccaagtgagattgtaaatgtagaattttccactgttggatctagattttttttccttttttttgggggggtggggttacagagctgagaccttgtgcatgcatgtagaaaattgtaaaatgtaaattttttttaatatataaaaagcttgtttctacagtttgcagtggatctaaacattacggcaattttaggatttttttcttaaacataggaactaaaactgtacaaattttttttatataaaataaagacatttgacttttgtgggggca

SEQ ID NO: 3366 - DNA, 308 bp, Homo sapiens
ccctagtcttttcccagattacagtctctcctgaaagggcacagggccctgctgattgtactttcccctcctgagccccgactcacaaatccaagttcttaaaacatttctcttcagtggcccaacagggtttctctggggcacatggacatgactccagagagccacagtgccaaactcctccagggcagcaactggccctcctgtccctcaccccagccacaacaaaccctgggttctagggcagggatactcctgccacacagcccgagttagaaatctccttgctaggagcatttgcttccaca

SEQ ID NO: 3367 - DNA, 1496 bp, Homo sapiens
aggttcaaggcaacactgtggctgagtgaagagcacccgctctccctgggtgaccaggtgacccccatcatcgacctaatggccatcagcaacgctcactttgccaagctgcgcgacttcatcactctgcgccttccacctggcttccccgtcaaaattggtgagaggctgggcacaggcagcgggaggacctcaggcatggcaccctccctcagcgcagtccctggagagctgcaggggccggaggcacaggtggctctccgccagggctcaggcgtggctgtcttctcacagagattccccttttccacgtgctcaatgcccgcatcaccttcagcaacctgtgtggctgtgatgagcccctgagctccgtgtgggtgccggcccccagctctgctgttgccgcatcaggtaccccaacgggaggaagagggagcctgcacagctttctggtcaccaagccccgcgggttgagcgtggcccctctgccacctgcctagggaaccctttcccgtgcgaggtggaccccaccgtgtttgaagtgcccaacgggtacagcgtgctgggcatggagcgcaacgagcccctccgggacgaggacgatgacctcctgcagttcgccatccagcagagcctgcttgaagcgggcactgaggcggagcaggtgggacttgcccagggggtgggctctggcctctgcagccacacggcagaagtgacagctgtgggctctggtggctgcaggtgaccgtctgggaagccctgaccaacacccggcccggtgcccgccctcctccccaggccacggtttatgaggaacagcttcagctggagcggtgagcccctcatggggctggctgggtccctgtccccccagccctggcttggcggggagggggatagcaggaaggtgctaggaccccaggccctctgcaaggccaccctctgtcagcagcgctatctgccaccaaaggtggtgtgaggggtggggaagcagggccctgccttgtctcctctgcttgccacctgtctttgcctttgtcctccaaagccggtccccagcccctcggcttctgccccagccttggcgctcactggcctgttcttccctcccctgccctgcctggaagggccctccaggaaagcctgcagctgtccacagagcccaggggcccaggatcccctcccaggacacccccagcccccggtccacccagctttgaagagcagctgcgcctggccctggagttgtcttcacgggagcaggaggagcgggagcggcgcgggcagcaggaggaggaggacttacagcggatcctgcagctgtcactcactgagcactgagccatagccccgggagggctggccaggccactccctgcccgcttttgtaatttatttatttataaactctctgctgctgagcttggggcctggagccccaggaatgagcaggcaggggagactgagatggaaataaagagactgtcgcagca

SEQ ID NO: 3368 - DNA, 4235 bp, Homo sapiens
cggggtttcatcatgtttgccaggatggtctcgatctcctgacctcatgatccaccccccttggcttcccaaactgctgggattacaggcatgagccaccgcgcccggacttattgaggttttcttaatggcctagtgtatggccttgaagagtgttccgtgtgcgcgtgagaagcgtgtgtgtggttgttattgggtagagtgttctagcctgcttatgaagtccagctgtagtgttgttcttatcttctggttctttgttgatcttctagttgttctatcccttattgaaagtggggtactggagtctccaactgacatacttttcttttagctttttattttggaaaatttcaaacatatatgaaagaagagataatgtacttactcatcacccagcttcaacatttatcaacatcttgccaatcttactgaatctatccttccttaccttttttaaaaatgtttcctagagtgtgtcaaagctcatcccagatgtcctaatgtttctagtaaatgcttctgcacaattctaaaagacaaggatgtttttaaacccagccccgacactatcatacctcacaagattcatgctaattcctcagtgtcttctagtcccaagtccatgctcaagtgtccccccctgtccaggcaccctcttcaggggtcctccatgtttcatagcgagaaggggccctgagagttgggcaccccgggcaggctggctggagggggctttggaaaggaaggctttggccagcgtgtgagggtgcaggtctcaccagctcctgtttggtctgtttcaggaacaaatgtggtatctggggctggcggtctgagaagatggaaactgttagcggctacgaggccaaggcaggagaggctaggggtggggggctgggggtaggagatgaggtccaggaactcagctcctctccacatccatcccagagtagcccctgggctctggaaaccctgagcatttgtgggaactcagcgggcctgagtgcccagcccctgcggagtacacagggctcacccacatcatgggcccctacccagggtaccgagatcaaaagaggagtgtgttcctcttgaccctggggctgcatctcctcgttggtgacttcctggggttcagaccctgccacctcctccattttggggagcaagatctcatctgtctctgggacaggaggacctgggttctgcactggtgaggctgagtgtggggagcaggctctgagcccccagctccccgtgtcccctgctccccaggtgtacagtgccaccaacgtggagctggtgacacgcacacgcacggagcacctctctgatcaggacaagtcgaggagcaaaggtaaacccaggtgcgcctgcctgctgcccggtcacaccgtgtggtggggtcaccctggcctgggattaggggccagagtttcccaggatgagctgggaggcctccccattcccgtctgacccctcttcccccagacagtaggctccaggggtggaggtgggcaggggcgatgcgagcattgtgaccccttaccagctcccaccccttctccgtagcggggaagactccattccagtccttcctggggatggcgcagcagcattcctcccacaccggggtgagccggggctggacacgagacagggctggcgggggacacgagcatgggcgggagggcaccctctgtcaccttgatggctgagtccgccctgggacccacgcaggcaccccgtgcagcaggcagccagccccaccaaccccacagccatctcccctgaggagtacttcgaccccaacttcagcctggagtcacggaacattggccgccccatcgagatgtccagcaaagtacagaggtgaggtctgagagctggctggggacttgcctcgggacaagggctcttgcagacccctctctgggcctgtcatagttagggacccactccctcggctggcttctctctggactccactcctggagggcaggagtcatgtctgccttatccatggtcctcagcccttagcaaggggcttggcacagaaaaccggtagtttgtctttgatgaatggatggtgccacccatgtatggttttctattgaatttcatgagtacctgctggggccagcgtggcacagtgggaagggcccccagcgacgtggcctgggagtggagcgtctgccttggtggaacagaacagttacgctcttgcctcgtgaggagccttgagcaggtataggcggtaacagcaggcacagtgcctgcacaagcctagcgctctccccaccatctcaggaggattctcttagccacccaacagtcgctgggattcgaaccctggcagtcttgccctggggtgtgctggacataaaagtttggcaacacgtgagctggtgaccagctctgggctgaggaggaaaacggggctgtgggccaggcccagagagaagcccacagcctggcacctggcctccttgtccagaccagatgagctggtacgaaatcctcaggagccccagcctgggcccagggaggagggcagcttgggccacgtggccaggacaccagctcccgggggaggcgggcagcggcatctgagcagagcagggcactccaggccaggcagaaggtgggtaaaggcagctgcccacgaaccagagggcagtcctcaatggaagggccaccagccgtgcctcacccatgtcctgtggtcggctgggcaggttcaaggcaacactgtggctgagtgaagagcacccgctctccctgggtgaccaggtgacccccatcatcgacctaatggccatcagcaacgctcactttgccaagctgcgcgacttcatcactctgcgccttccacctggcttccccgtcaaaattggtgagaggctgggcacaggcagcgggaggacctcaggcatggcaccctccctcagcgcagtccctggagagctgcaggggccggaggcacaggtggctctccgccagggctcaggcgtggctgtcttctcacagagattccccttttccacgtgctcaatgcccgcatcaccttcagcaacctgtgtggctgtgatgagcccctgagctccgtgtgggtgccggcccccagctctgctgttgccgcatcaggtaccccaacgggaggaagagggagcctgcacagctttctggtcaccaagccccgcgggttgagcgtggcccctctgccacctgcctagggaaccctttcccgtgcgaggtggaccccaccgtgtttgaagtgcccaacgggtacagcgtgctgggcatggagcgcaacgagcccctccgggacgaggacgatgacctcctgcagttcgccatccagcagagcctgcttgaagcgggcactgaggcggagcaggtgggacttgcccagggggtgggctctggcctctgcagccacacggcagaagtgacagctgtgggctctggtggctgcaggtgaccgtctgggaagccctgaccaacacccggcccggtgcccgccctcctccccaggccacggtttatgaggaacagcttcagctggagcggtgagcccctcatggggctggctgggtccctgtccccccagccctggcttggcggggagggggatagcaggaaggtgctaggaccccaggccctctgcaaggccaccctctgtcagcagcgctatctgccaccaaaggtggtgtgaggggtggggaagcagggcactgccttgtctcctctgcttgccaccctgtctttgcctttgtcctccaaagccggtccccagcccctcggcttctgccccagccttggcgctcactggcctgttcttccctcccctgccctgcctggaagggccctccaggaaagcctgcagctgtccacagagcccaggggcccaggatcccctcccaggacaccccagcccccaggtccacccagctttgaagagcagctgcgccttgcctggagttgtcttcacgggagcaggaggagcgggagcggcgcgggcagcaggaggaggaggacttacagcggatcctgcagctgtcactcactgagcactgagccatagccccgggagggctggccaggccactccctgcccgcttttgtaatttatttatttataaactctctgctgctgagcttggggcctggagccccaggaatgagcaggcaggggagactgagatggaaataaagagactgtcgcagca

SEQ ID NO: 3369 - DNA, 91 bp, Homo sapiens
acaccagctcccgggggaggcgggcagcggcatctgagcagagcagggcactccaggccaggcagaaggtgggtaaaggcagctgcccacg

SEQ ID NO: 3370 - DNA, 696 bp, Homo sapiens
  SITE (106): n equals a,t,g, or c
tatttcataagcttttttagggtgaaaatgtggaatctctttaaagtttttattctctcattcaaaagtaatcattgattctagacactgcttccatgacaatgcntgtgattgtcacagaaggcagagcatgatctcctcaaacaatacttgctgtaggagggagggaaccaatgtgtgtttggaatctggcttcaccacttatcacctatgtgactttggccaagtcaccgcaaactgagtgcccaacaggtgctgagtccctttctatatattggtcaaaatcaatttaaagggccatcccaagtgtaatgtaaaggttcatctgaagattcagagattcatgttctctctctgttctatgttattattcaataggaatatatgattcttgataatgaactgtcagtgcagaaagaaccttcttttcattaaagaataactttttgttgacttctcattctaatttttttttcattgtgtatatgattagggcctggcaccttgattgtaaagctgcttatggaaagtatcactctccctggaattcccagatcttaaaacataacacaacaaaatctttatgtatcctagaaatgtggtgtttataactgactataattcttctcatcaataagactgatgtgttaatgcaggaactaaattacagtaggactgaggaaggaacaattgttt

SEQ ID NO: 3371 - DNA, 696 bp, Homo sapiens
tatttcataagcttttttagggtgaaaatgtggaatctctttaatgtttttattctctcattcaaaagtaatcattgattctagacactgcttccatgacaatgcctgtgattgtcacagaaggcagagcatgatctcctcaaacaatacttgctgtaggagggagggaaccaatgtgtgtttggaatctggcttcaccacttatcacctatgtgactttggccaagtcaccgcaaactgagtgcccaacaggtgctgagtccctttctatatattggtcaaaatcaatttaaagggccatcccaagtgtaatgtaaaggttcatctgaagattcagagattcatgttctctctctgttctatgttattattcaataggaatatatgattcttgataatgaactgtcagtgcagaaagaaccttcttttcattaaagaataactttttgttgacttctcattctaatttttttttcattgtgtatatgattagggcctggcaccttgattgtaaagctgcttatggaaagtatcactctccctggaattcccagatcttaaaacataacacaacaaaatctttatgtatcctagaaatgtggtgtttataactgactataattcttctcatcaataagactgatgtgttaatgcaggaactaaattacagtaggactgaggaaggaacaattgttt

SEQ ID NO: 3372 - DNA, 18966 bp, Homo sapiens
attcgagaaatgatggagtccttcgaaggccctcagcctgcggatgtgaggctgatgaagaggaaaacaggtgagagcttgcttagttcctgatattattgttctcttccccattcccacctcagtccctaaagaacatcctgattcccccagtcttcaagcacatgaattcagaatgaaaggtttgccatggctaaggaatgtgactctttgaaaaccatgttagcatctgaggaacttttttaaactttgttttagggacttttttttccttaggtaagtaatgatttataaactcctttttttttttgactatagtcggttgcatggttactttaagcgtggaatcaaatggagtggcatttagttcaggcggcttgttccttgccatggcaaagtatcaagaagatccccaagtcaagtcacatttgtaaagctgcttcccaattggctttgtcacgcagtgttgaagcagtgggagagagattcacctgttataaaggaactgactaacacaagtatcccgtctatatctgaatgctgtctctaggtgtaagccgtggtttcgccttcgtggagttttatcacttgcaagatgctaccagctggatggaagccaatcaggttgcttcactcaccaagtctagatattcatgaaaatggaacaagtctgtacaattttaaaaaaaggttgaaggagtggtttgttccaaaggagtgacttttttttaaaaaaaaagctttgtatatattaaaattgatgttactagaataagtacagtaccaaggacttcattatagaatttgttctgcctttaaacatggctacctacctggcagggctttgttaactactgaatacctgtctggtaatcactaaaacatcttaatgtttcccttttttctagtttgttatattcctattatgtccattgagagtaagcttagtatatcaaactctccatttgacagtgaagagaacatagtgaaagtctgtggcggcatttttataagtaattccttatttctgcctgaagaccacaaagcctcctggaggcgtaactgctcagaccggtcttcagggaatatttaaggacttagtggaatttatgaacaataagtctgatgagattagcctgggagtggtgtcctgcagctgtctaatctagagtggcattaacattctaatctccttgagaatgccttttatagtctgttcaaagcaagtcattgatggttcttcgaggtagtgttaactgaagtgttcttcagtttgtcaagataatgttcagtgcttggcacttaaataacattttttgcaagaactccaaggcacattattgaatgcctttaaccaagtgcattctgggaagtttgcttgactcattatcttgcttttctgcagcattctgtgatttgagtcatccatgaatccatgaataaaagttacattctttgattggtaatattgccatttataacaagactcactaatgagggtatcactttgactgactgatttgttaaagtttttaagcctctcattttcctaacccagaaatcacagcctgattttattaaaagtagagcttcattcatttcataccatagataccatcctagtaaatccagaacatatacaaggttcatgtgagtctgctttcttgacatgatagcattgtttgatgcagtggatatgtcagaatgactaacctaggagtttgaaactcctaagaaactaaaacctgtaagacatttaaaagtctccacaattttaatgtatacaaagctatgttactgtgtaacacattacagttcaaattcactccagaaataaaaggccagtaggattagggactcactggtagtttggagtctcccagcacacatccctcctagtgggatgatctattcacatatctcccagcttttttatttttgcttctgtatatcacagtgagtggatggcccttcagctttttctctcctggccagacatgcagtcttgcctttagatatcgcagagacaaaattcacagcatgtcttaaatcttccaggatttgcaagaaccaaattgctcaacagtatgtatgtttagaggggttagactcctttttaaaatctggatatctaaccacctacttaaatctgtttgatagtgtcaaaccacccccacccttgatcctcccacccccaagaaaaagaaaagatgctcctgttaaatgaaggctctttaggggtaggtgctaggtatactcttggctagattgattcagctcagaattttgactttttaaagctaagtccttgtagtcacatggttgacttgaaggatgaggtggtgtgtgcatttatgagcttttcctacccccctgaagaaacttcattggcctcctggttactcaccttgaagagagtaccatccattttagtgaaaaacacatctgtcacctaggacatgacatggttgcagttgacaggaaaaaaaaaatctcatttagttgttttagagttggtggcattcagaatagtccctcttgagaaagaattgtaaccagattccctttaaaaatgagttcccctccctttccccccaaaggactcatcctgaagcagaaggtgtggggggaaggagaaatgtaaaggcttttactttgcataaggatgggggactggggaaaaaggtgaagcgaagcccaaggacaccatgctaagggcaaaagtaagagacagtctcagaactgagagaattgtgtcttctgctttttgaagtagactgtcacactcaggcagcctgtcaatgctgaatgttaggacttctgtctccgctggagacacggcctggtgcaagtcagcgtttagtgtttgacagctttctcagcactccctgactccgtttacctttactccgcatcccattctcttactgcctatctgaaggattggatgggcagagtataggtggcggtggttggtcctccccgtatgttgtccatttaattccagagcactgatttttccgaagtgtgctctgccctgggaaaatggacacatgttcctcacaatgggaataactaattacttcttttcttacagaaaaagttggtgattcaaggaaagcacattgcaatgcattatagcaatcccagacctaagtttgaagattggctttgtaacaaggtaagcatatgttcttcccaaatagacaaaactcctttaggatattgctgtttttttctgtttgtttatttgactgtccaaacaaggaaattgttactcaatcatcagtaatattcatggtttgttactttccttgggtcctcctacactggtattagatgatagaactagaggtttcgtttattaagatgcacgttctgctgggcatggtggctcacgcctgtaatcccagcactttgggaggccaaggcgggtagatagcttgaggccaggggttagagaccagcctggccaacatggcaaaaccccgtctctactaaaaatacaaaaattagctgggcatcacggtgcgcgcctgtaatcccagctactcggaggttgaggcaggaaaatctcttgaacacgggaggcagaggttgcaatgagccaagatcgcgccactgcactctagcctgggtgacagagtgagactctgtctcaaaaaacaaaaaaggacaacaaaaaggatgcaggttctaagcccagtgattaagattttaggtgtgtttcatgttactgtttattgaattctagagctctcagtttttggcgtagtctcttaactgtattaaccaaaatagttgagaaccctgctaaagttatataaggtttaccattttgaacttgaatgttgacattgatattttgagagtgctcaaactgtgtcccctgtccagtaggggactagacagtggttagtttaccttgtgtttgtgtatgtaggatgggatgtatagtgctctgttgatacaaggaagagcttcaccagtggcttgctgtagagttttcaaattaactgaaccctttcctcggcttgataataatgggattcttcttcaacatacaacaaactttgtttttcttgggagattttaacagtgttacattctgaattttttaggttatgtccccatgtctcagctacgtgagactttctgcttttctgttagttactgggacctacccgtggccccactgttattgttactagaaagcctggcctaatgtgagaaataattacagataaaactttttttttcagtgctgccttaacaatttcaggaaaagactaaaatgcttccgatgtggagcagacaagtttggtaagactggattcagctgtttgcaatatgcattaaaacctactaactggggcagggagcagtggctcactgtaatcccaccactttgcaaggccaaggtgggaagatcacttgaggacaggagttcaataccagcctggcaagagatagcaagaccctgcctgtacaaaaaaagaaattttaaattatctgggtgtggtggcacacacctgtagtcctagctactcaggaggtttaggtgagaggattgcttgagtccaggagttgaaggctgcagtgagctatggtcataccactgcactccagcctgggcaacaaacaagaccctgcctctcaaaaaaaacaaaacaaaaatctgacaaatagggttgttaactgtgagcctgaggaaaagtatagattttagtgtacttaaacaacttgtctgttttctttaaatcttttcccttaggttagataatgctgctcatgattgtgagagcacagaaagttcttttgttttctagaattaagtctgctcacctggtttgcattctgcatctgcctttctttagtgcagggtagtgtcagtcccactgtggcccaaagtttgcattctgcgttaaccaagtcacaattaatgaggttttactataggcacaaatgcttaaaaaagaaaaaaacgattgttttgtgtggttaaaataaaaacttgtggggattttaatgtatttctttggtgaaaatacattagttgtttgtctctaattggatcactttcccttctagactctgaacaggaagtgcctcctggaaccacagagtcggttcagtctgtggattactactgtgatagtaagttcatacacgatcttttggtcttcatgttaaaaattgacctcagttgtcaggagatggagaccatcctggctaacacggtgaaaccctgtctctactaaaaatacaaaaaattagctgggtgtggtggcacacacctgtaatcccagctactccgtctcaaaaaaaaaaaaaaattgacctcagttggaaatttctgttctcctacccttttgtaaggagcagcagcagcttcgggttgtcccttaaaagacaggatttttagaatcttctccatgtcagggtagaaaatacactaggaatgtcacaaatggatttgtatgtacttgaccctatcttggaaaactttggtacattggtggtgggaatgcatgtgtatgtcatttgtctcatttacccctagcgatcattcttcggaacatagctccgcacactgtggtggattccatcatgacagcactgtctccttacgcgtctttagctgtcaataacatccgcctcataaaagacaaacagacccagcagaacagaggcttcgcatttgtgcagctgtcctctgcaatggtgaggttctcatcgattctttcctttttaaaagaaacagctttaagaggcaaatgtggttcatccagttttgaaactgtctgaggctcctaaagcccaagatgcaaggctccctaatgacagtttttgcactgctaaattacaggactgatgacttcagtaagtagtaaaaataatgtgtatacctataggcaactggcagaattttttgagccacagtttagtccttggtactttgttttttgttgttgttgttcttttttgggatggagtctcactgtcgcccaggctggagtgcggtggcaccatctcggatcactgcaacctctgcctccagggttcaagcgattctcctgcctcagcctcctgagtagctgggattacaggtgcccgccaccacgcccagctatttttttttttttttttttttttttttttttgagagggagtctcgttctgtcgcccaggctggatggagtgcagtggtgtgatctcggctcactgcaagctccatctccccagggttcacgccattctcccgcctcagcctcctgagtatctgggattacaggcgctcaccaccatgctcagctaattttttgtatttttagtagagatggggtttcactgtgttagccaggatggtcttgatcaccacctctgcctcccaaagtgctgggattacaggcgtgagccaccgcgcccagccacgcccagctaatttttgtatttttagtagagacaggtttttgccatgttggccaggctggtctcgaactcttgacttcaagtgatccgctcatctcagcctcccaagtgctagatgtactttgttttagattggtttagcatttgctcttttggtaatactggaaaccttcacatcttagaggaaagagagatattcctttcttgaggtttcatatctgcaaacacaataaggaattaattgccttttattttttaatagaaaactacttctttgaatggggtggatggtagggagagatttttaattgcattacacgtttttttccttcacattctccttcaggatgcttctcagctgcttcagatattacagagtctccatcctcctttgaaaattgatggcaaaactattggggttgattttgcaaaaagtgccagaaagtgagtggcttcattgtccttatttcaaactactgcatatgcacatttgtacagtgtgctaactgaacgccaagcctgtgccccaagtatgttgagacactgtgatcctccctgattgccaaggccaggagggacacgtttgtcttcttttagtgattattccctactgtcctgtgtaaccagttgatgaagttgcctgaaatggtttcagatcaggagaaaggcaagtatggcagatgggttgagaacacatgctttgcaaactgcagcagtatagtgctaacccatccagaaataacccattccttccagaacagcgtgctaataatttcatgtatatagtgcttaactctaacacggtaaatttccctttttttagtatcattgcacattcaaaaaactcttcgttagatggcaggttacaaggtagaacaatgatactacagggccacttgcttactgaggaatttccccatgaagagccctccccctgtgaaatgtggccttgctggcatttgagaactgacaaagggtggagtgaatcagttggtggtataggggcactaattgtgggaatactgtgatagaatcacatgattggatctttgtggtttcagagacttggtcctctcagatggtaaccgcgtcagcgccttctctgtagctagtacggctattgctgctgctcagtggtcatccacccaggtaagatcgaggatctttttgctcaaggtagtgtggtggtggtgcccagattcacagacgtgacctctcctgtggtactcgcagtatgagctcttttcttttcttttttttttttttttttttttttttttttgagacagagtatcactctcgtcacccgggctggagtgcaatggtgcaatcttggctcactgcaagctccaccttccaggttcaagtggttcttctgtctcagcctcttgagtagctgggattacaggtacctgccaccacgcctggctaatttttgtattttagtagagatgggatttcaccacgttggccaggctggtcttgaactcctgacctcaggtgatccacccacgtcagcctcccaaagtgctgggattacagccgtgagccacagcgcccagcatcatgagctcatttttagggacttctgaatttttttccttaatgcctactaagtttgtctttgtctcattttgatgttttgtagtctcaaagtggtgaaggaggcagtgttgactacagttatctgcaaccaggtcaagatggctatgcccaatatgctcaggtaggtagattttagcagcatccaccttatagtcttgcagagtgtgtctgagaatagcagctttaatggtggacttttcttcagtattcacaggattatcagcagttttatcaacaacaagctggaggattggaatctgatgcatcatctgcatcaggtagtaaacttcatctcccttttaccttttgtttaagcacttacagttgaagaaatatgattaaatgtcctaactggaccaaaagctacaagtccatttctctgtaagattgtagggggcatggccgggcacggtggctcacgcctgtaatcccagcactttgggaggccaaggcaggtggatcacgaggtcaggagttcaagaccagcctggccaacatggtgaaaccccatctcagctaaaactacagaaattagccaggtgcggtggcaggcgcctgtaatcccagctactcaggaggctgaggcaggagaattgcttgaacccgagcggcagagattgcagtgagctgagatagcgccactgcactccagcctgggcgacagagtgagattctgtctcagaaagaaaaaaaaaagaatgtagggggcatattcagggctgtcatcatgtacccaaggttctggggaagaatacggttatttgtgtacaccaggagttaatacaaggtcttagagaccatgttgtgatgagtttaattcttggaattcaactctgtatttcccctctctgtgtttggagtcgtgagtgcccacgtaagttcaggtgagcagagaggatgtggccctggagactggtgctcagacatcaatcagaagagctactctaagaagccttggctttaatttttgtttcaggctttaaaaagccttgtgagttaaatctttctcaaccccagagcaaatatagatcctttcttctcttccttttctcttcttttttttttgagacggagtctcgctctgttgcccaggctggagtgcggtggcgttatctcggttcactgtgagctccgcctcccaggttcacgccattctcctgccttagcctcacaagtagctggaactacaggtgcctgccaccactcccggctaattttttgtatttttagtagagacggggtttcaccgtgttagccaggatggtctcaatctcctgacctcgtgatcggctcgccttttccttccaaagtgctgggattacaggcctgagccactgcacccggcctcttctctttttcttagccatgatacagaatccttaactttgtatatcacatctagtagaattataagaaaatgaaaatgtcacagattccagggtacttagtggaagttagcttatgaagaactgacatatacaatgacagaagaaggctagattgggcattacaaataaagatgtttgggttggcgttcagtgccttggctttccctaacacttgtgtttatcatcaggcacagcagtgaccaccacctcagcggctgtagtgtcccagagtcctcagctgtataatcaaacctccaatccacctggctctccggtaatcctgttgtcctatatacaaaactcgtggctgatggggaaattttgttttgctatacaagtattaccctttcctgttgtatgagccaggattgagtaatacacacttcaaccttatttctttctgttgttttaaaatattaattttatgatatatatgtgcatgtatattttaaatataaaatttcaactgtgtatttacactttatgcatgcttgacctttagaaagttgtcgccggggccgggtgtggtggctcgcgcctgtaatcccagcactttgggaggccgaggcgggtggatcacgaggttaggagatcaagaccatcctggctaacacggtgaaaccccgtctctactaaaaatacaaaaattagccgggcgtggtggcacatgcctgtaatcccagctactcgggaggctgaggcaggagaattgcttgaaccccggagacggaggttgcagtgagccaagattgcgccactgcagtccagtttgggcaacagagcaagactcctcttgaaaaagaaagcaaaaaagttgtcaacatgtgttttgctgagggattgccttagattattgctacagtgtgtctgtcaggggagcccttcctcctggatgattgcagtgatttagctctcttaaaaggctttacagttgaaattatattgaagctgctgttctttccagactgaggaagcacagcctagcactagcacaagtacacaggccccagccgcttcccctactggtgtagttcctggtaccaaatatggtaagccaaacctcatggggctgttgacagttggaaggtcttagttgttgtctttgtttaatgagagttcttctccctttgcgggtgtcagagggacacttggggatgtgagacagagaagaaacattaggcctgctgcatctcactggcttagaatttgaaataaagccaatttcttacctggaatgactgtatgctggattttgtttttgcagcagtacctgacacgtccacttaccagtatgatgaatcttcaggatattactatgatccgacaacagggctctattatgaccccaactcgcaagtaaatgtgctgctttcctcctcaatttcactagaagtagtttcgcttagtgcatttatgaggcataaaatgaaatatttcctgcaaaagaatatatgactgagattagttttaacttcttcaaagccaccaaaatgtaatttttatatggagattgtaagttttaattgtagggttaaaaaatgttttgaggtataatatacacacaaaaaaatacacaaaacagaaatgtgcaattctttgaatgtttatacatgtctatacatttgtatattacatgtgtatatacaccaccacttattcccagcccacctaatcctcatgcccattgctggtcagtaacctatgtcttcaataaccactattttgatttctgttgccatagattattttgtcaagttacaatttatggaaagacctagctagaaattttaaattgtacttttctccctattgtttaaccttttagagtgtacaaatcagtggcttttaatatattcacagtgttgtgtaactgtcaccactgtctaatctcagaacattttcatcactcgaagaagaaaccctgtacctgttaaacagtcactccccattctgtactctcctccagtaactactaatctactctctgtctctatggatttgctttttttattttttttgtggcacgatcttggctcactgcagcctccacctcctgggttcaagcaatgctcctgcctcagcctgctgagtagctggtagctgggattacaggcgcccaccacacccagctaatttttgtagtcgagacagggtttcaccttgtttgccaggctggtctcgaactcctgaccttaagtgatccacccgcctcagcctccaaagtgccaggattacaggcatgagccactgtgcccagccctctgttcttgacatttcatataagtggagtcagacaatagattaccttttgtgtccagcatcctttactttgcctccctgtgtattcttgagggtagaatttagcagatgtatggagtgatgttttatttttggtggcatatataacttttaaaagggaaaaacaactttaacaccccataaataactctatttatgaccgggagctgtatatatagaacagtaataagtatttttaacaggaacttggcattgataggttgtggtttctgagagattgaagtgtgaagctgtgtgtgacgtgcctaagcaggccaagcctctgcatacctcttccatccacttctctcatttgtgaagcctggccatttatttccctgtcagttctttttttttttttttttttttcccgtcagttctctttggtggccttagaagttgtgtctgtaggctgggcgcagtggctcacgcctgtaatcccagcactttgggaggccaagatgggaggatcactaggtcaggagattgagaccatcctggctaacacagtgaaaccccgtctctactaaaaaaaaaaaaaaaatacaaaaaaattagccaagcgtggtgtcgaatgcctgtagtcccagctactcgggaggctgaggcaggagaatggcgtgaacccgggaggtggagctggcagtaagcgaatgtcgcgccactgcactccagcctgggtgacggagcgagactctgtctaaaaaaaaaaaaaaaaaaaagttgtgtctgttagccacgccaccttacccagaagagacagacactgtctcctgggtccctgttgagcagatagagtgagcgactggaaaatagaggagaggatatgtgacacctctcctctgttgcaattcctgctgagcttgggtcccttcaccaacacctccttccagctctgtgctagtgtttacaccctgtgtgtggttgcctggtatccaatggattctatgtggatgggcccaatgatgagctgttgtcatggcagatgtctgaactccatgacacgcccacctgttctggctgcctggtttatgtaaatagtctgtggaacagagtgagacaaattgctctttgggtgccctctaggtaggcccagggattaaattaatgggaactagactttttaaatttttattatcattttttttgagatggagtcttactctgttgcccagactggagtgcagtggcatgatcttggctcactgccacctcctccatctcccaggttcaagcagttctcttgcctcagcctcctgagtagctgggattacaggtgtgccatcatgcccagctaatttttgtatttttagtagagatgagttatcaccatgttggccaggctggtcttgaactcctgaccttgggtgatctgcccaccaccacctcccaaagtgctaggattacgggcatgagccactgctcccggctgggaactaaactttttaaagaaatcatattctatttttactctagcagtgtcacacctctttgctaggtggttcatcacctttacttataccaaggtgtgcccagggtcttttctgggcaggaaatatcactagtccacaacatactttatcttttttttgacaaaatatgtaatcgactgacatagcagaaagtctgcattaattgttttttgtttgttgttttctagtactactataattccttgacccagcagtacctttactgggatggggaaaaagagacctacgtgccagctgcagagtctagctcccaccagcagtcgggcctgcctcctgcaaaagaggggaaagagaagaaggagaaacccaagagcaaaacagcccagcaggttagaacatgacccatatttctttcattgaggtattgggctgaactcttagttttggggttgtagcatttatgtcagtattatttggattcttaaaaattgggcttcacattttattcatactaagttcttagagcattttgcaatttgttattgttaccatatcttgactgtcagcctgtgtacttagggaaaaaagccctggaaatctcaaagcttttcaagcagtatttatgaatgactttggttatatgtgataacatctaatggaaatatttgtaggtggaagtaagagtaaaaggggtttgttacagggcatatagttgagataagatccttaatggctcattctcatggcacaggggattaaatatttttttgttggtgtttgttgtttgacattagattgccaaagacatggaacgctgggctaagagtttgaataagcagaaagaaaactttaaaaatagctttcagcctgtcaattccttgagggaagaagaaaggagagaatctgctgcagcagacgctggctttgctctctttgagaagaaggtaatagcaggaatggccagtatgtcatgatgggaacttacctaaaacttgagtctcatggcttgtcctctgtttcccagggagccttagctgaaaggcagcagctcatcccagaattggtgcgaaatggagatgaggagaatcccctcaaagtaagggagtaccaccagtgttttaaagaccctatctgtggtttgtgtctcactttaaggctcaactgcatcttggctaatgtgattcctacttaaaactgaatgtgatcactgttgatgggtattggagcagtttctgcacatagattccatgtcggggctttgttttctgtgagagcagatgagatggagtgatgaaagaagcttcaattcctaagctcagttaattaagtttcattgcatctgtgagtggagagttttaatggtctggaaagagaaaattaagacaagaaaaagcttgttttactagatagatactggtctgggtgggccattattctgatatgttgtatttgggatttttatttgtggtcagtggtttgaaaatagtcactcagtctaggcaacattgcaagacttcgtctctactgaaaattagaaacaaattagttgggtgtggtggcttgcatctgtactcctagctacttgggatgctaaggtaagagaattgcttgagcccaggagatcaaggctgcagtgagccactgcactttttggggatcataccattgcactccagcctgggcagtgagcaagaccctgtctcatttaaaaaaaaaaaaaacaaaaacagtcttggcacagtggctcacacctgtaatcccagcactttgggaggccaaggcaggcggatcatttgaggtcaggagttcgagatcagcctgaccaatgtggtgaaaccccatctctactaaaaatgcaaaagattagccaggggtggtgacaagcgcctgtaatcccagctacttgggaggctgagacacttgaatcacttgaacctgggaggtggaggttgcagtgagctgagattacgccactgcactccagcctgggcaacagagcgagactccttctccaaagaaatagaaaaaggtagtcacccaggaatccatttcttaggctccaagaaggttggtaccaggaggctgtcaggcctagcactcaaggacctgactgctccacgcagttgacaaaatgtgattcattactaaagtgtgacatgcagtaatggggatttgttaacatttcggatgaggcattactttatccaggtacatagccaccgccatcttcctattgtacatttccagtgacctgtcctccttttgtctccagaggggtctggttgctgcttacagtggtgacagtgacaatgaggaggagctggtggagagacttgagagtgaggaagagaagctagctgactggaagaagatggcctgtctgctctgccggcgccagttcccgaacaaagatgccctagtcaggcaccagcaactctcagaccttcacaaggtggccatgcttctgagctgatctgagggggcgaggggaggcagtgagacaatttgagtgccctaacagtcctgacggttccaaaaatacctgccatctaatgatggccttacagaaagctgttcccgatgacagtggacggagtctggcagctccacacacatcaaactatagtttttatgtgattgtgtattgtttgggctttggctcttaaagtacagtagatgttactaatgttaggacatttcaaattaagatggtctgagtccttactgtgtctttcaaatcttttgtgtagcaaaacatggacatctaccgacgatccaggctgagcgagcaggagctggaagccttggagctaagggagagagaggtgaatgggaaactgtgccacaaggaagaggatattgggataattgcctttagcttttatttgtagcatttagttccagatcccaggggcagggtaggaggatttgtcatacccttgtcatctgaccattgtagttcatgtagcctagacccagcctctgtgtgccttgtgagcctcacattgtcccttcatcataagggtgcacaaggcagaagcacactgccgagactctctcacagcaatgccagagcttgctgcttaaatacgctggattttgttatggagagagtggtctagtttggcctggccagggaagccttcatgggcaaagaagtgcgcttcaaattaatcccaagggacagcaggacgtgaggttattgcaggtgatatgaaaggaagggtgggcagggcatggcaagcagatctgggaacaaaggcaagagagaagcctgtgacacaataatgggcaagcagttagtgctggtggttggggcaggttggcggccaggtgggcagggatttaaatgcaaatagaggcctgtggtttagaaatgagcaagtgggtttgaaatctcccacctgagatatttctgaagtgtttgtagttaaggcttttgcttttcttctccccacacccttcctgccctactatctatggttccacctccccagcgactgctgaacaggtctctggaagcctccttgatgttggaggtatgcctttccaaatgttggaggtatgcctgtccaaatgctgaggagaacgggcaactctgccttcctcttcgcaagctgtacccactgcccagtgggctggttgagtagcttgacagagggtggctaattaaataaaactgcttgttggagacatagttctgcccctggttccacacaattcatatttacaaatttaacatttcagatatgactaggtatgatgatgggaacaagggaatttggtatttcagagcagtctaaaaaaagcattcttcagatttaaaaatacttgaggggatagttttgaataggtgcattagacggttacaggttgaagtctgtgaacatttccagcagtgttttttctcccatgtagatgaaataccgagaccgagctgcagaaagacgggagaagtacggcattccagaacctccagagcccaagcgcaagaagcagtttgatgccggcactgtgtatgtgatgtgcacattttccagttcgtaagctggggccctggctgttttaagtaactgtgtgtttgccactggcaggaattacgagcaacccaccaaagatggcattgaccacagtaacattggcaacaagatgctgcaggccatgggctggcgggaaggctctggcttgggacgaaagtgtcaaggcattacggctcccattgaggtaagcagtggggtcaggtcttgatgtttgccaggcttacaggccggttccagagatgagatcagagcactcatagagcctgggagccaggagcagctttaccttagcatgaaggggcagattacaggcatgagctcacacctgtaatcccagcactttgggaggccgaggagggtagattgcctgagcccagaagtttgagaccagcctgggcaacacggtgaaaccccgtctctactaaaatacaaaatattaactggacgtggcagcgtgtgcctgtaatcccagctagtcaggaagctgaggcaggagaattgctagaacctggcaggaggaggttgcagtgagccgagatcacgccactgcactccagcctgggcaacagcgactctgtctcaaaaaaaaaaaaaaatttagtagggttttcacccatgataagaaatctttaaattgatcagagcccacattgaggcatcatatcccaggatcggaggcccctacccactggccttctaggcaggagctccacccgtaattgcccctgctctgtcctgggagcacagcttaggtcagactcttgtagaccatgttcatcctgtttatgtgagttctgctgacattgagctatcctgtataatgtgtgcctgtaattaccagacctttcccagaccttcagaggaatactttggggccctttcctaggcgtggatgcttgctgagcaggcattgaggggtgggtgatttgcttcatctgcctgtgttccgtagcccattttattcctccagtccttatacttgctcctggtctcttctggagaaatccttgtcttcatatacagttttctctcttctgtctcctggtgggtggtcctgctgggtaaggagtgggcatggtgagaggtggagcagcccataccctacctcccagctgacagtctctgtgctttcccaggctcaagttcggctaaagggagctggcctaggagccaaagcgagcgcatatggtttgtcgggcgccgattcctacaaagatgctgtccggaaagccatgtttgcccggttcactgagatggagtgagagagagagagagagagagatgacaaggagcacaagaagtggtccatctcccgaattcgctgttaccgcctgtctctttaagggcatgccttgtgctgttaatagatcttagggtgaaccacttcattctgcagggttctccctcccaccttaaagaagttccccttatgtgggttgcctggtgaatggccttccttcccgccagagggcttgtgaacagaccggagaggacagtggattgtttatactccagtgtacatagtgtaatgtagcgtgtttacatgtgtagcctatgttgtggtccatcagcccctcacattcctaggggtttgagatgctgtaggtggtatgtgacaccaaagccacctctgtcatttgttgtgatgtcttttcttggcaaaagccttgtgtatatttgtatattacacatttgtacagaattttggaagattttcagtctagttgccaaatctggctcctttacaaaagaaataccttgagaaatggg

SEQ ID NO: 3373 - DNA, 1130 bp, Homo sapiens
ttttttgtatttttagtagagacgggatttcactgtgttagccaggatggtctccatctcttgacctcgtgatccacctgccttggccccccaaagtgctggaattacaggcgtgagccactgtgcgaggcctaatttttaaaatttttgtatacagatggggtcttactgtgttccccaggctggtctcacactcctgtgctcaagcgctcatcttgcctcatcttcccaaagcgctaggattataggcttgagccactgtactatcctgcagaacaaaggacagggagattagactaaaggatggaggcttgagacatcataccacaagcaaggatgtgtatcataacagaaattaattgcggccaggcattgtggctcactcctgtaatcctagcactttgggaggccaaggtggccggatcgcttgagcccaggagttccagaccagcctgggcaacgtggcaaaactctgtctctacaaaaaatacaaaaattaaccaggtgtggtggtgtgcatttgtagtcccagctacttaggaggctgaggtgggaggatcacttgagtccaggaaggcagaggttgcagtgagctgagatcacaccagtgcacttcagcctgggtgtcagagctaggccctgtctcaaaaaaaaaaaaggaaaaattaattacacctgagggaaattcccatgcaacatttaatgaatgccttcagtgctgttataatgcattaatttctatgagaaatgttctctcttttttgtgccttttaggaaaattgcattttggtgatagaagataaaaacttggctaattaggccaggcatggtgggtcatgcatgtaatgatatgggaggctggcatatcacttgaggccaggagttcgagactagcctgtccaacacagtgaaaccccgtctctactaaaaatacaaaaattagctggatgtggtggtggatgcctgtaatcccagctacctgggaggctgaggcagaagaatcgcttgaatccaggaggtggaggttgaagtgagccgagatcacgtcactgtactccagcctgggtgacagagcgagactccgtctcaaaaaaaaaaaaaaatcagtcacgcatggtggtgcacaccta

SEQ ID NO: 3374 - DNA, 32191 bp, Homo sapiens
tgcctagtgaggacattacataaatgtataatttgtgcttgatgcaagactgtaatgattggtgggtgcctatgcatgtcaattaagagctggattcaaattgaggggtttaaaaaacattttgctagctataacaaacgtttttgatggttgagccccaggaaactagtttatgacactgatgtaattcaagacttgcctcaaatattgcttttctgattcatactaatcttttctttccttcttgatcactagtgctgttaactaccactgtttgacatttcatctttgtgctttgttatagtttgtgcacttaaatcctaagttctcaagagtagcttctttcttaggtgatctctgatgagtgccgacgaggtgtctggcactgtgctattctagaaggaatgtgatattatcttcactttacaggaggagaaactgtgtgctgtgataggttgagactgtaaagtgatgtggttacatgtgttagaaatggatttcaaatcaggcctctctgatgccagagtctgtgttctcagctgttcagggctgttgcttcgttaatgagtggagctaaaacacattagaggtggtggactaaggcttcatatggcatagagaagggggttccctggttgaatattagagattgggtcatgtatacagtgatggacactaatgaacaaaccaggagtaagcactcttgaggaacaattttatctactatgcagatttcttcatcaatccctttttaggattggtgttcacaaaattggcagttgattaatttaaaaaataataataacaaatatctagagttaaaagaattcttttctgtttcccattccactcctttgatgttaacaatttgatgtttatgcttctattttttttgctttgcttatattagcatatttacacataagtgctcataaggatatatataaatgttaccttgttttgtatttcccatgatagttttccagtactaatgaaatatagtactgtttcagagtcagatattaaatagtaatttaattagatatttaaaataaatctgtatctaataaacacttttctctgctaattaggaaggtagggcaatatagtgaaatgcgtttgggttttagagtgagaaacactcagttcagatcgtttgtccacatttattgacttggcttgagaaagttccctgtcctttctgaatttcagtctcttgccttgcaaaagtttcctcttcacttttgccacctttaaagatagagcatctgctcattcatgaaaaatttattttttagcaacctttaattttttttttgctatttttaattctaattatatatttttttaaattatgaggtaggtccgggcccagtgactcaggcccgtaatcccagcactttaggaggccaaggcaggcggatcaattgaggtcaggagttggagaccagcctggccaacatgatgaaaacccatctctactaaaaatacaaaaattagctgagtgtggtggtgggcacctgtaatcctagctactcaggaggctgaggcagaagaatcgcttgaacccaggagttggaggttgcagtgagccgagatcacgccactacactccagcctgggtgaaagcgtgggacttcgtctcaaaaaaaaaaaaattgtgaggtagaaacataaaaaatataattgggtatgcagtgaaaagtaaatccgcatttcgtaactgtctcccacctacccagggtcctccccaaaagaaaccaacgcttattaccagttgtttttgtgtgcctttccagagatgtcctatgtataccctgatgctgattatattcttcctaatgagcaaagatcacattcttgtttttttttccctttttttcttttttttgagacagagtcttgctctgttgcccaggctggagtgcagaggcatgatcctgactcactgcaacctctgcctcccgggttcaagtgattgtcctgcctcaccctcctgagtagcagggattatgggcacacaccactacacctggctaatttttgtatttttaggagagacggggtttcaccttgttggccaggctggtctcaaactcctgacctcaagtgatctgcccgccttggcctcccaaagtactgggattacaggtgtgagccactgcacccagctgttgaccacattcttaaatatgaaaacttaaggactgttattctgtagatattttttctgattatttccccattattttttacaagtctgccacaggtgtgtatttagcagctttaccaactcctggtggtattcagattgctgggaagactcctaatgatggctcatatgaacaacacatctctcatatgcagaagaagataaatgacacaattgctaaaaacaaagagttatatgaaatcaatcctccagtaagtaaaacaaacctacattgtgaatgtatcagttattgtttattagtatatttttaggttatcttattgaggacacaagatttttttttcactgtttagctctccttattactcattctttcacctccctttatgtctttgctcaactgtctccttttcgggtaagcctactctaacgatcctatttaaaaattgtgacttcatttttgccacttcctatgacttttccctcttttattgttttctatagctcttatctttgtgagtgtgtgtgtgtgtgagtgtgtgtgtgtgtgtgagtgtgtgtgttttgttggtcttttgcctgttagtactggtagaatgaagcttcatgagggctttgtttctattgcctagaaaagttcctattggtggtagtctcttagtatttgttgaatgatgaaataaatggtttaaaatgttctttgttagtaaaaagagattcttattggtggtaaaaatgtgaaagaatatagtttttcagttacagtttctttttttacaaatttgctcccagtcatttcctttaatcagtctttttaccaactttgcaataagtatcacaatgctgcctcctctgtggatgactgatggcaagagtctgaattgaaagaaaaatgggttggaattagaatgaaactatttgtttttatgagtctctgataatgaaagactttcacaaaaggaaagtataacattcacacgtatacatatgtaacaaacctgcacattgtgcacatgtaccctaaaacttaaagtataattaaaaaaataaaaaaagaaagtataacattattgcttttattattttaaacgtcttatctaattttggctggtcttctggaacagtgtgtctggattgttgcgtcacatgtatagctttcatcatattattctagcatagttgttaatttgggaggaattttaaggttatgacctacagctgcactattcattattcactgtggtagccgctggccacatgtgacttttgaggacttgtgactagtctgaattgaaatgtgtagtaagtataaaatatacactggattttaaagatttactgtgaaaaagtagtgtaaaatatgaatatttttgtattgattttgtgtcaaaaatttaatattttggatatactgaatgaaataaaatgttttattaaaatggattttatctgtttctttttactttattatgtatgtggcttgctttatatttctattgaacaatactgacttagggcttctttaaaatgaatgcaaatgttgatgtgttaacatattcatatttgaaaaatagactttgtaaaagttctctgtgcaccactctactgactgcttatttttatagtacattatttttatttggtagttatattttgatatttgaacatctgtttatagtatgccacttgggaaaaatgatttgtaaagctttgtgttagggtttcatatattcttcatttattatttctaatgatatgagctgaacttttttacttacttaatagtgtttctcacctctgtaaatccatcctgacctctaacaggaagaatggactcttcctccattgtgtacttgttgtacctgtatgtacttgtatagaaactgttacatattattgtacttagtttttatatatctgtcttcctttactataatgtaagccctttggagacagggatgtgtttaaataagactatgaattaagttacttcatccattcagtacttattgagctgctactatgtgtcatacagtttacatttggaaggagggagtaaatctattatgattttaaaaattttaacatatatgaatttcatgtgttgaggatgactgtattttcacaacagtactcatcagtttatgcatcttctaatatgtctttccttattgtagatactgactacattatagtcttttagcataatctctcagcattttttttgacagagtcagtgtacaaggttgattaccaggccactatacacattacagtgttgtgttatgtccaccctgaatatgtagatcagagtgttccttctcttaggatgatagccctcactgaaataaatgctgctgtttaaattttttgtcaatacattaaaaaatgtttctaatacaaaggtgtagtaccacttaagctttatggagataatcaaaggtatcaaaataagatgcacatctctcagaataacagtactagtgatgaaatttcagtatgaatctagaacatattaaataccagacagttatatttgttaagtctgtggcattgtgaacaaaggcataacagaatttaaaactattgtaaaattataaaaagtagtgtggtatctagtgggaataacgttgcactgtgtgtcaaaagactgacctagactggctctacacttgctagttttccaaatttaggcagactactaatttacttctgaattacagctcttttccattttgtagttattataatgttaactttatagagggcagattaatttggagtacaaataagataaattgatgtgaaagtgctccatagatcattacattatgaaattgtgcagtggtagtcttttatctaaggtgcatactaccaatgaacatttaaaactatatatttttgaaaaattttatgtacaatttccttgtttattaaaaagacaattctgttgcatcagcaataggctatggcttttgcttttgcgttcacgtattcatattcttccagcattccttgtggccgacagacacttagaacccctagtgatctttggctatgtaacagcaaaaagctcactaagccatacagtattgcaccatacactgaccttaaaaagatcattattgtaagtaccaatgtttatttagcttaataaattgaatagcaaatatgtgcatagtataagtatatatgtattcatactcatacattgatcatatttcacattttgctatatggagctttgaaagtggataagaaaatatataaaagattagaattctttctaggaacataagtctttaaatttttaaggcctattaggacttttataatgctgaatagaaaatatgcacacacagcagtactggatttcagagctgtaaggactgccaattccatacacattgtagtgtcctgtgtgtacactagatgtcagttttatcttgttatgtctgtgacagttatatatatttttctgattcgtgtatcattaaggctgccatatctgctataaaagtttagttttaaaggttatacttaagtacggacttcactgagtatattttacaggctttttctccacaggtaggtgtctactaatataaagatgtaaaatttaaactggaaaagacaatctcatatgatataaaacaattatatttcttttaggagatatctgaagagattataggatcacccatcccagaacctaggcaacgctcaagacttctaagatctcaatcagaaagctcggatgaagttacagaattagacctttcacatgggaaaaaagatgcttttgttttggaggtaatgtggcattggactaatttcttaaaggttttggaagctaagatacacattttttcacgtgctaaattaatatgatacttttatatcattacaactgttataaatatttaaaaagttattatataaaaatacaacaaacttgaaaataacagaacttggtaacatatgtttgttcaataccaggtcactgatacaataatgcagatggttctgaaaaagttaatgtatgggttgaaataatgatagaatagtattaaacctttgaagttatttttgtaaacttgaatgaatttaaatgaagtgccattctttaacttactataattattaccttttttgtatattactgtagttataacattttttagtataatcactgtgaattctgagtgtagtattttcttactgaattcaaaaggtataattgatccatctttataaaaagatactaagaacactttagtaactttcccagagagtaaatgtcacatgaaaagtttatggagactccttcctcacagatctgcttcctctgcactcccctgtagaatggttagctcccaaagagatagatttttctttttcatattgaaggaaaggaaaataaatgattaagatgtaagttgagagagagaaaaatcagatgctttgatcttggtgtagcaggaagctggtggtagaattgtgttgggatgggattggaggtttaaagagtcaggaacggtgccagtggctgtaacaaggatctatgagagacgcacaggcctaaccaaggtgagagtgtcagtttgtagaaaactcaacttatatggttatttgccccccactttttccccacatttctctacagtctgagaatggaaaatatgtcatggaaaatatctcaggtcaaggaggttaaaagttccagggtactatttacagcaatgctactcaaagtgtgatgtgcctacttgtggcgtcagctctacctgggagcttgtaagaaatgcaaattcttgggcccctacctcagacctagtagatgagaatttcaaggtggagcccaggaatctgtttaacaaactttccaggtgatgccaaacattacctgaagtttgatctagggcattattgataagtctgatcttgggatcctggctaagtagagaggcacatgagaacaaagtgcttcaaacatgggcagaggacagagggcaagtggaatatccagtaagagaggacaaagagacaggactgtagttggagaatgctcgagatcctgggtgtggaacgttttggggaataatgggttgaggtatggctgtgactgtgggtagccacgtgaagtggaagtgaaagtggttcttgaagtcctgagggtgatgtgggaagaagcttagcgagtctgcaggttaggacttagaaactgaggtgcagatgaatgtcagcgcctgtccagctggatagtttccctatttattattcacagtggaatatggtgatgtaagaagaatagaatttagacctatttattttattaaaaaaatagagtttagacctattattagatatgtctttaaatttatctgtacctaattccattgtaaaggagttctgcatttagtgaaaggatctcattacactttattaatttaaacaaattagaataatgattgcttatgatgtctttgtctttagaaacatattctcataaaggcttgagaaagagctagttttcttttttaacttagtgtactttgtacgtaaaatatttcacttggaagtatttgtggttattactgtggagaaatttactgatattagaatttttttcttgttacatatttttacttaggaaaaatgactctgccttttcttgactctattaatagttcttttaaaacgtgaaataattatgcatttactacttataaaatagttttaatctctattttaagattgatgacacagatgccatggaagatgtccattctctacttactgatgttcctcctccttcaggtgaacaaaaaagttatctttgagatgaaactagttttacatataaatgttttagctcataattgttacagtactaattttactttaaaagaaggacttatcacagtgtcacagcttgtcatgtactttgctactccaaggtagaaaacataccttaaaaatacttatgttagaacttaggtggaagtgatttttagtccttttatatttatacacggaaaaaaaaacctgtgataatttattaggatggtttaaagtctcctgcaggtatagttttagaagaaaaaaaatgaagggtgttatagttagaacttcatataataattgaaaaatgtcatttaacacaaaaatcaatgaaatattatcatatattttgattacaatttattttgacaggcttttatagttgtaatacagaaattatgcccggtataaataattggacctctgaaatacaggtaaacctttttttcttaattttaagcacataacacataagttattttagtaagttccatttaaatatttgtctttttttttttacctccttattgcaattaaaataccatccttattctactacattagttagtattgttcattatttggcaatttatcaactgttaaaatatttagttaaaaataataaaatgacatgttatgtcaccccacatttagatgttcacttcagtaagagtaatcagattaagcagcctcaacctgactaatcaagctctcaataagaactttaatgatctctgtgaaaatttgctcaaggtaggaaccttctgactaaattttatttcatgcgtctataataatgaaattttaagtgtctatattgctgtattgtctgtaataccttacacagttgtgggctgaatcattcttacctacttaccttacctctatcagcgggtgagatactaaagttgtcctctcccccttactatatcaaattataaaagaaatagttttagttaatagctttaacttccataaaaatctagtgtatatgtgtatatttaaaaaaacttactatattattttttgtgacttattgacgattaaatcttattgtctacttaaatattaaaaagtatatcgttagtgtaaaaatacacaaaacaaaagtggaccagttttgttttatttttaactctccatttgctataatataatgtacattaaaaaaatcagcttttaaaaatttttaaataaaaaagtgacattactaatattttctattgtgtagagcctgtactttaaactacgatctatgatcccctgctgcctttgccatgtaaattttacagtatctctgcctgaagatgaattaattcaggtaattaagatttagtccattattagtctttatctgatctgttttattattttcattatctgtttatcataattttgccgtaattaaataaacatatactagtttacctcacaatattaaaaaatatatgttagtatgcattaggccatgtgtgtttctttttctgaactttagttatctgagggggtaagcacacgtatgcttcagcatgtatacagtaggatctgtacccatcatgtgggatttcaccagttcccattttttagagaaggttcttgagctctttctggaatatctagatttaggtataactgtttggtatagttgtagtttgtgtatgatttgaatttatacataattctggttgaggattttaaccagaaaaggtatttggtgtaggttgttccgtggtactgaaaaaaatatgtaagaaacttagttttggcagtgattattttgctaaccattattgtttttataattctaggttacagtcacggcagtcgcaatcacttttgacaaaaatcaggctttacaaaccacaaaaacccctgttgaaaagtcattgcaaagaggtaaatctttactgaataggaagttcagtttgtgtttgtctgtgttatggttcagtgataaaatatacaggacaggtggattcaataaattacttatttcttgaagaatatttgctgctttttctgttcatctttatgaagataactgtgtggataagcgtatggctgacttgatatttttcacacgcgactgggtggtatttgactgatgtttacatagagaatgctgctggttttttagacttaaattatagcctattaattctgcagtaatataagggtttctatactaagatctctggcaaggtcttcaaggcatctgaggacctactgatgtagtaagcacaattgtgtgcctgtgtattattttcaggacaagttccatagtgttcaacagattcacaaaggtggccttaatccagtaaaatttaggaagtagtcttaatatatattctgaagaaatccaaattattggaaactgtgtgttctgaaaaacacataatgggggatactatactttcttgtatagtttgaatgatttactggctaaatgaaatattcctgattagtcctaaacttttaaaagttgattacattctacatgtatagcattgataagatttgagcagtgagttaatgtcaggtagatgtattaaatgattatgtgttcagatatttatcaaagaagacatgtaaccggtttaagtatcacaaaagctagtaatggacaaagtataggatattaattattgtctagcatttattatttgcaaagcactgtgctaagtgagttacagatattaatctcttaaagcttcacaagagtcataccagggaagatagcaccagtctcagcatcatgcagatgaatggtttccatgggagaaatcaaggagaaaatgaccagaataaattggggtggggagatggagctgagaatatgtatatgtatgttgtcacagattcttaattttaaaaaattaataatagatcattactaaataactgatattttcttgcctttctagcctcaacagataatgaagaacttttacaatttccactggaactgtgttcagattcacttccttctcatccttttccaccagctaaaggttggttaagtgagggaaaaagcaaacacaaatcctggtttctagttcctttcactgcttcttcattataggaaatcttactaaccttgaggtgaaaatttatccttcattccctcattatatgtttcttcatattcataaaggggagaaattaatgttccttttattttaatttctgaagtaatttcattctaagttattaaggtaatttttcctatgatattctattctcataccttaatgtattaaagctttattttcaaaggtttggatttcccactgtaactattcacacatagaatacttgatattttatattatatttggtaagttttttccagcaacaattaaaccttcacaaaaagttttggattttcatgcacaacagaatgcttttttttttccagaagatacatgaagaggttttgagtgggagtagtacaagtgagaaagcgatgagcttcctgtctttgctgtggcaataattgaagaacattgttatgtacttatataagacactgccatgttttttttccagtgcaaattgatagctccttaatttaatagcaataaatctattttgatctgcataatctttggggaaaagtgggaggtattgttttccatttctcatctgattttagtatgatttttattacaaaaaaatttaaaattactatgccttattttgtagcattatgtattagataaatgtagtatgtgtttttcactaaatttattttgagaaatgatagttatttgaaatgagctattcaacttttatgtcttataatacaatggatattattttatgattcctacttgttatttgataccaaattatgtataatacagaatagttttatattcactttacatatatgtcaatagaatctttattaaatcagtacaaagtctgtttatatagataaatagatcttgtctcatatttcaaagacgaaaaataagctgcttccagattctgaactttgtaacgtagtaactgtggtcctttttcctttttgtgatcacccaaaattctgatttagaactccatagagaattgtagcatatctcaatgtccttgaaagaatagagaggaaaaatcaaattcaaaggtaatgtgagttcagatttatgaattaaatacagcttccaggcagaaagcagaactgtcaagagtcttctttgggccgggcctgttggctcatacctgtaatcccagcactttgagaggctgaggcgagaagatcgcttgaatccaggagcttaagaccagcctgggcaacacagtgagaccccagctctacaaaaaataaataatgagctgcatgtggtggtgtgcacctgtgatcctagctccgtgggaggctgaggtgggaggattgcttgatcccaggaggttaaggctacagtgagctgtgattgtgccactgcactccagcccaggcgatagggggagaccctctctcaaaaagaagaaaagtctttcttgaattcactatacagcaagtttttttttctttaacatctactttatacagaaatttgtatttattcagggttagttccaaatcacttctaggtataatttcatttatccttatcctgcaataggggccaaaaaaaaaaaaaaaagccctaaaacctaatcgacaaaggtttgattgattgttattctgtaggaaaaggtatttgtggacttggggtccctgttagctctgttttactatgttgttaatacctactgaattctgcagaagattagatttcagctctctaagtttgccttgtctataaggacaactttccacttctgcaatagctttcaaaatgttttcaaaggaattataactggtgcttatgtgatcgttactatacggtatccaaatgatattttgtggactaaaaaacaagaaaataagaatttgagtagagtaagtcctatttgaacagtacctaaaatatttgcagctcattttagggagaattgagagggaccgtgaggtaggttggaaaagcaactgacctgttttctcagttctgctatggattaggcatgagaacttggaccaattgcttaacctctttgagcctcagttcgtcctttgtaaaatgtgaaaagattctctctaacctttaaaattcgttgggtttctatagtttatggttcttcaattattaacatattcccattttgaaaagtaaatcaaaagctaaattagaccccaaggtcacactgagcgtctgtatttaatttaagtgtgttcagctgggcgcggtgactcatatctgtaatcgtagcactttgggaggccgaagcaggcggattgcttgagcctaggagtctcttctctacaaaaaatacaaaaaattagtcatgcatggtggtgtgcctgtggtcccagctactcaggaagccgggtggtagaatcacctgagcccagggaggttgaggctacagtaagctgtgatcatgccactgcactccagcctgggcgacagagtgacgctgtctcaaaaaaaacagaataaaaaatgatttcaaataacttttaatcaattaaaccaataattttaattttaaattctgctcctctgaaccatagaggtttgtcagaggtacctcttggcctgccaggaggcaaagtgaaagggagcagagaaggatgggattgagggtaggtctctggatcccctacttttctgaaacagcagctttgattccatgtttttatatatccatcttctgtatgtgatttcacttgaagaaagggtctcaaagagtttgaaaaccattgattgattatgccaccctttattgtcatcatcatcatcagaccatcacatctaatacgaatatatgtaaaactttctatactaagtgcttaactgtgaaacctatgtgcttttccttgaatactgcatttaaaataatcagtaaacacttaaaagtgtatctgtacctttctgccaatatttctgtagttttgtaaattgtggtttgtgttgcgtgcttatttattgtcttgtgcttcaagtcttttcaggaggacatgggctaaatacaatttttaaagctatctcaaaatgttttggaaaatttgagggtaagataggttttgaaaaggtctgaaaaatataatagagtcttaaaaatggagtaattgcgtgttgtaacatgaaagaaggcaatgtctggaaaaattcaaaaatagcaatttagcggaaataggaagagaggaaggtaagagtgttagggataaatgctcaaaagatttctctgtttttttaaaatatgcaaccataagaggcttaaaagtcagttactaatactgataaataaaagtatagttttttaatcattttgttaagttaaataaggtgatagcttttttttttttactttcagtaactttgaattccagtgtatatttcatgtttttaatcacaaataggatgattgttaaaattttttatttccttttatattgactaggggattagtttcaagagctaagcatagtatgtttattaatatttccatctttttacttgtagataaacctttcattgtctttttgtgttattgaaaatgggtgaatgtcatgtaaagaaatgttgcttcaataacatgtatcttaattcacagtgtagagtaagcctgggcctgaattgtccatccatgttcaattttttctttccatcgtttattatatttggttttgtttttaaaggtagcagagtagtttgatgtatgtctcaaatttatggttgatttggtgttaccttgctggttgtcttgatttttctgatttgatatattaactggtgctgagcctaaataatttatttaaggatagatgatatggtatcaacataaattatttatgtttattcaagagtgtgttatgagaaaaatgatagctatagcaaatttttaatacaattttcatgtgtttttctcatcattgatatccaaacctgagtttttctctgaaatgattttcaagagactttaaaaataatgtgtgtatctatatagaaaaaaagaatgagcaaaatgggggggaatctgggttgaggtctgggagaagagtaaaaaaaatcagcgagattcttctcatagatttcagtttatctcaagaattttatacatgtaatttttataaaaggttagcatattacttcagagaaatatctaaaggcttacatcttgagctattagttgctgtattgtagggcttaagaacttatattagacaagtgtgtataaatcatatactactttaaatatatttcaagttcttaaaaaatattacctaaggtaggataatagttttcattaaaacactgatcatttaaaaattaaaaaggtttaattaagtcaattttagttttaaataccgttgagtgaaactgtatagaagactctttttttttaatacccaccttgtttcctgctttccttttgcttttactagagtatttcctcgtgttcagtggcatacgctataggctggcaggaatactctattcattacattagctgctgactgctgtggcaagcataggttaaatataaaaacaagttggcttatacccacaatacattgtacttcaaaattaggtgtctacgtcagaagttttttattgtaggctagaagagttactttttctttgttaaaccaaattagattttttttctttttagagacagtctcattcacagatttgattttaaaatagtttaactgtttgaatttaatgtcttgctaacattattttaaaatagcaattagaagtgtacatttgtaaaaaatacagaagttatcttttacttttcctgccaactaacggtttgaattcttatgactatatataattccttatactaattaaaagcattttatatattaatagtccattgcatgtctgttattactattttttaaaaaatatattttgtcactatgaccaagtggcagcaacaataaaaaacagttaaaattcttgatgttattggaggccaaataatcaatggcaagttttaaaaggaaagagacgctcaggggaagagaatgcaaaaaacagaaactaactagaggaaaatgtgtgaaaaactcatcccagaaatgggaaggaaggaaggacggaaggcaagagaattgatggagaagtaggaataaagaatctttatctctgtggcttcttcaaggcagcttgaggacagtgaaatccacagttagaggaagagggagtaaaaagcaaaggaaaattgcattgagttactgacagaaaacggattatttggaagagaagctataaaagataggagtgagagggagattgcatgcttggaaatggaagcaggaaaatgtaagaaggggattgaagaagaaagacaagtggtttagaatgtcgtacacctttaattagaaacttaaatgacccaaatagggaagttaattgtctttgttatctaatatatgtactacctaggtatcacagttgaatttttcccttataaactgtccaaattgaagctagttctgtctttctgtgtgccttagtaatttacaactgtaatatggcagtttccttatcaattcatcaatatttgagtatcgttatagatcaggtttatactgaatgtttagatatatcatttgtctaccccagtcatgaagttagattttatacttataaagcataactaatcaatgcattatcaattgatggaaattcctaaagaaacataaaacccagttttgatcataataaaactgagaatgtttaaataggaaaataaaacataaattataatgactcccaactgcatatattttaatctgccagagaatcatttccaaatttgtaggaagttttttagttttagtaattcttaaaagacattcagataagattttctcaaatattttttaattatttagagcaaagatgatctgcaaattctaatgatataaagtgaatagatagtcaaaagaggtactgatcagtgtagaaatttattcctgtatttatcttagtttgtttggtactactgtgacaaaacacttgagaccgtgtaatttataaagaacaggcatttattgactcagttctggaggttggaagtcccatatcaaggaaccagcatctggcaggggccttcttgctgtgttatcacagggcagaagggcaaaaagagagcaagaggagatcaaatctccctttttataatggcaccaatcccacccataagggtggagacctggcctaatcaggccttaaatgtcctacttttttttttttttgagacaagagtctccctctgttgccaaggctggaatgcagaggcacgatcttgggtcactgcaacctttgcctcccaggttcaagtgattctccagcctcagcctcccaagtagctggggttgcaggcgcctgccaccatgcctggctaatttttttttgtatttttagtagagacggggtttcaccatattggtcaggctggtctcgaactcctgacctcaagtgatccgcctgccttggcctcccaaagtgctgagattacaggtgtgagccaccgcacctggcctttttttttctctctctctttgagacagggtcttactctgtcccccaggctggagtgcagtgctgcgatcttggctcactgcagcctttagctcctgggttcaagcgatcctcccgcctcagcctcctgagtagctgggaccactaacacccccttgcctggttaatgtttatctttttttgtagtgatggggtttcaacatgttgcccaggctggtctcgagctcctgagctcaactgacccgcccacttaggtttcccaaagtgctgagattacaggtgtgaaccactgcccctggccagaatgtcctacttcttagtactgttacaatggcagttaaatttcagtgagttttggaggggacctacattcaaataatcgctgcagctaacgaatacctttgccattggttacgacaagttatttagaagaatggaaaagtctcagactttagacgtactggagaatgtctgtttgagggaggaagaatcctttttgtcgttaatatgctcatttccactgagctgattttaacctgggttagtttccctcccacaccactacacacagggcttgttaaatattgctagagtgcactaggggaattataaaaccatagccctgtattgctttgctaagtttctagggtcatttatttggggcttgcagggttatcacttaatggtgacttttaaaaaaatgcaaaataatcttcttcttgcattaagtgggaaaccaaattataatagaagcagactgttgtgtggcttaattgagactgtttgcagctagaagggggatcttgacatgaaaagcatttgtttcagactcttccatatagatctacaaatggcacacaagtgagcacaactcagcaaagcctgaaagacttttaaggagatttctacccttgaataatgaactatgttgtttttaatttagtattagtctagagactgcatgttgttttatttcttttaaactggaactcccagttggtcagtgagccagactgcatgtatctgcagtaccttctcttttgaaaagcttatcacctgggaagccaaactctgatcaggaggagcagagggcctgggagtctgaggtcatcagacatttgaggtattcaaaccagtccaggtgctgatgtctatctgctgctgggaccagctggccttgggcctcttgggccttttttttctaggagaaaaattaagatagcaagcatgttaaaagatgaacctgctctccctaagtgaaatcaaaaatctcccttaaaaacttgggtttttcagatttttttcagatgcattcgtatttgagggcagggaataaacattttccctcccttttttccctcttcatcctttatataaattttactgggtaaaagtaatacatgtatatcgtgaaaaatttgaatattacaaaaatcatgtagtccagaataaagctctcttctccatttccttccccaagaggcaactacttttagcagtttactgtctgtctttcaaagatactctattcatcctttttaaaaaacacaagtattttacatatcattgtgtaccttgttttttccacttgatgttagagatgggaacagatatttaatacatactcaggtaagctctttctgtgtacatttgccattaaaatatatgcagttcctactagggaattccatattactcagataatatcaaggtatagaaaagattttcgttttagtgatttttcagaaatttttaagccgttcctctttcccctgcagtttaaaaaaatgcacagaattcctaatgccagctatatgttctgtaattctacaccaaccaaatctatactgcacaagacatatgagagcctcaggactctcttgggatatgtaagttaggggtaggacagttggtgtcccagtctctccattgagtctgtttctgtgctgagtgtccctacagatgtggtaagcctctgaatgtcaggtctgtgctggtctttctttaggtcccatctcctcctagacttccaaagtctctcaagatcctgaatcaggaggacttttcctatctagatctccagtcagtgagcatgatggtcagggcatgtccacagtgtggtatcctcataggccattcgtggaccccacctggtgatcccttttattcatcagctctgtatatgttacaggattagctagtggtcagttgctttatgaaaactgtgggccaggtttggtggctcatacctgcaatcccaccactttgggagaccaaggcaggcggattacctgaggtcaggagttcaagaccagcctggccaatatggtgaaacccatctctacaaaaaatacaaaaaaattagtcgggcgtggtggtgggtgcctgtaatcccagctacttgggaggctgaggcaggagaatcacttgaagctggcaggtggaggttgcagtgagctgataccgtgccactacactccagcctgggcaacaagacgaaaactccgtctcaaaaaaaaaaattgtgttggtggggtgtggtgagatacttgcattgtattttcaattagcagcaacattctatggtagaaacattctgtacaaataatgttttgaaaagtttttttattaatttaagaatgttaccaaaaaatcaacacactaagtagaaatgaaaaaacatatttatctatctatacttaaactatactatactaagccaaccgaattattctcagtgcttttcatgagttatttctaaattggcaggactattcttttagttgtaaaattctttcaaacaaaaatttaaatattctaatgtgggtagaacatgagcattaaaaataggttatgaagtttttttatagtgctatttaaatttgtacaataccttaaatacctgtaataaaaaatatcagggaaaattctggatgctactgtcaggttactggaaagggagtgatactggcttgggattcctggttacctctgtgatcactcattttttagtttcacaaagtcttgataccaccagagggagctgttgatatcgaagtcttcgaatgaagaagttggtggtgagagttaagactagggagcagcttatgctgatctgtgaagcataatcattatcttgtctgtaatttgtaatcttatagactcttccccacagcaaacattttccttccatgtttcatttcagatattcttcccaacacattgacccttttctctgcctagtctcacatcctgctttcatcatactcacattcgttactatgtttatattttcttgtgactataaagtttctgaaactctttttgtgttacagtaagcaagtagtctcctttggcatggtatttatgaactgagctagttttcatttatcaatagaaactgcattttaaacctagatgcttttatttggtttgcttttgcaatgaagccataaagatttcctcctattcttctggcttatagaggtattaacaaataacaaagaagaggtactggcttgtacttagcatctgagctaatgttgttcatattgtcttattagaacacctggagagtgcaagttctaactcaggtataccagctgcacagagaggtgagtttgtctaattaagcaaatagtcaccaaaggtgtaaaattctagtttggtggtgcataaaattatagacattgaagaaaatgcactggacaatatggaatagacaccaaaatctggcttttttttttttgtaggtagaatatgttcttttaaaagcatcaattaaactaatatttaaattttttagtatgttaatggtttcccagtttctaagcataaaattttagctccttaaaattttttttccagcttagcagtagtaaaagttattgtttttaaaagggggaacttgtgaggctcacacctgccctgaccccatattatcagaggctttgttgcccaaaatcagacatggaaacaaaacattaacaaaaatggccctttggttttcctcttactgattgtagaaagaagatactttaataacagataagtcaactactaacttttaaaaatatattcttcaacatttgattctctttttttaaaattttagggtaaaactagggaaatgaattattcacaaagctttgattataaaataaaatagaaacaactgaaatattgtaaattaagaagaataggaaataaagttagttaaagcacagtatgtggtcctttcattgatatttatgttagaccccactcaggctctccctaggagaccacacaactatgacatcaccagaaatgctcagcctgctaactgagaacttggttttggacaaatcagtgtctaaagcttgactctttactatctctcttatctgacttgaaaaggaccattctttttctgagttacagttaaattacatcatcgaaaggagtgttaagacgagtaagagacatcatccatatttttttctttgtttttttcttttgttttctgtctgtgttttcagcaacgtcagttgattacagttcctttgcagacagatgcagcagctggatagagctcattaaactgaaagctcagaccataaggcgtggatcaattaagacaagtaggcggatgtttctaccacattatgataatctgagaaacatatccctgatttcccagtggtgaaagctagaccttactacccagtaataacattgccaatccatcatgtattagagtgtgaaagctgcagactgtaacggtcatttaggaaaagcttttgaaaggcctttagatttattagttttacctatagaattgtgtttttaaaattttcctttttgtgcaggtattcttaaaagtatataaatagatattatatcattctaattggaagtaaattgccaactctcttattgaaaagacattcttccaggacccaaggtactatttagtatgtggcatctgtcggtttattaagtgtgatatgcagagggctaaactaataaagaatttatggtgagaaagtagttattaccttactgctagaatcagaatcattacttatatgttatcttatgccatgtgttttggtaaattttgaggtaaatatatttgagtgaaagagcttaccgtacattaaaagggggaaaaaactacatttcacaggaaataatataggatgtgaaaccagccagatctggttctgaatcctagaagtgccattttaatagctatgagaccttgggcaagttacttaacttctctaaccttccatttcctcatgcatgaaatggggatgatgatgataacctgtgtttttgggtggttgtaaggattagatatatatatatatgtctggcttatggcagttatttaataagtggtagctattatttttttactttataaacaaccaacttttagctagcagaggtcgttaagcttttaaaattatgagttggttttcaaaaaggtttggaaaaaaccagtatcttacaactagataacataaggtttatctacaagttgacaatgatgaagtcgtctgaaaaagatggaaaaattgcactgggaaatagaacaactttcacactctccttgtaataatttgttcctacagcagataattttaatgctcagccgctttttctttttcttcactttataaccaatcattgtgtgtgtagctatactgcatcaacattttcttttgcaggaatgccatttttcttccaaaagaattccattccagcatttcctctcatgtttttctgtctctcttttttaattgcatgcagtgcatgataatttcttttctttcatgacatggcttagcctcacagacagctgaatgttgtcaccacttatttggaaacctcagggaataattgtgttaccagcgtctgttctgaatgttttctcatttttctccaattttagccatgacagttgaaaaagcaagtccagtgggtgatggaaatttccggaatcgttctgctccaccttgtgcaaattccacagttggggttgttaagatgacacctctttcttttattcctggagcaaaaataactaagtatcttgggataattaacatgttttttattcgagagactacttctcttcgggaggtaattttatagaagttatttcattttttaaaaaattttctctgaagatttagtaacaaaactaagtttcaaattgttattttttgccaaaaacttacaaatatttatttatattttaattatctggattgagtctagagtttatttcatttagcagcgaggattatcacaagaattgtgttagttttaaacctatttattgttagaaatcttagaaccttatcatatagtaaataaaacaaatatctgtgttcaaatagaagtttaaaatagccctgaaagaacagcttcgtttcctcagtaatttagcaatttttgacagatcacatttagaaatagtagaggactgtattacagatacatgtctaaggagatactttatgtaatttagctctgctgtttcttcctcctgagaaaggaatgaagctgctcattttttactctctcagttagtgtatgaggatgacatttcttcagtcttacctcacactgagtatcattaaactttaatttggtttttaaataacaagttgtaatattttacttgatgtgggaaaagttcagaatcagagtcagcctgttatatcttttataacacaggaatttaaacttaaaaaaattacgttgtgtcatatgttaaggaacaggggctaccaagcaaattaatatggtgaatagggaaattttttagttactgaggtgtgacatccaataaccttttcaaattttacttcagctgcagtttgtatttttaaaaagtatattcattataaagatgacttagctgtgcccttcttcaccagcagtatttctatactttcttaggaataacagcctgcacactgtctttaatatcatactcaccatcctgcgcctagcacagtagctggcatggaataaacacaatatgtttttgtgcaaataaatgaatagcttctgacagattatttaattaattagatggatgttttctttaaggtaaattaggccaggcacagtggctcacgcctatattctcaccactttgggaggctgaggcgggtagattgcttgaggccagcagtttgagaccagcctgaccaacatgacgaaaccccttctctactataaatacaaaaattagccgggcatggtggcacatgcctgtaatcctagctactcaggaggctgaggcacgagaattgcttgaacctgagaggtggaggttgcagtgagccgagattgcgccattgcactccagcctgggtgacagagtgagactctatccttccccccaaaaaagataaattagtttttatatcactcttaattacgttaagatgaaaaataaactatgaagatattctcaaaagcctttggatagagaattaaaatagatgatacttctacatccatttaaatttgacaaagatttggtgcgaaaagctggcatatattatgaattaaccttttctacttgctcttggtagcacatggatattacactattttgaatccataaaattgtatttcctaagccttcttgactacttaagctcccatacctcaaaatgttgcttcttagtaggttttccttcaacagaaacttataataataattgtgtagcaccatatcccaaatgtgttaattgcctgagtcgttttcttacagttaattaatatttttaaaattaatcctctgtagctactgtgtcatcagaattttttgatttaataaacaggaaattgataaaactcaaaaaatatactgaactatgattgagttggaggcaggctgaagcaactcccttaattccctaactacaaaaagagatatctttatacaactatatgtaggatcctcaggcttttcagaaggatgtgacccaataaaatggttttctaatactgcagtcatttttccccttcacttccagtttaaagttggaaatttcctcctagactgtaaataagtccaatagaatttgtggaaacctaggttgaaaagcatttcaagctattgactagcctttgatttctgttttgcttgtttttcaatatgggaaaagtaccctgaactactggattttatttccttacaattatatatggaattcttattatatgcacctgttgaactagatgttagcatatagttgtatgcaaaacagatacagtccctgacctaatggaatttacagtctagtagaactggagcacggtggacattaacaaataatcatataattagtatctaattactagggagagtaagtaatataaagaaattgaacagaggctatcagagtatataatggacttcaacttagagttcacagtcagagaaggtatctcggaagacattatatgtaagttgggaccaaggagtgaatgagttgttctctgaaaaaaaaaaaaaaaatgaaaagtctgcaggagcaacatgtgccagtgagcctgaggtaggaagagtgcttgtgcatttgagaaactgaaaaaaaggcaagtttgattggaacatggttcaggttcagaatgagagatatagataacaggtaagttttatcgtttaggcttatcatcaatttgtttaaatgatgatgagcatgatatgatggagatgttgaaggtggaggcacaatttgaattcttgccttgccatttacttactagctaatttgatcatagctagtcatgggcaaattacaaattctccgggcttcagttttatcatctgtaaagtaaaggtagtaaatccttgcctggacatgtgttcagtcaatgtttgttcattcatgcagtaaatccccattgtgagggaagtttaagttatttggtatattaagataatttaggatgttttaatatatattctttgacattttgtgtgcattcctatatccatacacatgtatatatagtatgattttcctgtgcactattatttaggaaggaggagtcagtggttttctccatgcttttattgctgaagtgtttgcaatggtgagagctcatgttgctgcattaggagggaatgctgttgtctcctacataatgaagcagtgtgtcttcatggagaatccaaataaaaaccaggtaagatgcagttaaaaattcctgattggcgggaacctgagaatttcttccatggcttcctacccctaaccccctccaaaagagaattgctctttagagccctttgagtctagatgcgtaagatattttaatgagtttattcataaccatggtcatacatagtcacaagtcaatacatgctatttcgacatctcaggtaactagggtattattcttaatcacatctggaatttgtgctcctgagttactgtttccaccctcttgttggtaggtgtttagaatacagtgatagctaactgaggagagctaaagatatcctttagtttggactatgatgctgtccagtttcagctgccttactaatgaagagtatatcatagtaaggccatagtaaggcttgcttatttctagtaagtagtgttattctcttaatggggatgaaagcagttagtttaaatcttaaaataaatttctaaattttgtgttaagataattcacttaaaattgttaaaattttttaaaaattaatcaactatactaaatagtatgaaatgccataaaggcagttcttcccaacctgcttctcttggcacacatcaaaaatcctatttctgtggtccactggtacactgtgatgaatgcatgaagctgtatgtggctgctggtaattggccctgcgtttctgacccaagtgactcccctaagagcagaggggatcaatatcttggcagacacagagcttaagaagctctaatatagactaattacttatcatttaagcaggagtaagaatgaatagatgtgtatatgtatatatattttttgcccctacctgtacatctagataattgtaaccaaagacaaatcatttaaattcttagtatcattttttcattagtaaaattatcttatagtgaaagtgagttgctgtcataaatatataagcagtttgaaaagacattatggaaatgcaaaattgttttagctttatttaagagatagggtcctgccatgttacccaggctggacttgaactcctgagctcaagcgatcttcccacctcagcttccctagtggctgggactactggcacatgccaccacacctgactggttttagttttattttgaaatcatgaagtttaatcagtttcttcagaagggtacttcatttactaagttcttttcaggttttcttgatagtttatacatttttgtaactcacggtatactaaacttcattaacatgttgaagaaacatagtgataaacaaaactatgagacaaccttctgataaattttggcaatggctaaggcacgttagagggggaagggaagctatgaaacatcctaggagggtttttggtagataattggggcatatctaaaagctcagtgaggctactgcagttctggattcgcagctagcttattgataagatttggcgtgaaggagattgtgtggagtggtcaaaaggggtacatggggagaagaaagattgagaaaggaacagtgagaaaggcgggagggaaaccaggagggctgcgaactacctctacacggatcgtttgaaagtagaagtagagtggaaaccaggcacatcctgagcaggagtatttgatatcacttgatattatctggtcgtaaagaacgcatctattagatcttgaaattatattcaactggatacttctttgtaataatttatttgatataagaggattttccctactttaagaatccttttttgcttaattactttgtatttgagattgagatttgtagttttgggtttttcccagtgttaaatttatacaacttgttcactgacttaactagcaccttaacaagtgcctcaaaatcagcttatccagaacagaacttatctctatgcctcagttttctcatctataacattgggataaaaattggggaaatcatgagttaatatatgtaatgtgcttagtgctggtggattgtaagcactgtaaaagttgttactattatcttttaaatgtttgtcttcaatgatttcttacaagacaaagtcatgcttcttaatatgtcatacaaggtcttccacattctcaagtcttctaccttttcagactcatctgttgcccccctcacctctcctaacatgcccaagaggtagattgcattgtttggttttccaaatgaactgtgctttttttttttcttttttcatttctagtactttgtagtgttgatattaactccattttgtaggtgaaaaaaactgagggctaaaaaacttaagtttggtatgaggctataagtagaaaagctagaatatacccagattttccaccaccagtcgtcttcctctgtacccaaataataactgtcaatggctgattaccactgatgtgtacacatcatatcaggtgccatgatttatgtcattagctttttcccccacttttatgtgagatcttgcatatacacaaaaagtgtagagaattgcacacagacattcttacacgtgaccctcagcttaagaaataaaatattaaaaatatggttgaagcctcagtgggcctgttttctctttataatgaatgaaccatcttaattttgttgtcattcctatgcatgcctttatatcttaaaaaaattaattgtagttttattttgtatctaaaatgttttaatatatttttgaataggtagtacatgattcaaaattcaaaaaggtatgaatggaaaagtctctccttgtctgctgttccagccagtcacttttcttccccacatgcaaccaaatttttcatttttttttttatggtaacttctagagatgtaacactccagagtgtgtaaccagagagattttatacatacaagcaaatatatataaatatatattcttttatctcccagtttaatataagtggtagctttacagtacatattgctcctcagctgtctctttcacctgctttttcttggcaacattttcatttcaggacataaagactacctttattgtttgttacaaccacataacactccatggtataggtcgatcggaatttctttaattagtcccctgctgataaatatttaggttattttcagtaaatgttgtgctaatacatacagtgctacaaaaacaatgtgatgcataagtgattagcacaagtgtgagcatctctgtagggaaaatttcttaaaacagaattgctaggtcaaagtagtacctttgtaattttcatagagatttccaaagttccccttcattgagatattttgcatattctttatataaatatagaaggatatatataattatgtaaatgattttatattgtatatatcattttgcaaattgttcttaatttatcataagatttacccatattgattgagctttaggtcatttttcacttccatatagtatttcaggcatgaatattccacagtttattttcatttcccttttgatgggcatttagtttgtttctaggattttgctaaacatgatgcagtgaaaagttacttattaatctttgttgcatacatgtccaagatttctctagggaacacatatacatggaattaatgggtcagggagtgtgttctttttctgctttaggagacggttcttttcaggatggttgcacttcctgttgcagtgttaagtgtgttgctcttgtcccatgtctttgttaacacttggtaacatccaacttttacatttttttgccagtatatatgaagtggtgtctcgttgtcattttaactgtatatctctaatagcgggcttgaatatgttttcatatgttcacaggagctccttgagttttctttcctgtgaattgccctcttacccttttctcatttttctgttggattgcctatctttatcctaatgatttagaagcctgtgttttttggctgtacagcactgccccttatgtaacagaagagtatgaatgtgttgagtataactgaacctgtcctgtttgttgttcttataggcacagtgtcttataaatgtaagtggtgatgcagtggtttttgttcgtgaatctgacttagaagtggtgtcatctcagcaacctactaccaactgccagtcatcatgtactgaaggcgaagttacaacctgaggaaaattaggaaaaaagagctcaactaaatgaaattcatcaatctctgttattttgtcattaattatcttcttagacttaaaattgaacttgagataaataaggaagaattgagtagatttgatttgcctggagtcttttggaggcatgagaattttctaatcttgacattttgtttgcctgttctagacaggccctgtggggtcttgacccttcagtaagttaagataaatttttaaaagaaccgtagcaaagatggaacctttgtaatttatgttgattttaataaaatcataatttaaaaaatgaaatgggaagattgtcaggaaattaggatagctactctagtataatttagaaaaactaagcaagagattctccagttgctagtgagtaagcactctgatttgagaaatgtgtggggacaatggagaaaagttttcagaaaactgctatgtagatttctgaatgtgttgtattttgctgaggaattcggtaacaactgaaagggaaaagtgcttcagccatcttttgaaaacaagttaaaattctggaacttgtatctgtaatacatcctaactcttgtaaaagaaaataatttatcatagctggtgtcctttcattgaaagttgtaatactgtctctaaggagggaggaaaagattattatataattttataactggcaacatttgagttagtattgactttgtctaaaagaggcttgacttcaactgggataaaaatgtcagtgaattttgttaaagtagtaaaaatgcagttgacttagtaggaacataaaattatttcctaataagataatattgcactcctaccaaataaacaggattttagtaatatctgagggattgttgatggtgagttagactgtatttggcatagaatttggaaatgtaacttgaatgtaaatatgctgcaaaatgttgaatgtatacatagaaagactttttctgtcgacgccaaatgcccgttgtaaatgaaccttaaatattacattcctcctttgcacaataatatttctttataacacttatgattttttcccccaggacaacaaactgcccttaagagtcatttccttgttatcacaggtgtcaatatttttctgtattttgtttataattttattttttaaataaaaagtgtataaaaataaactggaatattcctaaatctcttttttacctccatcat

SEQ ID NO: 3375 - DNA, 669 bp, Homo sapiens
aggaaagcggttgtattacaagctcagaaccaaatgtcagaggcacataagcttttacaaaaattgttggttcattgtcagaaactgaagaacacagaaatggtgatcaggtaaggggtctcttgtacatctcacggagatgtggtggtggatcttctcatcctgtgttttcctctttacggtcagtgtcctactgtccgtggcagagctgtactggcgatcttcctcccctaccatcgcgctgcccatgctcctgcaggctctggccctctccaaggagtaccggttacagtacttggcctctgaaacagtgctgaacttggcttttgcgcaggtaagccgatctctgtttttatagcacatatttgtgctcaagagctggtgagtctgtgactacgtttgagtattgaaaggataataatgagttttcatttgttcatattgacgtctggaaaggtagtcttcctgtgcaagccctccaaggaggcctgtggaggtgtgaacctggtgacaaactgacactttccagtggcactggctttcctgagctgtgtattcagtaaggaggactcgcctcttcagtgagaacacctgcatcatattaatgattagctgacacagagtgatgcttgatttagcaacaaggggatgtgaataaagaaatgagga

SEQ ID NO: 3376 - DNA, 176 bp, Homo sapiens
ttttttttttgaggcagagtctcactctgtcgcccaggctggagtgcagtggcacgatctcagctcactgcaatctctgcctcctgggttcaagcgattctcctgcctcagccttctgagtagctgggattacaggtgcccaccactacgcccagctaattttttgtatttttagt

SEQ ID NO: 3377 - DNA, 2962 bp, Homo sapiens
ttccacacgccaagctcccccaaatcgcccccttcggaaatgtctccacccgtgtccagcatgacggtgtccatgccttccatggcggtcagccccttcatggaagaagagagacctctacttctcgtgacaccaccaaggctgcgggagaagaagtttgaccatcaccctcagcagttcagctccttccaccacaaccccgcgcatgacagtaacagcctccctgctagccccttgaggatagtggaggatgaggagtatgaaacgacccaagagtacgagccagcccaagagcctgttaagaaactcgccaatagccggcgggccaaaagaaccaagcccaatggccacattgctaacagattggaagtggacagcaacacaagctcccagagcagtaactcagagagtgaaacagaagatgaaagagtaggtgaagatacgcctttcctgggcatacagaaccccctggcagccagtcttgaggcaacacctgccttccgcctggctgacagcaggactaacccagcaggccgcttctcgacacaggaagaaatccaggccaggctgtctagtgtaattgctaaccaagaccctattgctgtataaaacctaaataaacacatagattcacctgtaaaactttattttatataataaagtattccaccttaaattaaacaatttattttattttagcagttctgcaaatagaaaacaggaaaaaaacttttataaattaaatatatgtatgtaaaaatgtgttatgtgccatatgtagcaattttttacagtatttcaaaacgagaaagatatcaatggtgcctttatgttatgttatgtcgagagcaagttttgtacagttacagtgattgcttttccacagtatttctgcaaaacctctcatagattcagtttttgctggcttcttgtgcattgcattatgatgttgactggatgtatgatttgcaagacttgcaactgtccctctgtttgcttgtagtagcacccgatcagtatgtcttgtaatggcacatccatccagatatgcctctcttgtgtatgaagttttctttgctttcagaatatgaaatgagttgtgtctactctgccagccaaaggtttgcctcattgggctctgagataatagtagatccaacagcatgctactattaaatacagcaagaaactgcattaagtaatgttaaatattaggaagaaagtaatactgtgatttaaaaaaaaactatattattaatcagaagacagcttgctcttactaaaaggagctctcatttactttatttgattttatttttcttgacaaaaagcaacagttttagggatagcttagaaaatgggttctggcttgctatcagggtaaatctaacaccttacaagaggactgagtgtcactttctctctgggggaatgatccagcagcttatctagttgacaatcaaaacacggctgataaaggtgcaatcatttctgacatgtatttttcactgattttgaagctagtgattggttgtgtcttcttggctcaaaaagaagcatattacggcacaaaaagcccagcccagacagcacatgcagcattttgtctgaaatacttctagagtcaaacgtgcctgctgtacatagcgatgacttgtcatcatagggaagtatttccatcgtagagtgttcagaaggagtgactgtataggtggagagaagcttagtgactccgttgaaattttaaaatgtggatgaccacccctttctcccccttatttttcttttatctttccatgttgccttgatcaggtcataactatgcatgaacattttttatcaggaatggccgatgtgtatgtgatttgtaatcacaagtaatgattcatcaggaaatgtcaatcctgttggaaagattgcacctttacttgcagaagtgacccccacctgtgtcctgacctctccatttacaggctctctcacccatttcccccacctcctttaatttttgctttactgtcataaagtaggactaagattggtctaagcactgcatgttcttttgtgatggtaaatccaaaggaaggcctataagtattaacatttgaaataactgctaattcaggaaaatggaagaaaaaaaattatttgaaacacagaacccatttcatggcctgcctgatatctgtgaaatcagggctggagctttacttaggattcacatggcctcctaggaaccatgggacaaatgggaaacaggttatcgggggattcatgaagtcagtgagagtaattgcttcttttttgcgggtgaactgaatgtatttcttcaccaaatcttgatgttaacaattaaaaagaagaaatgacatgcaagtaggtcttagcagaaaaatgcaggctgggcatgagtcatgttgttaccctcccacatgctcctacaatccacagagatgcctgtctgcaggttcttgaagttattgttagtatttggtatctcaaatttttcgtcactgttcacatgccactttctctgtgcacagtggtatcctcatttgctttttaacctacactgaggagtctttgtcaggttgcactgattttccaattctgcagtaatgagtaagctcacggcatggggaagaagacagtcagtccaatgaagttctctaaattattttaacattgcctttgaaggccttgactcatccttagctatttcaatgaagaaattcctaccatgaatttaaaaccctaaaaattctgtttcaaattctttgggcattggggtactcagatatcccattgtggaagaattttaagaataaatagaagtttctgttgagaaccatgagcaacatgtttcttacaatgagaattgctatgcattttaaaattgcaaatatatatgaaaattgaagacaagaggaaattgtatttctaacttgattctgatcactca

SEQ ID NO: 3378 - DNA, 2701 bp, Homo sapiens
ggagtttccagctctggccatgggctcagacccactcggggtctcagtgtcctcagttgtaacattagagagatggcatcaatgcttgataaggacccttctataattccaattgccagttatccaaactctgattcggtggtcgagctggcctcgtgttcttatctgctaaccctgtcttaccttccagcctcagttaagtcaaatcaagggctatgtcattgctgaatgtcatggggggcaactgcttgccctccaccctatagtatctattttatgaaattccaagaagggatgaataaataaatctcttggatgctgcgtctggcagtcttcacgggtggttttcaaagcagatactgccttcaagatggccctttattccagaatgttttggctttcctttggggagattgggttgggttgggggagttatagcaaaggtaaaatgaagaatggaggaaagtaaacaaagagatattaaatagtaatattgaattcatagattctctttctccattttcacctgagctggaagatgaccagtatttctagcccatcagtaagctgttacctgttcctatttgtttgcaagtctgctgggttttactttattttattgtcatctcaggctaatctttgaccatttactaaaaggtttacataatgtcaaatccatacttatgtggtagttacatgggaggagatgactttgatagagtctttccactcttggactgggaagttacttccaataaaataacacattctgggcttgaaggcctgttgcttacttttgcaagggcctttccttcaaaatgatattttagaactttgtggaatttatgaaatcagaggtaagctattacctgtttgtttgcaagtccgctgaattttattttattttattttattttattttattttattttattttattttattttattgtcatcttagtctaatccttgaccatttactaaaaggtttacataatgtcaaattcatacttgtgtggtagttccatgggtagggatgactttcatagactcttcccactcatggactggggagtacttacaataaaaaatgacaggctgggcacggtggctcacgcctctaatcccagcactttgggaggctgaggtgggtagatcacgaggtcaggagatcaagaccatcctggccaacatggtgaaaccccatctctactaaaaatacaaaaattagctgggtatggtggtgctgccctgtagtcccagctactagggaggctgaggcaggagaattgcttgaacccaggaggtggaggctgcagtgagctgagatggtgccactgtactccagcctaggcaacagagcaagactccgcctcaaaaaaaaaaaaaaaaaaaaaaacattctggacttgcaagcctgttggttacttcttcaagggcctttccccaaaaatgatattttagaacgttatggaatttatgaaatcagaggtttccctgcaaccaatctatgaaaaagtaggcagggtttaaactgttttaaaactttagtcttaaattcatatttttttaatgtattaaggaagtctatccattctgtttcaatcgttttttgaaacatgaaaaggaagttagagatgaaatcattcttcatcactacaagtgatatttatccttaaatgttgacatttccccactgtgctgggcttctagatgatatctaggactacgaaatattcctgaacctagagattatggagagaaaagatgaatcacttttatatgttggttgaatttaaattagcatttctcagagagcttaatttaagtacccccaaagccaaaagtttgaaggctcaaggcccacatatttcaatttctcaggcacgttcccagtttagaggcagctagctctcacgtctgtatcactgtgactccgggagaagcagggaggttcatacgttttccgttcctgttagcaagagttcagatgatggcattccatgtcatttcaggtcacgtcaaattagactctgtgaatgccagtgtgaagaaaagagtcatttagtgttgtgcgttggtaacattttttatcaaaagctgagaaatgtgactctgaataagccacgtcttcctcagtgccaaaagtcaggacttcttatactgggggaagaaagcatggtgtggtgaaaacagtgtgctcggtggcctaatggcaagagtcactgagcattatcagacataacatgatagaaggtaacagggtacagccaacccttgaggcatcatgaaagagattgaccaaagactgatatagctgtgggttttggaagagagatagaccaaagattggacataacctccattgtggtaactgtgaagccaaattaggttctctcaggcttacctttgactgtgtttgttggacactgggatggatagttccaaattgaatgttaactagttgcatttcatggaaaaaatgaaaagcacacaaatgtatgacactgttgtcaggaataaatctaagttactatgctctttttttttcataagacataaccttatagctgagctaaggagaaacaaggcacacagatccaaatgcatgcagatccagctatcagcaactcatcttagatcttcttccattccccatttgggcttcattctctaagaccccttggcctttaggaaggtat

SEQ ID NO: 3379 - DNA, 784 bp, Homo sapiens
cctggacagcattctagtttctacaaaatggtcctctgtgtaggtgaatgtgtcccaaacctgctatcactttcttgtttcagtgtgactgtcttgttagaggtgaagtttatccagggtaacttgctcactaactattcctttttatggcctggggttaaagggagcatggctcacactggtgaaaataaggaaggcctggtcttatcttgtattaataatactggctgcattccaccagccagagatttctatctgcgaagacctatgaaacactgaagagaaatgtaggcagaaggaaatggccacatatcacaagttctattatatattcttttgtaaatacatattgtatattacttggatgttttcttatatcatttactgtctttttgagttaatgtcagtttttactctctcaacttactatgtaacattgtaaataacataatgtcctttattatttatatttaagcatctaacatatagagttgttttcatataagtttaagataaatgtcaaaaatatatgttcttttgtttttctttgctttaaaattatgtatcttttccttttcttttttttaagaataatttattgttcaggagaaagaatgtatatgtaactgaaactatctgaagaatgcacattgaaggccgtgaggtactgataaactaaagaatttattattcaaaatactaagcaataagtaattgtgatttatttaaagttttgtccattttccatgaaagacatactgcaataaaaatgctactctgtgga

SEQ ID NO: 3380 - DNA, 316 bp, Homo sapiens
gcatccgtagggcgtggaggagagcggtcccaagccctggggccctaggcttctccgaaaggccgtccgttcccatcacccgagggctgtaatccctcccgcgggtgcggaagcttcctcatctccctacctcccactgcactgccggtttccctgggttaccaaggagaagccagcgcctctacaccccaggtaggatgggggagggactcctggcctttggagctgagcttctctgctggggtgtctgagctgaaggtagggaggaggggtgggagactccagagccgctggagtcacttttgagacaacagac

SEQ ID NO: 3381 - DNA, 316 bp, Homo sapiens; identical to SEQ ID NO: 3380

SEQ ID NO: 3382 - DNA, 316 bp, Homo sapiens; identical to SEQ ID NO: 3380

SEQ ID NO: 3383 - DNA, 523 bp, Homo sapiens
ccaccctggctgcctctcccttcctgaaggccaatttcttttttttactagccgtccctctggtctgtccctctcgccctccaggagatctggggccccaaccacatcttgtcgcgccagggctggaagagagtttggcacagggcatggactgtgtgaaggagcgctgtgttggcctggaaccttcctgcgtctggtaccagaccttcagctgggggaaaggtggaaggtgccctccctcccgcagggcctaaggtcaacaggaggcctcacgggagttccagtgacttctacaggtgccttggagaaggtgcgtccaccctcctcatcttccacagacgcttttcctggaccagctccctatccattgccacacaaaagctaccaagagcacaagcactccagaccagcagccctgcccgacccccgcctcccgcagaaagcccacccgttcctagacacgtcccacggaagcacagggcatagcgcaaggccacagtcccactacccgcaaagcggccgc

SEQ ID NO: 3384 - DNA, 526 bp, Homo sapiens
ccaccctggctgcctctcccttcctgaaggccaatttctttttttttactagccgtccctctggtctgtccctctcgccctccaggagatctggggccccaaccacatcttgtcgcgccagggctggaagagagtttggcacagggcatggactgtgtgaaggagcgctgtgttggcctggaaccttcctgcgtctggtaccagaccttcagctgggggaaaggtggaaggtgccctccctcccgcagggcctaaggtcaacaggaggcctcacgggagttccagtgacttctacaggtgccttggagaaggtgcgtccaccctcctcttcttccacagacgcttttcctggaccagctccctatccattgccacacaaaagctaccaagagagcacaagcactccagaccagcagccctgcccgacccccgcctcccgcagaaagcccacccgttcctagacacgtcccacggaagcacagggcatagcgcaaggccacagtcccactacccgcaaagcggccgc

SEQ ID NO: 3385 - DNA, 526 bp, Homo sapiens; identical to SEQ ID NO: 3384

SEQ ID NO: 3386 - DNA, 247 bp, Homo sapiens
atatataagaacttaaatatattggcatattttgaaatatgcaagagatcaatggacattttgtgctttatctaaattctagatgtttcatatgttatagccacagtttgctactgttatcttttaaatgatagcactgttttcagaatggcagaaattttttcctaaaagaatactaaccaaatggaacctaaatcataaacatcaacaaacgtttttcagtatgtacctttcactatattccttt

SEQ ID NO: 3387 - DNA, 247 bp, Homo sapiens; identical to SEQ ID NO: 3386

SEQ ID NO: 3388 - DNA, 1268 bp, Homo sapiens
agtttcttctgctttaatttatttctgcttagctatattaacaataagatttgtgttttcaaaattttaagcaaaatttacacacaggctaattaaagtattcaatgcatattaaaagtcctatgtgtctataacttatcagattgggagctagcagaaagagataagattattgctatataatttttagggatagacaatttaatttccttggtttcctgtctcatggacctcacttaaccagtagtatgtgggtgttttttctaccttttttctccatcttatttaaaatttgttggtgtatttcccttagtcaaactaaagagaaacaatcatctaatcttatgttttatttcttttgtatatgtacatatgagaggaggaggaagaaagagatgaggagaggtgaaaagaaaagatccttctgcctgattgggctttgccagcatatgatagcagtgcaggccttggttccatgagcagcatcagattcaaatttcatagaaaaagagcccagaggaattgaaaaagagaaattaaattcaacaaggagaggcattgtatacattatgcattcacgataggttatgattgagaagaagctggtgctttgggaaaaacatattaggttctacatttaccctttttgaatagttttctcctttctaaacagggtgataataggagaatgctgaatgcctctccattgaatttggaaactgccgggccagcattagtgtggtattgtctgcccacacttttctagatgcaagtttaagatcatgttcagtgtgaacattgaggactttagagatcggagtccgaaatgtgtcaaagttaatgttaatagatgctgtcctcattttgtaactgtgacttctaaatgtgaccttttagttcatatctcataaatttgccatttaagaagaaatacagaaatgaaagttttaagttttaattaaaagtatatcttgctgggtgcagtggctcatgcctataatcccagcactttgggaggccaaggccggcagatcacttgaggtcaggagttggagactagcctggccaacatggcaaaaccttgtctctactaaagatacaaaaaaaataggtgggcatggtggtgcacatccgtattcctagctacttggaaggctgaggcacaagaatcgcttgaacccgggagacagaggttgcagtgagccgtgattgcaccagtgcactccaacctgggtgacacagtgagactgattcaaaaaaaaaaaaaa

SEQ ID NO: 3389 - DNA, 1268 bp, Homo sapiens; identical to SEQ ID NO: 3388

SEQ ID NO: 3390 - DNA, 17200 bp, Homo sapiens
gatgacgactttcggcgccgtggcggaatggcggcttccatctctgaggcgagcgacgctatggatcccacaggtgagtggcgcgggatgcgcgcctgagacggtccggcgccctgggggcttccccgagcccctgcggaggccatctccgttcctccgcgagccccaggactcgggccggccagccggctctgcccaggcagggcaggctggggagtggagggccccggttgagtcttctgccacccctctgggccatgcctttgtgccaccttcccgcgcggctcgtacactctgtcccggtccggtaggtgttcgctgaaggttaaccttcgttgaaggaattgagggaaggagagctttgtgttgaagttgagccttgggctcaacaggcggtgtgggtgtaagagccgggtgtgggtcccagctcgacccttcccctgtgtgctccacatctccgagccttggttttggaggctcccgaagcccaattggcaggagagttgggaacaagtgggcgcgtgctgttaagggaggtcttggcatgacagaatttgcttggaatgattagcgttgcccaagggctgtcgctgtcagaaaaacaaaacaaaacaaaaaacaaacggggtccgaagcagctcctggagaaaataggtgttggagagtcgccatgaagtggactctaggtgcatggcacgcagagacctgtgacgggggagggtggccatggcagagtcagataacaggggtgtgggagacacctcttgggaattctcgggtttgaatttcctttcttggaaatttcctagaaattcctctgggcctcattctttcagtcgctgcccatgaaagcttcttctgagcagagatgctctccccttcatcgtctctagagctccgcacttaccgaacagtccacagtttaatgctgctttgatcattttgtagtagtgcagcgttttcttgaccaagtgccttaggactgaggcgtttttctttaacactgcagttgatagctaggttaagaattgaggccgggagcggtgactcacgcctgtaatcccagcactttgggaggcccaggcgggtggatcacgaggtcaggagttcaagaccagcctggccaagatggtgaaacctcgtctctagtaaaaaatacaaaaattagccgggcgtggtagcgggcgcctgtaatcccagccacttgggaggctgagtaagagaattgcttgcacccgcgaggcggaggttgcagtgagctgagatcgcgccactgcactccagcctgtgcgacagagcccagagcgagactccgtctgaaaaaagaaaaagagaaagctggccgggcgcagtggctcacgcttgtaatcctagcactttgggaggctgaggcgggcggatcacgaggtcaggagatcgagaccatcctggctaacacgtgaaaccctgtctactaaaaatacaaaaaacaattagccgggcgtggtggcgggcgcctgtaatcccagctactagggaggctgaggcaggagaatggcgtgaacccgggaggcggagcttgcagtgagcccagatcgcgccactgcactccactctgggcgacagagcgagaccatctcaaaaaaaaaaaaaggagaaaaaagaaaaagcggccgggcatggtgactcacgtctgtaatctctgcactttgggaggccgaggagggctgatcacgaggtcaggagtttgagaccagtctggccaacatagtgaaaccccatctctactaaaaatacaaaaattaactggatgtggtggcatgtgcctgtaattccagctactcgggaggctgaggcaggagaattgcttgaaccagggagtcggaagttgcagtgagccgagatcatgccattggactccagcttggcaacggagcgagactccatctcaaaaaagaattgaaaaagtcggcactttgggaggctgaggcagcggatcacttgaggccaggaatttgagaccagcctggccagcatagggaaacccgcctctactaaaaatagaaaaattaggcagcctgtggtggcaggcccctgtaatcccagctactcgggaggctgaggcacgagaaccgtttgaactttggaggtggaggttgcagtgagatgatggagtgagactcagtcaaaaaaagaaaaaagaggctgggcgcggtgggtcatgcctgtaagcccatcactttgggaggccgaggcaggcggatcacgaggtcaggagatcgagaccatcctggctaatacagtgaaaccccgtctctactaaaaatacaaaaaaattagccgggtgtggtggccagtgcctgtggtcccagctactcgggaggctgaggcaggagaatggcgtgaacccaagcggagcttgcagtgagccaagatagcgccacaggactctagcctgggcaacagagcgagactctgtctcaaaaaaaaaaaaaaaaaaagaattgaaaaaacttgggagatgttcctattgccgagaggcagagattcctgtctcctctcactctacagctgcctacatggcctctttacacccagcctctcttcctccacagactgccaggtgtcacccccagtgcctttacttgtgcagtgggcagagctgggccatgaaaactgtaactagcccaccagtgggacttggcagacttcctgtctgtgaagtctaggtctgagcatttttcatttctgacctgggtgagctgagaggtaggattctggaaagctgatcttagttttctttctttttttttctttttttttttccattttttgagagtttccctctatcaccccggctagagtgcaatggtgtgatcttggctcactgcaacctccgcctcctgggctcaagcatttctcatgcctcagcctcccgagttgctgggactacaggtgcccgccaccacacccagctaatttttatatttttagtagagatggggttttgccacgttggccagactggtctcaaactcctggcctcaagtgatctgcccaccgcggcctcccaaagtgctgggattacaggtgtgagccatggtgcccggcctttgatcctagttttctcatggcttattcaaaggctcccttggcagagcttgctcttcccctccgttcattgcatagtgcacaggtaatatggaggggatttgcccctgtctcagttttgtgaggtggtgtttgtattggaatcttggttctgccacttactagctgggtgggggtaagtgaattatcccatttctgcctctccttcatcatctgtactgacctgcagtcatagtacatctgtacccatcgggttgttgtgaggttggtttttctattcttgtatgacaaacttagcagcttaaaccggcatccatttattatctcatagttatgtatgcagaagtccaggcattacaagattaaaatcaaggtgttggtagctttgctcttatctggagactctagggaagaagctgcttccaggtttatttaggttgctggcagaatccagttccttggagttgtagaactaaggtctttgtttccttgctggctgtcagctggggactactctgtaacttaaggtccactaacttaggactctaattggatgtgcaaaatgccgtcatagcagtacctagatgagtatttgattgaacaaacaggggtcgggaatcttgggctgctatctttagaattctgcctaccactgaggattaaatgaggagatatatagagagcatttagagcgagtcctggtatataacaaatgctgtacaagcattaccgaggattcagtactacaaacttggctctgaagctggccactatgggctgcaggagaacagtatttctttttttcttttttttttttttgagatggagtcttgctcagccttctaggctggagtgcagtggtgtgactcagctcactgcaaccacctctcctgggttcaagtgattctcgggtctcagcctcctgagtagctgggattataggcacccaccatcatgcccggctaatttttgtattttggtagagacgggttttcaccatgttagccaggctggtcttgaactcctgacctcaggtgatcctcctgcctcagcctcccaaagtactaggattacaggtgggagccaccatgcccggctgagaacagcatttctataaaagatgggaattgctggccaggcgtgttggctcacacctgtaatcccagcactttgggaggctgaggcggatagttcgcttgagtctgggagttcaagagcagtctaagcaacatgatgaaacccccatctttacaaaaagtacaaaaattagctgggcttgttgatgtttgcctgtagttcccgctagttgggaggctgacgcaggaggatcacttgagctcaggagtttgaggttgcaatgagctatgatcgcaccactgtactgcagcctgagtgagcaagcaagagcctgtctctaatcaataagtaagacatgagaattggcaatgtaatgtgtgttgcgaattggtaatgtaatgtgtgatattctcctgggcattgtgaaactatgtaatattttgttagggccaggtgcagtggctcacacctgtaaccccaacacttaggaggccaaggcaggaggatcagtggaggccaggatcctgggcatcacagcctgacaaactagcctgggcaacatagcgagaccctgtctcaaaaaagaagaaaattagccaggcatagtggcacgtgcctgtactcaggagactgacgtgggaggattgcttgaacccaggagtttgaggttgcagtgagctatgatcgtgctgctgcatgccagcctgggcaacagaacaagaccctgtctctacaaaaataaatataaaaagattctgctgtgttacagatgttgagattttgtctttgtttttccacagtggtttgctaagaaggccattttcaactctccactggaggctgctatggcgttccctcacctgcagcagcccagctttctactggtaaatatcaactgcttgcatgagtgtcagtgtggccatagttctgtagatgtgggacttgagtgttcttcccattgacttgaagaactctgtagtggttgttttttaggggcatgtgatggaaacaatggcagactccttaacttgactgtgcctccttattactacaggaccttggggttactcaacttctgggctctgggttttctcacacaagttcattcaaattctattttctctacttcccaagggtgtgaggaggaggaagagcaagtgagaaggatgtatatcagaatgttcatgacttgtaaattcttaaatagatatgaagtattctaataatcagtcataactgtcatcagtgaaaaatggagacactgttgtgcgggggcctgctaggttgcactttaagtattaaacatgatgctgagaactgggtgcagtggctcatgcctggagttccagctactgaggagactgaggcaggaggattacttgagcccaagagtttgagaccagcctgggcaacatagtaaagactcaaaaaggaaaaaaaaatgatactgagaagtgagaagttagatatgaggcaagtattggtgatgaaagttcctaattttagttcttaggaggtgtttttgtaaacatttatgtggaaggacattcttcctcagtgcaccccactagagtcaacaggtctggcccatggccagatagctcaggtctccatctctgtctcaatcactgtgaaatccacccttgtttggaggtagacaaggccttagatatcctttggcaaagctctctaggttgaaattctagccgtttctcctgatcttaatccattcgcacagatgccctttttctccttgtagtcagggtgctttcctcacatcccacgactaggtagatttcattagtccttgtcctgagtcttttctggcctctccattgccttcatgattagtgtctacttggctgaagccatctataatttttgtctgccctgtgttttaagatcattggtttagtggttcagtgtctaccgaataaaggacagctcatttaagagagcttctgccatagccgtgatgttgttgggcgttcttactgatgatcacaatggtgtaatcacggtggtccatcaggctggaaatttccagttgatgcgtacaaactcagttatactctgtggtttgtgaggggtgcccttacacagtcaagatcctcttctggctgtggggctgactctgggaccaacccctacttatggattggtggaagtcaatcctgttctgatcatgtgcagcactctgagggggtactgggaaacaaggctgatagttcctggtccagagagcatagaactacggcctctcctagtagtactctttgggccactgacacacatgaggggctggggaacaggccagaggttatgggtctgactcataacctattgcttggatttctgtttgactcaagccagagtgccactaaaagctgcagagtgaatgtcctcgtgactttttcgctttgttctgtcttctaggctagcctgaaagctgactctataaataagccctttgcacagcagtcgcaagacttggttaaagtcattgaggactttccagcaaaggtatagctctgctaacgtctctctttggagcatgtcttatacattcgttgaagaactttattataattcctaatttccctccccgccccaaccccgagcactgcctggcacagaggcctggccattaccatgaccattatgtttacggacacatttaaacatgtgaacttgtagatcaggggttctcagccacagatgctctgttcctcagggacacttggcaatgtcagagacatttttggttgtcacatctggaggtagatggggagtgtgtgctactagcttctaagaagtagaggccagggttgctggaaacattctgcaaagcacaggacagctccctgcgacaaagaagtatctagcccaaaatgtcaacagcaccaagattgagaaaccctgatgtaaatactaaaaatatgtatttaaatcacacctggaattgtcaagcccaggaagctggcctagacaaggagttaataccaaatggcaataggtcagttaggtttcaggggcttcactctggaaaggatgttgctttcctttctgatagagcatccttcaagtcagaagtttccatcactgtttaaagaatcttttttttgtggtggctcatgcctgtaatctcaacactttgggaggccgaggtgggaggatcacttaagcccaggagctcaaaaccagcctaggcaacatactgagaacctatctctacaagaaatttaaaaattagctgagtgtagtggtgtgtgcctatagtcccatttactcaggaagctgaggtggggggattgctcgagcccaggaagtcgaggctgcagtgagccataattgcgccactgcactccagccagggcaacagagtgagaccttgtctcaataaatatgtattttgtttatttttttattttatatttttttattttcattgtttgtttttttttaaatttatttatttttcttaatttaatcttctatcacacacaaaaaatgtattttgatcggaggctgacttacttaactggcccaagtctaaagcaacactgcttggtatgccatgtaccccactggaagaacgtaaagctgctcttgtcgttggcaccatggcaccaggcttcctttgggtgcagggctgatcccataggtcttagccagggagtggcttcctcagagggagctgggcagcaggtggtgcaggactagagccggggcaggagtgggtgctggtcctgcacgcggcttcaccacacattgtttcaggagctgcacaccatcttcccatggctggtagaaagcatttttggcagcctagatggtgtcctcgttggctggaacctccgctgcttacaggggcgcgtgaatcctgtggagtacagcatcgtgatggaatttctcgaccctgggtaggtaggttggtcaccggagagaggctgggtgattcctcatggtgattccacctttaaagcactctctgaatttctcaagattaagaaacaatcaaagcaagataattcgcagttcatttgccctgtttttgtttgtttgttcaatttcgtgttcagtggcccaatgatgaagttggtttataagcttcaagctgaagactataagttcgactttcctgtctcctacttgcctgtaagtaaaccacagtggcgagagtggtgctcggggcagtgggccttgacagccctgtggtgatgggcaatctcctccagtcctctgagggcaaattgaggagcgattcgttccaggggtgtgagagcaacaggaaatgggtactgcatgactgctacccttgctgtctgcagctctttatgagatgatggtaggagaagttctaagcacagactcttgttcaggcactgctcagaggcagggcactgtccccacaggtgggttctgtgtgtgggtctcttccccagcagccttcccaaagtgctgctgtgcatgtggggtactgcgtatcgggcactacgcaccagcacctgcccacaagcctcactgcctctctctgcagggtcctgtgaaggcgtccatccaggagtgcatcctccctgacagtcctctgtaccacaacaaggtccagttcacccctactgggggccttggtctgaacttggccctgagtatcctttggtggccctgaggtagggaggctgtgggtggcccagcacttgacactgagcggggggtggctcatcaaccctgcatgtttgcccctgacgctgctctcagatccgttcgagtattacatattcttctttgccttgagcctcatcactcagaaggtaaggaagggatgccttttgctgggagaggtggggccacggcccagggcttccctgcacttgttggtgcttggtggcctggcagtgtccagagcccatgctaacaactagcttggttttccagccacttcctgtgtccctccacgtccgtacttcagactgtgcctatttcatcctggtggacaggtacctgtcatggttcctgcccaccgaaggcagtgtgcccccaccactctcctccagcccaggggggaccagcccctcaccacctcccaggtaaggctgccctttgttaagacctggcccttccataagggagtggcctggtcacttgcatcgcccacggggacaatgttgccaccctttgtccacggttccccaatttttcttatgcctcattccccatccccagctgtcttagcacagactggagggtggggtatggcgggcaatctgtccttagtgttcagtgtctttggccatcactgaagctatcaggtccctggaggcctccacggcctgcatgggaatgggctgtgttgtgcatggagcagccgtccccacaggcggtgtctgagtcagtgagcagggtggaaaggttgtcctatgagcaaaaaaaataggaatctctatgggccccaggagcagatcttgaaggggaggcctgggccaaagagcctgttttgtcagtccaaacaggctgagcctgatgcgtgcctgcacaggttgggagtgtgaaccaggggctctcatgcctggctgtcctgggtcctcagtgggcactaacgcaggccgacttcccaggagaccctcttgccccagcagcagctgcctgtgcacctctgaccctctttaatctcactggcccatcgccttccccaggaagctgcatgcaggccccttcctgcagatgctggcccaccccagatctgctggcatgtgtaaggcaggccaggcctttacctacaattcacgtgtggacagattccccagagggtggaggggagaaagggagtggcaaggaggagacgctgcccaggtagcggcagtgatcagtgaccctgaaatgttgctgatcctgtggaggactcggaggtgaggcagattcacaccctcttagatgcagaattcagctgccaagcagtttttgatgcctggtttttttgcttgttttaactttttgggttgttttaattttttctattagaaattatatacgtaggctgggagtggtgactgatgcctgtaatcccagcactttgggaggccaaggtggagggatcgcctgaggtcaggaattcgagaccagcctagccaacatggtgaaaccttgtctactaaaaatacaaaaattagctgggcatggtggtgcacacctgtaatcccagctactcaggaggttgaggcgggagaattgcttgaacccgggaggcggaggttgtggtgagctgagattgcaccactgtacacacacacaaaaaaaaaaaagaaaagaaattatatatatatggtttgggtttatttatttattttattttattttattttattttgtgtttggagatggagtctcactctgtcgcccatgctggagtggtgcagtggcatgatcttggctcactgcaacctccatctcctgggttcaagtgattctcccacctcagcctcgcaagtagctgggattacaggcacaggtcagcatgcccgactaatttttgtatttttagtagtaacggggtttcaccatgttggccaggctggctcaaactcctgacctcaggcaatccgtccaccttggcctcagacaaagtgctgggattacaggtgtgagctactgcacccagcatttttttttttttgagacagggcctggctgggttgctcagcctggagtgcagtgttgtgatcacaactcactgcaacattgacctcctgagctcaagtgatcctcccacttcaacctcccaagtagctagtactataagcatgcacccccacacctagcttttattttatttttttgtaagatgggtcttgctatgttgcccaggctgctctagaactcctgggctcgagcgatcctcctgccttagcctcccaaagttcagagattacaggcatgaaccactacactggtccattgtgtgcttttttttttttttttgacagggtcttactctgttgcccaggctggagtgcagtggcgctgtctctgcttcaagtgattctcctggctcagtcccaagtagctgggactacaggtgcctgtcaccacacccagctaatttttgtatctttagtagagacagggtttcaccatgttgagcagactgatcttgaactccttaccacaagtgatctgcctgcctcgaccccctaaagtgctgggattacaggtgtgagccgccgctcctggcctagccattatgtatttttaaagacggtcttactctgtcacacaggctggagtgcagtgtcataatcatcacttggtggcacaatcatcactcaagccagcctgtcacatcagtgactataggcatgcatcactacagccagctaatttaacttttttttttttttttgcggagatatggggatgcctcgctgtgttgcccaggctggtcttgaactcctggcctcagcaatcttcccgcctcagcttcccaagtagctggaattacagttgcaagtcaccacacctaactttttattttgaaataacttcagatttacagataagtttccacgcataataaaaataacttgcaggctgagcacagtggctcacgcctgtaatcccaacactttgggaggccaaggcgggaggatcacttgaggccaggaattcgagaccagtgtgggcaacgtcgggagacctcatttctacaaaaaaaaaattagccaagtatggtgatgtgcaactatggtcccagctactcaggaggctgaggtgggaggatcacttgtgcccaggagcaatgagctgtgagcgtgccactgcactttagcctggggtaacagaacaagatcctgtctcagggaaaaaaaaaaaaaagaaactttcatagatcttcacccagatttccaaactgttaatactttgctgcatgtgttggtttccacctctattgtatgtgtttttttttctctaagccaatatgagtaagctacaggatatggcatcccttgacctcttaatatttcagtgtatttcctagaagcgaatgcattatcctatatagtcacagtgcctgtaaccacaccaggaagttagtattgccaccaggcctcacactgtgtgcagtgatgtttcacaggctcacccactgtatatagtgatatttctagtccccttcagtcaggaatggtcccttgcctttctgtctttcctgaccttgacccctccagagcatgcggccgccccttaggctgtgtggtatttgctggtgactaggcccagcatgggctttgttgggaggagcaccgtagtgggacacctggtccttgccaggtgcccttttatcactgggttaaaaaggtgccggtcaggtttttccattgtaaaataattactttgtgcccaggttaaatagtaatgaggctgggcatggtggctcatgcctgtaattccaggactttgagaggctgaggtgggcggatcactggagctcaggagtgtgagaccagctcaggcaacatagcaaaatcccatctctaccaaaaatttaaaaataaccaggtgtggtggtgtgcgcctgtaatcccagctacttgagaggctgaggtgggaggattgcttgcacccaggaggcggaggtagcagtgagccaagatcatgcccctgtactccagcctgggctacagagtgagaccgtatctcaaccaaaaaaaaaaaaaaaaaaattaatagtgcctgggcaacatagcatgaccttgtttctactaaaaagaaaaacatcagccaggcgtggtggtgttggtcccagctacttgggaggcctaagtctaggaggttgaggttgcagtgagctgtgattgcatcattgcactccagcctaggcgatagggtacgatcctgtctcaaaaaaaaattgataacgagaatttaccgggaagatgtatggagactatgtaattatcagtagtattaacatccacttttgattctcctattttttcaaattgattttatttgcagacagggtcttgttctcttaccccaggctggagtgcagtggtacgatctctgctcacagcaacctcaacctcctgggctcaagtgatcctcctgtctcaaccccccaagtatctgggactacagggaggcatcaccacacctggctaatttttgtatttttttgtggagacagggttttgccatgttgcccaggctgggaatttcttaattttttagaaacagggtcttgctctgtcaccccagggtggagtgaagttggtacgatcatttgtcactatagcctcaactcgtgggcccaggccattctccctcctcagccttctaagtagctaggactacaggcacatgccaccaggcccagctgttttatgtttcaatgtttttgtggagataggttctcattttgttgcccaggctgatctcaaatgcctggcctcaagaaatcctcctgccttggtctcccaaggtgctggtgtgagcccccatgctcacaggtgtgaacccccatgcccaacctcactgttgattcttgaccaaatcagctattaatagggcggttactaaatggtggttctctaacttcatccctccttcattgatttgtgggtcaatggtcactctgtggtaaggaagacttctctctttgctatttatttattcaggtatatcagtgtggatcagggggctggggggaggtgtgcattgtgctattgaacaagttgtaatctgtccctgctctcgttgattttgatatccagattgcccctgttacagcgggagcgagttacagcgggagcctgtaactcgggcctgtttctgtgtctccctcaggacaccagccataccctttgcttcctatggcctccaccacactagcctcctaaagcgacacatctctcatcagacgtctgtgaatgcagaccccgcctcccacgagatctggaggtcagaaactctgctccaggtgagagttgagctggtcaaaagaaactgttcagccagctgggcatggtggctcgtgcctataatccccagcactttgcgaggcctaggtgggcagatgacctgaggtcaggagtttgggaccaacctggccagcatggtgaaaccacgtctctactaaaaacacaaaaattagttgggcgtggtggcaggcgcctgtaatcccagctactcgggaggctgaggcgggagaatcgcttgaacccaggaggtggaggctgcagtaagctgagatcgtgccattgcactccagcctgggtgacagaactagactccatctcaaaaaaaaaaaaagaaaaagaaaagaaactgttgccaccttccactatgtggggcagagtcccagaggcggcccctcagcccggggctgattctaaattgttgatattttcctgctgtgacatttagaaaacatgaaagtaaatctgcccacccttttaacttgaatgtcattgatggcgtttttcatcccaggatcccctgtccatggaagttgtttcgttttgcctgtggtgatataattgttgcagagtcttttggtttccatgacactgaatggtgaggggtctgtgcagcctccacaggccttccattgattcaggggatccaagtagtaggtgacagatttccttgtctgcccagagggctccagcctgtcaggatggtatgggctggctcacttcctgagtgctggccaactcccaggtcctggctgtgtcttctaggcacacagagagattcagcaggtgctgcttctgacgctggatcctggggctgacttggtagccacagccttgctttacagcctggcatgtagataagataggattctatctcccatcttatatgtaactcctagtatttggggtgctgcactttttgaagcctccataccatttcacagcatcctcgcagggtggaatggtaagaaccgttgcccctgttcacagaggggaccatgatgcccagatggctcttggctgtgtggaccgtaggctgtgctggccatgaagagggcagaagatcatgacacagcgcttatagggaagaactggaaggttctgctgttccctgggccaaagcattttttttttttttttttttttttttgagatggagtctccctctgttgtccaggctggagtgcagtggctcaatcttggctctgtgcaaccttcacctctcaggttcaggtgattctcccgcctcagccccccgagtagctaggattacaggtgcccactgccatgctcagctaatttttgcatttttagtagagatggggtttcaccatgtctcgaactcctgacatcaagtgatccatttgctttggcctcccaaagtgttgggattacaggcgtgagccaccgtgcccggccctttttgtttttttaactaagaaaaaaatttaattataagatatatataacatgaaacttattgtcttaactatttccaagtgtacagtcagtagtgttgaatacagtcatgttgttgtgcatgcaatctccagaatgcttttcatcttgcaaaactgaaactgaaccagcccgggcgcaggggcctcacacctctaatcttagtgcgttgggaggcccagcaggaaaggattgctcaaggccgggagttcaagaccagcctggccagcatagtgagaccccatctcttctaatgaaaaacaaggaaatcaaaccattaaacaattccccacccagcacctggcaaccactattctgctctctgtttctatggagttgactcctagatctcatacccagagtatgcgtagcacatagtacttatttgtgtgtgagtagcatgcttcacttagcataatggactaaagattaatccatgttacagcatgtgtcagaatttccttgctttttagggctgaatagtgttccattgtgtggatgtaccacattgtgtttattcattcatctctcagtagacacttgagttgctgggttttttttttgttttttttttgagaccgagttttgttcttgttgcccaggttggagtggagtggcacgattttggcttaccacaacctctgcctgttgggttcaagcgattctcctgcctcagcctcctgagtagctgagctggaattacaggcatgcgccaccacgcccggctaattttgtatttttagtagagacactgtttctccatgttgggtcaggctggtctcgaactcctgacctcaggtgatccacctgccttggcctcccaaagtgttgggattacaggtgtgagccactgtgcccagccctttttttttttttttttttttttttttttaaatcagagtctgtctttgttgccaggctagagtgcagtggtgcagtcttggctcactgcagtctcaaactcctgggcacaagcaatcctcccacctcagactcccaagtcgctgggattataggtgtgatgcctcaccacacccagctaatttttgtattttttgtagagacagattttcattatgttggccaggctggtctggaactcctggcctcaggtaatcccacccacctcggcctcccaaagtgctgggatgacagggttgagccaccatgcctgttggttgcctttttactctatctatagtattttttcatgctcaagagtgttgattttgatgaagtctagttgtctattttttttccttttgttgcctgtgctttgggcatcatatctaattaatcattgccaaatctagtgttatgaagttttctcccatgttttcttctaagagtgtatggttttagtgcttatcctcaggtcgcttacccattttgagttattttttggtgatggtgtgaaggaagggcccagcttcactgttctgcacatgggtattctgtgttcccagctctgcttgttggagacactgtcctttccccactggatggtctgacaccattgtcaagaatggtttgactagctaatgcttttttgcaggtttttgttgaaatgtggcttcatcactattccttggagatgtatc

SEQ ID NO: 3391 - DNA, 1456 bp, Homo sapiens
agagtggtctaaaactcatggcctcaaacgatcctcccgccctggggtcccaaagattataggcgtgagccagggcgcccagccccaaactgtcttgattcccgacgttgtaggatgaaggcctgagtgaagaggtggaggggagctaagcggaggagccctacccagcctggaccaccctggggtacgcactctgcgtccacctgacctggacgtgcctcctaaggctggcagcgaagcccaggagcagagcccacggatgggccctgcaggtgctgggcctagaccgacagacaggcctggccactcagggccacgccgccgctgtgccgcgcctgccccctccccgcccgccacccccgccactggggcagggacagcgggcccagctctgacctcgggtctcgggcacgctcgacgtgggcagagacacggccgcagggtcctggggctcgctcgctagcctctgcccggcacacatggacttgagcatctggaagacggcgaggggggccacgttcagcttcagcaggtccaccaggatcctggcggggacagacgcggggccggtgagccctctccgcccggcgcggccacctccctgaagacccgacaaggacgggggcgggggctcctcccgaccagcgggccgggcgtacccggaaagcagaggtcggggggtgtctggctagcatgcggcccccacccgccccgctcacttgaacacgtcggggtcgatagcgccgcccgccgcctgcgccagctcgtacagctccatctcctcggtgctcagcaccttcttccgccgcagcgccagcttctgccgggccgcctccagccccgggggcgccaccgaccccggcccaggccctacgccctgcgccgccatccccgcggcccgcggaaaggtgcgctccgccccgccgcgccccctagcggctgcgcccaccaccctctccctgcagcgtcaacgtctggcctcccgggctgccctggcgggaggggcgggagcgcggggacggggccgcctccgcggtgccttgaagcccaacagttattgggcgctcacggtgtgctgagcggcgctctaggagccgggagtggcatggcggaccgcaggcttggacttggcgatctgggcctccctgatagactgcattggtcgtgctcgcttaggtggcagcaccagcccagtgccaggcatacattgggcgctcggtaaatgcctctttcaagaaagcgtgcaattttctggtccgcaccggtgcaccactaggggtcgcttttcggggcgggcggggggaaggggggggcactaatcaacaatactgcttacgcgcacgcggattccttgctggggagaaagtaccttggggcgccggaggccgccacaacgcaggcgcattcagctaaggaccactccctcccccgcactcctgcctcgccatttctcttc

SEQ ID NO: 3392 - DNA, 324 bp, Homo sapiens
ggtacacacccacctcacagatgaggaggcggaagcacagagggctcggtcaaatgctcatgacctcaagaagtagcagggccgcagctggacgtggtggctcaaggctgtaatcccagcactttgggaggccgaggcgggtagatcatgaggtcaggggtttgagaccagcctggccaacatggtgaaaccctgtctctacaaaaaataccaaaatagccaggtgtggcagtgtgtgcctgtaatcccagctactagggaggctgaggcaggagaatcacttgaacctgggaagcagaggttgcagtgagcctagactgtgcc

SEQ ID NO: 3393 - DNA, 390 bp, Homo sapiens
aaaaaaagagaattttgtcacatgctataacatgaataaaccttgtggatgacattatgctgaatgaaataagccaggcacaaaggactgcatggttctacttatgtgatatgtctagagtagtcaaaatcatgggaaacaaaagaatactggttgtcagagacttggggaaggaggaaaagaggaattgcttgatagatataaagtttcagttttgcaagatgaagaagttctagagatctgttacacaacaatgtaaatacggttaacattactgaactgtacactgtacattactgaactgtaaaaaatgattgagagggtaaattttataatatgtgatttttttaccacaattaaaaaatttttaagaataaaacaataaacacc

SEQ ID NO: 3394 - DNA, 342 bp, Homo sapiens
ttcctttaaaaacaaaaatagggttgggcatggtggctcacacctgtaatcccagcactttgggaggctgaggcaggtggatcacgaggacaggagatcgagaccatcccggctaaaacggtgaaaccccgtctctactaaaaatacaaaaaattagccgggcgtagtggcgggcgcctgtagtcccagctacttgggaggctgaggcaggagaatggcgtgaacccgggaggcggagcttgcagtgagccgagatcccgccactgcactccagcccgggcgacagagagagactccgtctcaaaaaaaaaaaaaataaataaaaataaaaataaaaaataa

SEQ ID NO: 3395 - DNA, 1292 bp, Homo sapiens
gcttgacacgttgatctaccacacaataaatacatgatctaaattgttttccttcatttttctgggagacttagagagatatatttagtgcccaactgtagtcattagatacgtcatcccagagtttcctttggaacagttctgatcttgggccctgtttccttcttgcctttcctatattagatgccccatgttggacttccaggataggtgtcaccctaacccttggagcattatgactttgcaggaggagtagagaggatggcagggttcatatatgccctaaagggttccaaggtccaaaattacaataagtagtggcttgaaggggtaatcaagagagaatagcatcctctgtagttattctccccgtccctaccttattgttatggtaacagggaaggcaggatgtaatctctaagtggattatttgtaagtagaaaaggacctggttctgtaagtaaataagaagatgcttggcaaccctagtttttaaaatatgatttaaggaggactacagaaagaaaactgaaaacaaatttgtacttaaacattgcaaggcttgttattgctgtatatgtatatattttgttgttgttgacttacaaatttgcttaaaaggttagtcagaattctaagacgttcagtttggtttcaccatgacagttatactgtacaaaatgggcacagtcagcctgacaaagtgacctgctgtaccctcagaactcttaacaacccctacagaagggacagactatttctagatgcttcttttaacaattgatgttttctgcttgtgtaactgctcaagctgaaaaagttagcaattaccacccagtgtgcaaaatagcattttattcgttctgaaaacacccctcttaaaccttaactaaaagagcacctactgtttcaggattctgttattaaataaattcttgttcactccctttgtgattttataacatttgaacatttctcttcttgccccccattttgtgggataaaaacaactctacttcaaatcctatggtatttaattatttccgagcgttattttgaggttttactttgtactagtaaattcctttacttcagtgattctcagccttggctatccattgaatttaaatgtgaagtattttttaaaatgctgaagctgggacttactcctccttcatgtttttaatacagccactttgactgtaaacaattaaatgtatgtgttcactgttactgaatttactgtctcaacacttaaggttaatgtggattattttgggtctgatatttca

SEQ ID NO: 3396 - DNA, 4674 bp, Homo sapiens
agagagaggttagaaagggaaaggctggagagggagcgactggaacaagaacagctggagagagagagacaagaacgggaacggcaggaacgcctggagcggcaggaacgcctggagcggcaggaacgcctggagcggcaggaacgcctggatcgggagaggcaagaaagacaagaacgagagaggctggagagactggaacgggagaggcaagaaagggagcgacaagagcagttagaaagggaacagctggaatgggagagagagcgcagaatatcaagtgctggtaagaagtttacaaactcttctgtgttcttgtatctgagcttggatgatgtctcttgtgcagtcatgtgttaaaatatttcacatttgagatgtttgggattaagccatacaatttgaaattatgaataaatatgcagcaattactactttaacattttctttttatttctctctgtattgcttttattgcttggagacttaaagaaagctcttggaaatttttattctgccattctaattcttctaacaccctataaaatggctataaagtgtaagtgtgtttttatgggaaattttttatactggatgaacttcaaatatatttccctcatgagatcacttaaattgtctcaaatactatagtactgtagtaccattcagcaagaaatttgcttgattgcattctaaagattttggaggaagaattattttagagaaatattctctaagactagttatttaaatatgctttctagtattatgaaaaattagtgaaaattatggaatctggaatttactgaaagacataagggttaatatatggctgaaagtttgagatattttaacgtttattaaaattaacattcattataggatttaagaatattccttatggcctaattaaaaagtcttaatgtggtttgattaaacagtggttggttggttggtttattaagttaatttatgtatttttagctacctaattattttctggagttatggccaacaaaacaaaacttttccacaagttagcattgaataggagcattgaacccttcatattaaatgttttgccagctttactagttttgctatttgttgtttttaaaaaaacaactaaatttattcttctgtttatggtcctattcatgtgattttaatgtcctttttcttgtagactaaataaaaattaagactaatactagctttttcttgtaaaagaaattagtcaattaaatttattaatccacttattagataaaaggaaacttatttcatccccttctgaatctcaaaatgtatttacaagttaaaatattcttgggtgaaaatagttatttgcgtttgtgcctaattctctgatactaactgtagtctacatttatacattgtgtctgaatgctggttttgtggcttcactagctccctttttctctctccttttttatcctgtcttttgctgctgctttccaccttctgtccagctccatcttcagacagctccctgtataacgctccacttcctgagtattccagttgccagcctccttcagcacctcctccatcatacgctaaagtcatctcagctccagtgtcagatgccactcctgattatgctgtagtgactgctttgccacctacttccacaccccctacaccaccactgcgacactcagcgacacgttttgcaacatctttaggttcagccttccaccctgttcttccccattacgctacagttcctcgtcctctgaacaaaaactctcgaccttcttctcctgtgaacacaccctcttctcagcctccagctacgaagccctgtgcctggtctacttccaatttttcgcccctccctccatctcctccaataatgattagcagccccccaggcaaagctactggtccaaggcctgtcctccctgtttgtgtttcttctcctgtgccccaaatgcctccatcaccgacagcacccaatgggctggttgactctgtaacatatccagtgtctccaccgcctacctcagggccagcagctcctccgccgccgcctccactgccttccctcgcatcactctcacactgtggatctcaagcttctcctcctccaagcacccctattgcctcaactccctcatccaagcctagtgttctcccttctccctctgcagctgcccctgcctctgttgagactcctctaaactctgtgctgggagactcttctgcttctgagccaggcttgcaggcagcctctcagccggccgagactccatcccaacagggtaaggctttcattattgctactaacagctaatcacttgaaaatgttatatagcagtgactttaattgcctgaatggatgggtaggatggttttgatccttgaacatttatatgccataatgccatgctttttttttttttaattaaaaaaattaaagtagaaaaatgtttttcctgttggattaattgcatttggaggaatttccttattgaactaggttttgatatcttttatagtatcgcagttaaagatgttttctagtatttaagagcccctcataatacatttctttatttttttcttttttttttttgtttttttgagacagagtcttgctgtgttgcccaggctggagtagagtggcacgatctcagctcactgcaacctccacctcccgggttccagcaattctcctgccttagccagctgagtagcaggagttacaggcacatgccaccacgcctggctaatttttgtatttttagtagagacagggttttgtcatgttggccaggctggtcttgaactcctgacctcatgtgatctgccccttcggcctcccaaagttgctaggattacaagtgtgagcaccgcacccagctaatacatgtctttcactgggaaaactttgcttgacacgttgatctaccacacaataaatacatgatctaaattgttttccttcatttttctgggagacttagagagatatatttagtgcccaactgtagtcattagatacgtcatcccagagtttcctttggaacagttctgatcttgggccctgtttccttcttgcctttcctatattagatgccccatgttggacttccaggataggtgtcaccctaacccttggagcattatgactttgcaggaggagtagagaggatggcagggttcatatatgccctaaagggttccaaggtccaaaattacaataagtagtggcttgaaggggtaatcaagagagaatagcatcctctgtagttattctccccgtccctaccttattgttatggtaacagggaaggcaggatgtaatctctaagtggattatttgtaagtagaaaaggacctggttctgtaagtaaataagaagatgcttggcaaccctagtttttaaaatatgatttaaggaggactacagaaagaaaactgaaaacaaatttgtacttaaacattgcaaggcttgttattgctgtatatgtatatattttgttgttgttgacttacaaatttgcttaaaaggttagtcagaattctaagacgttcagtttggtttcaccatgacagttatactgtacaaaatgggcacagtcagcctgacaaagtgacctgctgtaccctcagaactcttaacaacccctacagaagggacagactatttctagatgcttcttttaacaattgatgttttctgcttgtgtaactgctcaagctgaaaaagttagcaattaccacccagtgtgcaaaatagcattttattcgttctgaaaacacccctcttaaaccttaactaaaagagcacctactgtttcaggattctgttattaaataaattcttgttcactccctttgtgattttataacatttgaacatttctcttcttgccccccattttgtgggataaaaacaactctacttcaaatcctatggtatttaattatttccgagcgttattttgaggttttactttgtactagtaaattcctttacttcagtgattctcagccttggctatccattgaatttaaatgtgaagtattttttaaaatgctgaagctgggacttactcctccttcatgtttttaatacagccactttgactgtaaacaattaaatgtatgtgttcactgttactgaatttactgtctcaacacttaaggttaatgtggattattttgggtctgatatttcaagtagtactaactgccatcctatatactagtttgttttttcagggacgcttacctctcttccaaattttataagtatttattttgcttatttaccaaatccccatgaaaaaaaaaagtcttaattagatgatctgttgcatagttctattactaaagctctaacctaaagtaagtagttatatatacttggaccttacatttcagtatctttcaaaaactgatctagacttttacaactatgataaattggactcattaagtaaatacatgagtcagtttaatttagcatggcattctgcgtaccttcccacataaaataatatcactcagctctattgttgatggtcttacttaacatttctctctctcaggcattgtcttgggaccacttgcacctccacctcctccaccactcccaccagggcctgcacaggcttcagtagccctccctcctcccccagg

SEQ ID NO: 3397 - DNA, 121 bp, Homo sapiens
aggtggagtcttgctctgtcacccaggctggagtgcagtggcacgatctcggctcactgcagcctctgcctcccaggttcaagcgattctcctgcctcagcctcccaagtagctgggatta

SEQ ID NO: 3398 - DNA, 2286 bp, Homo sapiens
agagagaggttagaaagggaaaggctggagagggagcgactggaacaagaacagctggagagagagagacaagaacgggaacggcaggaacgcctggagcggcaggaacgcctggagcggcaggaacgcctggagcggcaggaacgcctggatcgggagaggcaagaaagacaagaacgagagaggctggagagactggaacgggagaggcaagaaagggagcgacaagagcagttagaaagggaacagctggaatgggagagagagcgcagaatatcaagtgctggtaagaagtttacaaactcttctgtgttcttgtatctgagcttggatgatgtctcttgtgcagtcatgtgttaaaatatttcacatttgagatgtttgggattaagccatacaatttgaaattatgaataaatatgcagcaattactactttaacattttctttttatttctctctgtattgcttttattgcttggagacttaaagaaagctcttggaaatttttattctgccattctaattcttctaacaccctataaaatggctataaagtgtaagtgtgtttttatgggaaattttttatactggatgaacttcaaatatatttccctcatgagatcacttaaattgtctcaaatactatagtactgtagtaccattcagcaagaaatttgcttgattgcattctaaagattttggaggaagaattattttagagaaatattctctaagactagttatttaaatatgctttctagtattatgaaaaattagtgaaaattatggaatctggaatttactgaaagacataagggttaatatatggctgaaagtttgagatattttaacgtttattaaaattaacattcattataggatttaagaatattccttatgcctaattaaaaagtcttaatgtggcttgattaaacagtggttggttggttggtttattaagttaatttatgtatttttagctacctaattattttctggagttatggccaacaaaacaaactttttcacaagttagcattgaataggagcattgaacccttcatattaaatgttttgccagctttactagttttgctatttgttgtttttaaaaaaacaactaaatttattcttctgtttatggtcctattcatgtgattttaatgtcctttttcttgtagactaaataaaaattaagactaatactagctttttcttgtaaaagaaattagtcaattaaatttattaatccacttattagataaaaggaaacttatttcatccccttctgaatctcaaaatgtatttacaagttaaaatattcttgggtgaaaatagttatttgcgtttgtgcctaattctctgatactaactgtagtctacatttatacattgtgtctgaatgctggttttgtggcttcactagctccctttttctctctccttttttatcctgtcttttgctgctgctttccaccttctgtccagctccatcttcagacagctccctgtataacgctccacttcctgagtattccagttgccagcctccttcagcacctcctccatcatacgctaaagtcatctcagctccagtgtcagatgccactcctgattatgctgtagtgactgctttgccacctacttccacaccccctacaccaccactgcgacactcagcgacacgttttgcaacatctttaggttcagccttccaccctgttcttccccattacgctacagttcctcgtcctctgaacaaaaactctcgaccttcttctcctgtgaacacaccctcttctcagcctccagctacgaagccctgtgcctggtctacttccaatttttcgcccctccctccatctcctccaataatgattagcagccccccaggcaaagctactggtccaaggcctgtcctccctgtttgtgtttcttctcctgtgccccaaatgcctccatcaccgacagcacccaatgggctggttgactctgtaacatatccagtgtctccaccgcctacctcagggccagcagctcctccgccgccgcctccactgccttccctcgcatcactctcacactgtggatctcaagcttctcctcctccaagcacccctattgcctcaactccctcatccaagcctagtgttctcccttctccctctgcagctgcccctgcctctgttgagactcctctaaactctgtgctgggagactcttctgcttctgagccaggcttgcaggcagcctctcagccggccgagactccatcccaacagg

SEQ ID NO: 3399 - DNA, 379 bp, Homo sapiens
gttcctattctgccatcttggaacctgaccagtatcccctttttaaaaaaaaaaacaggtttattgagagataattcatgtattatacaattcacacatttaaagtctaaagcctctctttttaaactttatttttcaagacaaatggcctgacagtatctaaaattggggactgttcttatgaatcaagatatctggccaccctatgcacttaaataagaaagtccaaccttaagattccatggatatatgttcttctattagggcacgcaggaagacacagatgccttctttattcctcctgttatggctccacagaactccagaaacctagaaggatattgaatatgtagcaaacaggatcaaacaagtaacttca

SEQ ID NO: 3400 - DNA, 379 bp, Homo sapiens; identical to SEQ ID NO: 3399

SEQ ID NO: 3401 - DNA, 329 bp, Homo sapiens
ctagcagtgagcaagactctatgggcatgggatgtgccaagccaggcatgggagggtatctcctggtctaccggttgctgagaccatgggaaaagagcagtatttggtcaggagtgtaccgtttctccaggtacagtctgtcatggcctcccttagccaggaaagagaaatcccccaaccccttgtgcttcccgggtgaggcaacaccctgccctgcttcatcttgccctccatgggctgcacccactgtccaagcagtcccaatgagacgaaccaggtacctcagttggaaatgcagaaatcacccatcttctgtgccaatcttgctg

SEQ ID NO: 3402 - DNA, 329 bp, Homo sapiens; identical to SEQ ID NO: 3401

SEQ ID NO: 3403 - DNA, 189 bp, Homo sapiens
aaccctgtctctactaaaaatacaaaaaaattagccaggcatggtggtgggcacctgtagtcccagctacttgggaggctgaggcaggagaatggcggaaacccaggaggcggagcttgcagtgagccgagatcgtgccactgcactccagcctggacgatagattgagactccgtctcaaaaaaaaaa

SEQ ID NO: 3404 - DNA, 15295 bp, Homo sapiens
tcagaatctttttgataagcattttctttctttccaaatagtttgtggagaagtttctgttggggaggaagaaggtgaaggtgaaactggttggattgaaggagctgcaatcctcttgtctgtagtgtgtgtggtgttagtaacagctttcaatgactggagtaaggaaaaacagtttagaggtttgcagagccgaattgaacaagaacagaagttcactgtcatcaggggtggtcaggtcattcagatacctgtagctgacattactgttggagatattgctcaagtgaaatatggtaagtaagtaaaaagagcagtacatctgacactaaacataaaattactgtaatcttgtttataagtttagtatatcatgctttttattttaggtgatcttcttccagctgacggcatacttattcaaggcaacgatcttaaaattgatgaaagctcattgactggtgaatcagatcatgttaaaaagtctttagataaggatcccttacttctatcaggtaaaaatttcatttatatctttgaacactttcctctttcgcaactatgtaccattgtcagcaaacaccattttcctaagagtcaataatataaagaggaatctgtattttatgctaccttctactgttgtaatccttgcagactttttttggtaagctgacaaaaacattagaaaactttgaatgcagagctatattttacaaatgagggaccagagtccaaaaaatcaagagatttgagattcagcattcatgctagtgtaatgataaaactgaaatataggcctaatgatatctcttgagttggtctgttattctgtatcatgactatttttaatgcctattgaagtataaaattaaagaatgaatatatgtttaaagcaaattaatgaattctctgtgatgctctacaaaggacaggttgttttttcttaagaactggtaaaatccttaaagtttacctaatccaactcctttaactgctgaagaatgagtttgagatataaactatttagtattatatgattaaccaagagtaggtctagcagtcacacctccatctagtcagaattgaatttgcaaatggttaagatatgttctgggattggagaagggaaggataggtgaggatactgtttgaaatggagggtgacagcttgggaggctcttgtagtaacctcattgtgatagcttgaactaagttgaactaagtaaatatgaaatggaaggggtggtgggaaaaattacaagttcgcttccaaaacactgaatgagagaaagctatagtatcacaaattgacccccaagtcatattaattattctaacttttaggttctggggttcctattcttattttcccagtattctatatggaatttatgaaattgtctatcagaactgtacttgtcagattgaatttatactagagttttgggaaagccaaatgtagccttctacatgtagtcttctgtcattgtcaggtgttgatagattgccaacattttatacattgtcagatgattgctgctgaaaccagagtcaaacctgtgatatccacaagggtcagttaagttagaatcacaactttagagcaaaacctaagtttaaccataactttttaagatttataaatgcatgccaaaagaagcttattgcaaagaaccagacacatttatattggccagaaaatcctattgcaaaaaaatcagagtaattacatttataaacaccattataaataggataaaagttccaattctaatatagacttaacgtttcatcaaaaaaaaaaaaaaatcttgagatgtgtataccttcagtatcctgtgccacttagaacattaggagatatacgtaatgctaaatgacgagttaatgggtgcagcacaccaacatggcacatgtatacatatgtaacaaacctacacattgtgcacatgtaccctaaaacttaaaatataataataataaaatttaaaaaaaagaaaaaagaacattcacaccctgtttggatttttctttgtattggtgtggttgtcatttataccaaatagccagaaagagcttggatatataaatataatgtatttaagtataatgtgttaactcattctacttaccttgccatgcttctaaggaactgtagttaatgttaaccaaataaaatctataacctttccaaaggagagggaagctatctaatcataccttaccatcacagattaaccagaccacaatgtgtaacaaactaagatagtctcctgtttgctatgtatactgcatggacttttatgtacatctcacttatttacatagtgcttagctcttcaggttgatttcctttaactgaactttggtcctttctgttttaacagagatgactggtaagctttatgtagactcaggttcctaacacaccaagtataccaggagaactctataaattttccacatttaagaaaagactgaaataactttgtagagtcccttatcgcagtatgggtgggaaagtttttctgcatttatttccctattccaaaaatgtactaaaaaacatgacatgcatttatttttaaatttactctcatgatgccatctctgactgctgttcttggcttcttaagtttagatttttaaaagcagtattcagttagtggtggggatatgaccaagacttaaaactgtttactttgcctgagcacattcactgccaacatctgattacctgtggtaaggcaaaatagaacctaaacaattggagtctggagaaaaccagaattgttaaaagaaataaattatctactttttcactatcttgaattatatttcttgttttccctgcactttcactggcaaagaagctaataactagtgaaataatcaatatggatttttaaaagcaaggaagcaaaggcctaaaaaacaatattggataagttactcagtaattaatagccaaatatggattcttaaatacttgagtaagtacatatattttatgagcgtacttagcaaataatccttgagcatcaacttggttcataagattatggtagatgctatgttcactgtgctccagaagattgtaaacaaggaaataaaatacaaatcaatgataacgtgtaaaaaaaaaaaagttgctttaaagcctgcttaaaactaacaaaaagattagacggattagaagccttttagtgaataagaaaagatatagagatgtggatgtacaagtcggagaaccgtaagcagacttatcagcattataactgaagaagaatatactctttatcctctgacagagctggactgaatctttgccttgacatttaatagttgtataaccttcaggccgagcacggtgactcgcacctgtaattccagcactttgggggctaagacgggagacaattatggagaccagcctgggcaacacatactctgtctctacaaaaaaaaaaaaaaagttgtataaccttgggcaagtttctagaaaatgagaatagtaatgcctgccaacttccaaaattgttttgcgggacatagaatttaatccatgttcccatctctgattcctagttttctgtaatgaaattttatgttagagtagtggatgagtaagtttgtaagattgggtcggtctcaaggtgaggactttggactcaatccagtaggcaacgaagaatcagaaatttttgagccatgagaagtatatgatgaaatcacaattttaggaagattaaaatggatttcaggatgaactgggaagacacagagactaggtagggggctattgcagttacaaaggcgtgctggaatgaaagcttgtgttaggtagaggttatgaggttgggtgtgggaaatgtgacattggttgtcattgatacatacgttgtttctttataagcagtgtttttctcagagaagtgtccctcataccttaggttacaattaatgagcattcattgaacccctacaaattctaggcagtatgctaagcactttacatttataggtttatatgagaaatgtaaatctcatatttctatgaagtgtacagacagggaactgagttgttaaaatttacctaatattacatggtaagtgagtagtagattgagctttgaacttggatatgactgattagagttaaaaccttaagcacaagaaataagttttatttaatgtcttactaaatgtattttattgatcaagacatggtggctcacatctgtaatcccagcactttgggtggccaagacaggaggattgcttgagcccaggagtttgagaccagcctgagcaatatagtgagaccctgtctctacaaaatttttttaaaaaaattagcagagtgtagtggcgtgtatctgtggtcccagctactcgggagggttacttcagcccaggagatccaggctgtagtaagccatgttcacaccattgcactccagcctgggtgacagaccaagaccctgacttaaaaatatatatatatatttatatatttatatttatatatattttttcctaaatgttgaggctgttaaaaacaatattactgaagtttgaaatttggtggtagcaaggagatctatcagtatttttaaaaacaaactatgtttttggttataggtactcatgtaatggaaggctctggaagaatggtagttacagctgtaggtgtaaattctcaaactggaattatctttaccttacttggagctggaggtgaagaggaagagaagaaagatgagaagaaaaaggaaaagaaaagtaagaataacaattttctataattggtatttggaaatagggcaaataatttgtaagaactagtaccttctttcaagagattctggtatgaaaaattctacaaaaagttaaaagaagatttttctattagacttaatagcatgggcctttagagaatacatcagtcccctttaccatggccagagaaattcagcatctacttgaatacttccattggcattcttgcatttattctctaggtgtagaatctcccatcatctgatcagcaaaatgaattgaactctcacggcggattttttctgctactttagcagtggctttctttatcagccatattatattttggtttcactgagctttcttttaatcttcttcacatttctattctactatacttaatgtgcttggtttttgaacacaagactaggacttcactttgacaccttacatttctcttgttatattcagcccatcattagatatcaaaatctttttaaaatgttgatccattgtatctactgtccctccaagtgttctgttatcagaaaacttgataatcatacataccatttatctgcaaggatcttacaagaaactgttatacacaagagacatctcagaatctcctagttaggggcatgccacttttaaaaagccctccccaccctgcttctaagtgtctgctataccacccttccttcacactcaggattacccctctggagtcttttccctttaggttgacaacattttacggtggtttagccacttagatttatttgatgttatttaggatagtaaacccatattgttgtttctcacatgaatattttgaaacattctaaaataactgcctggctaaaatcctggtttgctataactacagcagtgtttttaatatttgagtggtttgttttgttctttgagttttgctgttagctataaaatctctatttcgaaacaaaaatgtatgtgaaaaattctggacgcagatccaggtggcaagccccccattctaggttttttttctatgtcctccttgaagcagttctcaatgtgcttccatacgtttcttaaggctgagtagaacgcagtttgaaaaccagcacagtaatgattccatttattgaatgttttacatgcactatctcattaatcctcacaactgtacaaagtaaagacttattatttttttactgataagtaaactgaggcttacggagattatataatttgctctagatcaaagtgctagtaagtgacaggtcacaccctcttctctggctcaagagtctacccttttatgctgtgctccatcctaatccacaagagttgaaagtcattgaacgctgaagggaagtttgcatcctcactgtattccacagtgtcttttccagtaagcttcttttccccctgagtcttatacactggttttattaatctagtctagaacattccccagaaattaacatctaatttgttgactccctttttttgttgttgttgttttttttttaaagaacagggcaacattttttcttctgtgggcctccagcccttctcccattcccttgactgccttagcgattactcagaagcagtccggggtaatgtgtctcagttccctcagtggcctggactgtggccgtctggtctctccaaacttgagctcattaaaagtagctaggtattatcttactatctcctcatcaatcttgagcttctattccttcttgaccatgtttgttccatgttttccgtttgaagatagttctcctcgataaagaagctagaagaatataggatgaatggttctcctgctctttggcatttttaatattgtagtgcctactccagacaataggcctgtcccttcattactttattgcttcagatatgctcatctttctgtgttttccaaatataagctgatttggagagctgccttacctggtagtcttactggcttattctatacattcgtattctagttttactaagttacctctcctatcttttgtacatattttgtcctcactctcatcaacactctcctgtgtgccagttgtctttttttttttttttttttttttttttttttttgagacggagtctcactctatcccccaggctggagtgcaatggcgtgatcttggctcactgcaacctccgccttccgggttcaagcaactctcccgcctcaacctcctgactagctgggactacaggtgcatgccaccacacccggctaattttttatttttagtagagacagggtttcaccatgttggccaggctggtcttgaactcccgacctcagatgatccacccaccttggcctcccaaaatgctgggattacaggcatgagccaccacacccgactgcccgttgtcgttttataacatcccttcctcctccctctctacccctgctcttcctcctccctctccacctctgcccttttctgctttcttggggttatatttgtatttagttttaaaactttttgtatcatatttaggtttattacagcttataaaataatgaagtcctatggaaaaataaaacaaatatagacaccctaaattattttgcggtattctcccgtaggtaagacttagggagtgattgacccagcaggtcatcacaagtcaaatgttttctaatctgtagacacacacaccattgtgtaacaactgttatagaaatgtgaactacttctgcataatttagcatggctgtattcatttcttttggaaagctttaattcccattttgttcctacagataagaaacaagatggagctattgagaatcgcaacaaaggtaaatttaggaggacaaaagtacagtgagcttgttttcattatatccaaaaatctactgtataccatatttattcaaaagtaagatacatgtggcagggaaaatcaacaatatacgttagcttgggttaacctttcttcctgccggtgtcttagtcatgtcgtcactgcaatgttaataagattttaagtatgatttgtggtacaggttgagtatcccttatccgaaatgcttgggaccagaagtgtttcagatttcagattttttttttttttttttttggattttggaatatttgcatgtacataatgagatatcttggggaagagacccaactccaaacacgaaatttatttatacattgccatatacaccttctacacattgcctgatggtaattttgtacaatatttttaataattttgtgcatgaaacagttttgactattccgcatcacaggagatcaggtgtggaattttccacttgtgtcatgtcagtgctcaaaaagtttcagattttgaggtattttagattttcggattagggtaaatttatgtagattgactcaacttaagtatttcaagtatttgaacgctggttattatatagttagtagcaaaaatgcataagaaacaaaatatatagcataaatgttactgcatttatttaagagtcatatatgcatatttctatatgcatatggttatacataatctctacattatggtcataaattataggggagggattatgttgtttagatgttacctaacataacacacaggaaaagaaatttagtattctttagttctcagtttaaggaccctgtatgcctcatcctcattacctagcacaacattttcaaatatggtacaaagtttcacaacctaacgtcactattgtcttattttctctgtgtagacacacacacacactcacaaagctgaatgcttatacctttactggtttctgtaagaaactgatttttaaaatttctttaaaatgttaatagtgatatgtgcctttaaagtatagtgaagttctatttgctcttaaatgtagcaaaagcccaggatggtgcagccatggaaatgcagccattgaagagtgaagaaggtggagatggtgatgaaaaagataaaaagaaagcaaatttgccaaaaaaggaaaaatctgttttacaagggaaacttacaaaactggctgttcagattggcaaagcaggtatgatatagagaagaaaataaagtgttttatttttaagtatgctttctgcttaaaaattgtcttttgacacacttaaggctggaaattgttgctttgtgaatagaaggggagtttgaaatattttcagttctagctacaatgcaccaggccctttgagttactataggtacttataatttgctaataagtggtcgggttaggattagtgcctaagtctgtccagttacaagcctgtgcactcatctctgaatttctgcattaagtggagaaaaggcaacctgtgaggttatttagtaaagatgaactaattatattttaataaaatttcatcacacattttgctcatctttttactggttatgggaatttttagttatgtctctaatgttaaagttctgcactgaatggagtcgttgtagtgcggctgaagtttctatattactgccatcactagaaaatacctgttaatacagccattctttaagggaaaaagcagagctctgaggttagaaacagcatgacctccagcggtagcatctttttggaagaacactgtgtggataaataagcatatattattaaaattgcttaaattgcatcattttactgctctctaggagtatgatggaaaaagtgacgtttttgcttctgtcctcagtacacttattatctaatagcaaatatttgctctttgtaatatgtagccaagtggtaatgctgactcatgtagtgttgggggaaaaggtggatttgaggtggtaaatccacttagtagacattagattgggatgttagaaccagatatgtggacttacacctttttttttctttttttcttttcttttcttttttttttttttttttttgagacagggtctcactctgtcagccaggctggaatacagtggcatgatcacagctcactgaaccctccacatcccaaggctcaggttatcctcctgcctccacccccgaagtagctgggactacagatgcacgccactacacccggctgatttttgtatttttagtagagacggggtttcaccgtgttggccaggctggtctcaaatgcctaggctcaagtgatcctcccaccttagcttcccaaagtgctgggattacaggcgtgagccactgcgcccagctgcctctatttttgggggcggggggtgttgagggtgggagacagagtcttgctctgtcacccaggctggagtgcagtggtgcgatctcggctcactgcaacctctgcctcctgggttcaggcgattctcctgcctcagcctgagtagctggtattacaggcacgcaccaccatgcccagctaatttttgtatttttggtagagatggggtttcaccatgtttggctggtctcgaattcctgacctcaggtgatccacccacctcgacttcccaaagtgctggggattacaggcgtgagccactgcgcccagccagctgccctattttttaatacatatgtcaaagagcagagtatcccacaagatacatggttaactcttggtttactaagttaatgaaacagtaaggatagagcaaaaaaattgaagaaataatactttgtgttatataattttatttattataatgttatttttttaaaacatgggttgagtatttaattcgaggtctccccattgatgagatttttaccagtttctctttaagcatcagggagcttgcctcttgaacatataaagcaccagtttattctaagctttggatacttccttatcattgcgtattattttgtcttagtttcagtacaaggccaaagatataattaagtctaagaaagaatcctaagtgtttttctcccagttctcctggggacaagactgtacttggaagcaaaaaattaaatctgacaatgtcaagttataaggtgcaagaaagaagtaatttctcagagaaattcaatactatcaagcaagttataactctttacagtgtttaatttatatctggcaagggttagtgtctggaaatttaataatcacatttttctttcatttctattctgaaaggtctgttgatgtctgccatcacagttatcattctagtattatattttgtcattgacaccttctgggttcagaaaagaccatggcttgctgagtgcacaccaatttatatacaatactttgtgaagttcttcattattggagttacagttttagtggtcgcagtgccagaaggtcttccacttgcagtcacgatctcactggcttattcagtcaaagtaagtagaaaatagttcagtagacgttgttatgtttaaagccttagctggtatagaaaatgcccatctagttactccttttctgcttctgaaagtgaggactttcatataaatgtacactattttctctagaaatgttgtcattgatgccctgtacctcccaccagttgaatatctctgaaggagacctgtgcattccacatagggcagccttgacacaatactaagcacgactctgctgggcaaagttctagcataattttctctacgtgatagttatattgtcaagtcatgtcacctcctctttcccgtctgtaaaattaaggtgagcgtgttaggctaatgtttctaaaaattaaaaaaaaagttaaaaattatgatttccatgtgtaaaacctttcagtcagttctcatgacaattagagtaaaatgcaaactccttaccatggcctgcagggccctgccagtctggcctttgcttacctctcagtgctcaattcccttctcctttggcccagtctcaccagccttcctgatgattttcaaacatctcaactgtattcttacttcagagcccacttgttccttcctttgagtaacctgctctctttctttattcaggtctcttcaaatgtcaccttcctctgaccacttgatttacagtagctcagtccttcttgttttccaagtagaatgctaagaaatgagctttgatggctttgcttactgctgtttaccttaaagtaataatccttttgaagattattaatttatttttatcaattttctatcttacggaaaaggtggattggaaataaaaaaaaaaaagatgtagcttggacaattttgaactttttttttttcaaaatgatcttgcaggtaaaaaattataaccaaacaaagaatgctgcttttgtaaattttcaaatgttaattactagttctctttaagaaacactgctgacagtgagcaatattaattaattagtcatcgtttctacctttgcactcttcattattagacctgtcttgataagaattttttttgcttactgtttgagtttattttcttttcaggcatttaacaactttcatttcaaaaataaagtaaatgtatcaaagtgataagatacagtataatcatctatctggccttttttgatattttaaagtaatttgaaatatttggggtaaatacaagttttggacacatagaacagtcattttaccgaactgccattagttcattttgagtagtcattaatgatactaatttttcaattgattagaaagatactggtaggattgacttatgctttttgaatagaaaattaataagaacaagttaactacttttttaagcctttattagatgtttatctagctctgttaccaattactgttcttttcacagaggtatagtctttatggattctctgttagtgtttcacaaaactgaacatggtttctttactgcagaacttcatttttctaatctttaatatgtaaatcacaagtaatttaggaaatacacatccgtttttcacatattttttcaaggaaccagtttttttgcagtatcttgcaaattagtcatcacaaaaaacactttgtaaaataactccatatagtttttaacccattccacattaagtgctgagaactaattataaggtattttaacttaaatgccctgtgagactactgtgaaaactgttggttttttagaaatgattttttctgttgtaaatgagagaaagaagtgagatgcagtttgatgctaaggatgaaaatgccaagtctgccagcatatagaatagctaaaaaatgactcattctagttttgatatgttaactctatcagagttaataataaaaaaaaatcaagcaactacatacccacaagctctttattttagctgctaaaggctattttttccttggcactgatgtaagaatcttttgttttccacttaataaggaggcttaatcctttaatatactcttacactactataagtaccactgtacttaacagtacagattgtcattgctcttgcaatgtgaggacattttgcaaaaaccgttggagacatatattcagtattatttgtgtacggatgtaggtacctgaattgattcactaggttatgttatgcagcaataaaatgattgaaaccccagaaagctctggtactgtgtttagcttattttaataggtcaaatatgctaaaaaaaaaaaaatttcagtattacattggtactttatacattgtatttatagaaagctgggagttttctaattttaaaacaatttataatcattttaatgtaatgaggtgattggttttatatgcagcttaactagttttttttttttggtcactgtagaaaatgatgaaagataataacttagtaaggcatctggatgcttgtgaaaccatgggaaatgctacagctatttgttcagataaaacaggaactttgacaatgaacagaatgacagtcgttcaagcttacataaatgaaaaacattataaaaaggttcctgaaccagaagctattccaccaaatattttgtcctatcttgtaacaggaatttctgtgaattgtgcttatacatcaaaaatattggtaaggtttttgaaataatttatgaaaattaatttttaaatctataatgatcagactatatgtaagtcttcagaccaccattactgtatgtaaactgaactgttaagtttttaaaaggcatatatttatttatataatggtttttaaatttgtgttatgagtgaggtctgctgatcaacataaacattgtttgcttacatttttctcctatattttgaatttcctgtgttcagaaactctccagccttataaccagagcatgtatttaattttaaattcttgttaagctcatttttgagaaagatcaaactgtcttactataggaggtcagctctcaacttacagaaaatttttaagccgatttcaacttaaaataacatgttttatatatggttgccatgtgttctgtttggtttctcagtagttcctacctaaaaggtggtccttagacctttttagaactaatgcagtaaagtaattctagacttgtgccaccatataataaaaaattttcaacttacaagttttaaaaatcttatttataacagaaagaatgcgatgttatgtttgacttaatctcttctagtgatttatggatgaaaatcattaacaaaaataatattgcaagctgttcattagggaaaacatacatgaattggatgattacattggaaagttatgggatcttggttctagatctagctttgccttttactagctgaaagtctgagctaccttctttaattactgagtaaagatgatcacatctgcccttaataccattgtgataattatgtaaagtggtatttctgaaggcactatgaaggaattgaagcttctcactgcatttaagagaacagtattttaatgaatgtacttttaagccataaaaattggtagatttaattttgaatgatttagtataaaagttaagtgaaaacaggaaaaggaaattaaaattaagttccactctgtattaggaaccaactataaacttcatacatcttatatcacttaattttggggtcataagtgctcctattttacagatgctgaagccaaggaccaaagcagttgggtaattgtcaaatttcacgtagctagtaactggcaggactgagattagaatccatgtcattctcaccccaggctcctttctaccttacttttctatatccttctttaaaatgttgatattagacaattgctttgtaattttattttagaatatcgcagtctgttttacattataaattaaacgttcttagagaaacgagatactagctactaaatgtttttctcttatagccaccagagaaagagggtggattacctcgtcacgttggtaataaaactgaatgtgccttgttgggacttcttttggatttaaaacgggattatcaggatgttagaaatgaaataccagaagaagcactgtacaaagtctacaccttcaattctgttaggaagtccatgagtactgtcctgaaaaattcagatggaagttatcgaatattcagcaagggtgcatctgagataattctgaaaaag

SEQ ID NO: 3405 - DNA, 558 bp, Homo sapiens
ctttgatgtttatttttagaagtcgatttacttgttatttaatatgcagaatcttgaaaagcctcctgggaagaaaatcaagtttatgtctttctttctttctttttttttttttttttatttgtttaaggtggagtttccctgtatcacccaggctggagtgcagtggcgcgatctcagctcacttcaccctccgcccctgggttcaagggattctcctgcctcagcctcccaagtaactgggattacaggcacctgccaccacgcctggctaatttttgtatttttagtagagtcagggtttcaccatgttggccaggctggtcttgaactcctgacctcaagtaatctgcctgtgtcggcctcccaaagtgctgggattacagacgtgagtcactgcacctggcctcaagtttagatcttcaacgctcattgtggttactggactctgaatgtgataagagaattatgaagtaatttttagaatagcaaagcataaaagctggatcttggaaattccccatttatatcaaaatgagatttatcatgtttatgctg

SEQ ID NO: 3406 - DNA, 210 bp, Homo sapiens
aacttggctacaaaaaaaactaactcttcttgaactggttattaagttttttatgcctcttttcctagacataaaagctgttagtagattctctgttttttagcccagcaccagagagctgatgttggttggtcagatgactgtttagatctgtgctgtctctagctcctagcatatgttgctatttcagttaattacaattggccaggt

SEQ ID NO: 3407 - DNA, 534 bp, Homo sapiens
cccacgtagccttgatttgaactactgcttcccttatcctttactggcctattgcttacccagccaagttgtagactgtgttctcttcctgggttgcactatggcagttagaatgtaggtttttgttttgtttttctttgttagtttagtttttgtttttaataggaagaggaatcatttagagatgacagagaactaggaagaacctaaggaataatgtgtgctttacctggggtatatcctgaaaattataggtgaaatacagtgtgtctgcaatttctaggagaggttttttgttgttgtagttgtttgtttttttaagctttcgcaacattgtcaaaagaattcttgcctccaaaagactaggagccactgggttcatccttttctcacagtagaaacagttgaaatttaggatgtggaatagacttctctgagatcataaggttagagtttaggtctcttgactccacatgcagtgctcattataccttatttgtggagtgaggtctaaatgagaggtgtgtgggcttt

SEQ ID NO: 3408 - DNA, 756 bp, Homo sapiens
aaataaaagcttttgagttgatctaaaaagctaactggtttattagtcaaccgttgctgtgtaagaaacaatctgagaacctcagtggtataacacaatgaacatttatttctaataagtttctgggttaggtggggcatttctgcttcagtttgcagcagctggggcctctctcattgccactgtggatcagcaggggtggctgtgttcccagggctgcccattctcctcctgggaccaataagctagtcacagcatacttttcacgtggtaggagggaagaaggcaagcccagttccctaaagaggaaagggactctagacagagcagtactattcaaagcatgtctgcagtgagtgagataggtacagaaattaacaacaagcatttagaaactaaacaattgccacaatattcaagcggtgtttttgctgaattttactaaagtattggtccaggacacgttggaaatttaaaaagaaagaaaaaactgtagcatgactcgcgatagtttgcaaagtgccgagagagaacacatgacattctgctcactagaactgactccctgtactgcccatgagtaagcattctgatctacgcatgtgtcatgggtttgtgttaggatcactttgtcaccaagagtctgaccatctttgagtgtgctgatggtttcgtacctacaggacttgtccattaccaaggatgtggcaccgtgtaaagcctctcagcacccacttgttggcctttccctgccag

SEQ ID NO: 3409 - DNA, 756 bp, Homo sapiens; identical to SEQ ID NO: 3408

SEQ ID NO: 3410 - DNA, 345 bp, Homo sapiens
cggggcggccagctcctccggggaacccccgccctcccggcgcccggcccgcgtgcgcagtccgcagtccgaacggccgccgttgccggcgcgggctggttccgttagtggtggtggttccggggttccgttcctaggcagcgcgcggctattagcgtctgactccagcgaccgcgcgcgggttcgagggttggcggcgaggcgctcggtttctcttcttccgtccacccgcgcttcccgttccccgtcaccgccgctggcgtttgtagatttctttccgccagtgaagctgggttttctggagttggctctggcgctctggcccctggagtgtaatttcctaca

SEQ ID NO: 3411 - DNA, 356 bp, Homo sapiens
tttgtagctttaagcgattagagaaaattgtgcaatattcccctctacctgtttgaaaataaacattcttaaaaggatgtaatttagataatgaattgctttctctgaaacttatcccttgggacacctcaaatctgattggttttcaaagcttgggggaaggaaattaattcctgtgataagtggttggctgaacagaatgtcttgaaaggttagcctgtagcattaggagaaatacctaatgtaaacgacgagttaatgggtgcagcacaccagcgtggcacatttatacatatgtgacaaacctgcacgttgtgcacatgtaccctagaacttaaagtataataataaaaaaa

SEQ ID NO: 3412 - DNA, 2275 bp, Homo sapiens
agaagttcctggagggcgaggtgcccctggaaacgttcctggagaatttttcctccatgaggatgctgtcccacctgcgccgggttcgcgtggaaaagctccaggaagtggtgaggaagcccagggcttcccaggagctggccggcgatgcccctccaccccgtccaccacccccgcggcgcccagtcccccagggaacaccccctgtggttgaagagcagccgcagccaccattagccatgcctccctaccctttgccctacagcccatcccccagcctgcctgtgggccccactgcccatggagccctgccaccggcccctttcccagtagtgtcccagccctccttctacagcgggcctctgggccccacttacccggcagcccagcttggacccaggggtgctgcgggttactcctgggccccacagaggagcatgccaccccggccgggctatcctgggaccccaatgggtgcctctgggcctgggtaccccttgcggggaggcagggcccccagtcctggttatcctcaacagtccccataccccgcaacaggaggaaaacctccctacccaatacagcctcagctccccagctttccaggccagccccagccctcagtgcccctgcagcccccttatccccccgggcccgcccctccctatgggttcccaccaccgccggggcctgcctggcctgggtattagacacactcctggccctcggcccctccctagtcccacccacgctcaacctttggcccagccatcgccgagattcgagggtcaactggaagtggcgttggtgctccctgtggacttgcgtcggcacccagaggccttggagggacaaggcactgggcggtgtgactggtcatggcacttgctggccttctggccagaggtcctcctggaagcccctcctttcagtgcctggctgcagcggtgctagccaggctggagtccagcacctctcgccggtgtctgtgtgagtgagcgcatgtgcgcatttatgagcatctacttgcggctgcactcagggccatttgaacccagtgcagagttatctctatgaggaggccccgggtctccagccccctccatctcccctggggtttggcatatttgacatggagccccatgccaagggatgcagctgttggtgtctgtccagtccattcaaggctagcctgcccatgcactgtggcaggggttggattggagggagagaacagagttgggaaaaacaacaggtttgagtcctataaagcccataatttaactccagtagctgatgtcagacaagcttgtcctatgtcctatttgagtggcagcagcgccagccccagcaagaaggctgggggttgtcaaggttgtccccagaccttgcttgcagtggttggagaacccagggggctgccttgggccctctggccagagggaagcgggcagctctagccctggagattgtggtcacattggggcttgtttaggattggagggccaggtcacctccccagccaccctcccttctctcctctggggtccccactttagggcgactttgcccgaggcccacgcatccatccactcctttagtgccttgaatctcattcacaagcagccccctcccttcccctccccttctcactctgttgatgtaatcctcccacccccagtgtccatcctaagacaggcatcaaaagaggccctaactttacttcccaaatggtgctttttaaaaaacaccatcactacattaggggcaattttttcacacctccctgtcttcagaatgtaaagggtggggattatgtctctgtttaatatgcagccccctgcactgtggggtttggggcatgttcagtaataagaatgaatacaatagacaaagggggtgtgatgagtgttaacttggttgttccagaggtaaaccaggtctcagggaagagcctggagctgctattgcttaggaagttgtacgtgccttgaaatgtccactacctgaggacgcagcatctggtgggcccggggctgctggggccaaggagggaccttgaccttctggtgcctgcccctccccggcctatgtgccatccgcgtgacgctaggtcagcgctgccggttctttaccaaatgtgcttgcttctcctaagttatttataaagagaaatcactaatggactctactggtttgagtgcttctgagctggatgaccgaccgcctgtatgtttgtgtaattaattgccataataaactttgatgagtcaca

SEQ ID NO: 3413 - DNA, 3953 bp, Homo sapiens
aggtccaggacctacagctggaacgggagatggcactggccaccaaccggagcctggcagagcggaacttggagttccagggtcccctggagatcagccgctcaaacctctcggatagataccaggagctccggaagctcgtggagcggtgccaggagcagaaggcaaagctgggtagggtggctcctctgtgaactcagggtccccattcagggttggacggaggcccaccgtgttcccagccctgtgctaagtgctttatgtatattttttcacaacagccatagaagggtgggtactgttgttactccattttataggtaagaaaaatgaggctcagagagattcaataacttgactaaggtcacccagcttagaaataggtggaattgggatttgaattgagacagcctgcatcctttgctgctgccgttacccttggcagctcagcttctatgctttactgagctgttcctgagctgctctgggctctctgtgtcccaggacctgtcacctttgaaggtgggagggtggtccttgtcttgatggtgagaaagcttgacactcaggttaggtaactccccttgctggcaggcagaactgggtcagttgggctctgaagcccaagtcatttcccatcccaggatggcgtagggtaggcttggccaaggtctaggctaggttcattcgggcccttctctgctcaggaaggaactggaccaaaagtgctcatcaagcccacccagaaggaccctttggtggaccctgctgtggtggctgggcctggatgcacacagagggtatgcaaagtgcctttaacactgaatcaggaagcacttttcaaatgtcagtcgttctgccctcccttccagagaaattttcttcagcactgcagccagggaccttgttagaccttctgcaggtggaaggcatgaagatcgaagaagagtccgaggtgagagggcgaggcgacacccctcttccctggacggggtgtcagtccctgcagcaggggcccttggaaggagaagcagatgtctgcaaagcatggaacaagggagctttcgtagatggcagaggtgaaggacatctttagtcctggggaggccttttgggtataaataacaggaacccagtcccactagctgaagcagaaacgggtgacagtggacaagggcagctcgcagccctggatggtagggcagcacagcaggaggcccccaggggctgaggccagctccctactccactctccctgcttcctgcttccctccggccacctcttcagcctctgtgggcaaactggtgctgtccactctgtgtctgggtggaagaagcttctaggccctcccagtccctgggctagtgctcatccaggtgttcagcacatatatgcagtggccactgtgggcctgacatgatgccaaggtgccaggacagaggtgaccacgacagagacagtcctcgccttcaagggactgacattctagtgagggagacagtgcatgtaccatatgtcagctgtgagaaggggcgtatgggcagggaagaggagggggtgcctgaggcggcgtgaggtgggagggctgcagctgaactcagaccctggggaaaatcaagaggccttgatcccagctgcccctgttgtcactggaccttatgtctaccaggccatggctgagaagttcctggagggcgaggtgcccctggaaacgttcctggagaatttttcctccatgaggatgctgtcccacctgcgccgggttcgcgtggaaaagctccaggaagtggtgaggaagcccagggcttcccaggagctggccggcgatgcccctccaccccgtccaccacccccggtgcgcccagtcccccagggaacaccccctgtggttgaagagcagccgcagccaccatcagccatgcctccctaccctttgccctacagcccatcccccagcctgcctgtgggccccactgcccatggagccctgccaccggcccctttcccagtagtgtcccagccctccttctacagcgggcctctgggccccacttacccggcagcccagcttggacccaggggtgctgcgggttactcctggtccccacagaggagcatgccaccccggccgggctatcctgggaccccaatgggtgcctctgggcctgggtaccccttgcggggaggcagggcccccagtcctggttatcctcaacagtccccataccccgcaacaggaggaaaacctccctacccaatacagcctcagctccccagctttccaggccagccccagccctcagtgcccctgcagcccccttatccccccgggcccgcccctccctatgggttcccaccaccgccggggcctgcctggcctgggtattagacacactcctggccctcggcccctccctagtcccacccacgctcaacctttggcccagccatcgccgagattcgagggtcaactggaagtggcgttggtgctccctgtggacttgcgtcggcacccagaggccttggagggacaaggcactgggcggtgtgactggtcatggcacttgctggccttctggccagaggtcctcctggaagcccctcctttcagtgcctggctgcagcggtgctagccaggctggagtccagcacctctcgccggtgtctgtgtgagtgagcgcatgtgcgcatttatgagcatctacttgcggctgcactcagggccatttgaacccagtgcagagttatctctatgaggaggccccgggtctccagccccctccatctcccctggggtttggcatatttgacatggagccccatgccaagggatgcagctgttggtgtctgtccagtccattcaaggctagcctgcccatgcactgtggcaggggttggattggagggagagaacagagttgggaaaaacaacaggtttgagtcctataaagccataatttaactccagtagctgatgtcagacaagcttgtcctatgtcctatttgagtggcagcagcgccagcccagcaagaaggctgggggttgtcaaggttgtccccagaccttgcttgcagtggttggagaacccagggggctgccttgggccctctggccagagggaagcgggcagctctagccctggagattgtggtcacattggggcttgtttaggattggagggccaggtcacctccccagccaccctcccttctctcctctggggtccccactttagggcgactttgcccgaggcccacgcatccatccactcctttagtgccttgaatctcattcacaagcagccccctcccttcccctccccttctcactctgttgatgtaatcctcccacccccagtgtccatcctaagacaggcatcaaaagaggccctaactttacttcccaaatggtgctttttaaaaaacaccatcactacattaggggcaattttttcacacctccctgtcttcagaatgtaaagggtggggattatgtctctgtttaatatgcagccccctgcactgtggggtttggggcatgttcagtaataagaatgaatacaatagacaaagggggtgtgatgagtgttaacttggttgttccagaggtaaaccaggtctcagggaagagcctggagctgctattgcttaggaagttgtacgtgccttgaaatgtccactacctgaggacgcagcatctggtgggcccggggctgctggggccaaggagggaccttgaccttctggtgcctgcccctccccggcctacgtgccatccgcgtgacgctaggtcagcgctgccggttctttaccaaatgtgcttgcttctcctaagttatttataaagagaaatcactaatggactctactggtttgagtgcttctgagctggatgaccgaccgcctgtatgtttgtgtaattaattgccataataaactttgatgagtcaca

SEQ ID NO: 3414 - DNA, 575 bp, Homo sapiens
tgcccaggctggagtgcaatggcaagatcatggctcactgcagccttaaactcctggcctcaagtgatcctcctgcaccagcctcatgaataacagactataggcatgtgctaccatgctcagctaattaaaaaactcctttttttggtagagctggggtctcactttgttgcccaggctggtctggaactcctggcttcaagcaatccttccaccttggtctcccaaagtgctgggattacaggcacgagccaccatgcttgggcacatggcagtgtgaaagctagactttttggtccttggtatccttgacctaatgtgctagaatcaggggttgcacgcccactcattggccaggtcacatgatttacgcaggaacataatttacggaatgggcagggtttgagggacacacaggtgagtggaagggctggccctgctctagcaggttgctgggatgcaggaacggggaggttgtccaggtcacggcagcgcgtcctctaccaagggatgtggacaccagcccccgagcactggctgggggagcagtgggttgccttcaccagccaaggcag

SEQ ID NO: 3415 - DNA, 1015 bp, Homo sapiens
ctaggagagaagggagttggcaggggctctctccgtgtagaagagtgtgcatagaggggtgtgtggaggggagctgctttgggttgggggccagatatagaagggaaacaccgtaacttattaaggaaagttagtcaaaatggttttatctcccactttgcaactttttttaatttttgtttttttaggcagggtcttactttgtcacccaggctggagtgcaatggcgccatcatggctcactgcagcctccacctcctgaactcaaacaatcctcccacctcagcctcccaagtagctgggactacaggtgcacaccaccacacctggctaatttctaaattttacatagcaacttttaagaactattagatacttcttgttgagttttgctgtagattcaaagaaaattgataattatctataaaggttagtagcgactccttccttttctagctatatatctgtatgagtatagattcttcctccttatttccaccaaagtaatatactagggcagattgaattcagaagcagcaaaacatgtgaaaacatcttttatttacctatttttagtcttactgacctcttttcagtgactgggaggacttcacactgaacccctaatatgcatcgatatgcaattttctaaattgatgcatattttgcatatttatggggaagatgagaatctttgttgcatgcatagaatgtgtgatgatcaggctgggcgcggtagctcatgcctgtaatcccagcactttgggaggccgaggtgggtggaagacctgaggtcaggagttcgagagcagcctagccaacatggtgaaaccccatctctactaaaaatacaaaaattagccaggcgtggtggcacgtgcctgtagtcccagctacaagggagcaagggaggctgaggcaggagaatcgcttgaacccaggaggcagaggttgaagtgagccgagattgcgccattgcactccagcctgggcaacagagcgaaactctgtctca

SEQ ID NO: 3416 - DNA, 410 bp, Homo sapiens
cctccgcctcccgggttcaagggatcctaccacctcagcctcccgaggctgtagctgggactacaggcatgcgacccaccatgcccagataatttttgtattttttgtagaaacggggtttcaccatgttggccaggctggtctcgaattcctgacctcaggtaatccgtcctcctcggctttccaaagtgctgggattataggcgtaagccacggcactcggcccgagaagatgtttttaatgagccccctatgctcaacaccgtggtagatgtaaaagaaaaacaaaacaaaatccacatgacctagtccctaatttgaaagcagttaccattccgtatttgctagggaacggtacaaaagatgaaacagatgcataaatattttaaatatgtaatgccacccctctc

SEQ ID NO: 3417 - DNA, 718 bp, Homo sapiens
cccaatgtgcctttaaatatagttttattatttaattgaaggtacacattccatccgtggaagaaattgcagccagctttaagattttaaatgtttttgtgtaaaaaaacctttttattttgtaattaatatttatttaaaaaacttgaaaatacagacaagtaaataaatataagacaaaaatcattcataatcttattcaggttcatccaggtttttttctgtgtatttttgcttatagtatatgcttacaaaaaagttgaatcgttttcgcttatattttttctttgcttttggaacttacacagcatcttttgcgagtcaataaattgtgtttctgctgtatttttaatagatacttagtctgtaatacaaaacatgagattcaacaaactgtaaatttaattaagcaaccctttgtggttgaagggcctagtttggtgtctggcatttagtatacactgctagcatctgtgtaaaagtgtgtgaacattttggaagcttcaataaatacattgtgtgaaattgtcctctggaagttacactgtattagctatatgtgagattgctcataaccctatattatgttaggtacactgtgttacccttaaaaaactttgctattctttctagtaaaaaaaaaaaaaaatattaaaatgtttgaaagagtttgagtactggtaaggttaattattttaaagtttgttttttgaagatt

SEQ ID NO: 3418 - DNA, 431 bp, Homo sapiens
agcgttgatctgaatatttagtctgcctgtataagaagtgttagtgccaacatctgaatttataaatgtttccctttatttatgtaactgtacatcataactggggaaatgattaagaatgcttttttttggtagtggtttgagtattctcaagcaatggaagtaagacagcaatgagaatttgttaatgtccttgttgtgcatttatttcaatagacatttaagggatctgttaaggaagttaacggtgttaatttgctttcgataaaactgaaaagatgacatttatttatttatttttaggttgggcccatgtggtttgtgccctgtatattccagaggtacaatttgccaatgtttccacaatggaaccaattgttttacagtctgttccgcatgatcgttataataaggtacagtggatattattt

SEQ ID NO: 3419 - DNA, 456 bp, Homo sapiens
taaaagcattaaaacttacaaacaggttgcaggaatagtacaaaagaactcttccttccctaaaccatttgagagtaacttaccaatataatatgctgtcacccctgaatacttcagagtttcccataaagaaggatactctcttgggaatatacaatatgccgtcaaaataaggaaattaacagcgatacattattactctctgatctttggaacccattcatgtttttgtaggcatattctttatagcaaaagaatcacaaactgcattttgactctttggtctttttatttatttttatttttatttttgtacagagtctcactctgtcacccaggctggagtgtagtagcgcagtctcggctcactgcagcctccacctcctgggttcaagtgattcttgtgcctcagcgtcccgagtagctgggattacaggtgtacaccaccacatccag

SEQ ID NO: 3420 - DNA, 3031 bp, Homo sapiens
cttaatgatgggaaagcatagggtagcttaagaaaaaataagctattaatatatatataggagaacagacaaaaataaagttggtgaggtaggttaaggctgaatgtcaaactgaagaatcagtacttattcaggtaaggaagattttcaatccaaggagtgacaagaaaatcaagctgaccactgtgagtcaaatggatttggatagggaaggagtaaataccaaaattctatcacagtagttcagatagaaagatatagaaacctaaactagggaagcagtgaaagtagagaacatgttcctacctacaggatggacttgctttttgtatgatctaaaggagaaaacatggctaatcattaagagtccaagactgggtagttgagaaaatagtgatgccattaatttaaatgcagagataggggagagaatctggtcttgatattgagcttggttctggacatttttttttaattcaagcaccaccaggaatttcgggtggaaatgtccagttgacgagcagtgggaaatacaggtggggatccctagtggggacacagtacttaagtatggatttgatagtcatttccacagaagtattagaaaaatataatgtggagacagagattctgagtttgctcctgccttacactagctgtatgctctaacaagactctcaacttctctgagcctctgccctctcatttataacatgggatcaaaaatatatatatcattctacctcctcatagggttgatgcagactaaaatgagataatatctgagaaagtgctataaaaacagctgttatcaaaaaaccatttaagtgctttatatatgtcaaactatcctaggaaactattcgaataattttttttctcagtaaaaattatactattgcagattatgttgggggccgaggatcttaaggtacagtagtatgcaatcataggtcctgaccagaaggtggcaggagaaagacttagtcagagcttcttgaggattccgtatttataatcctgaacgaaaagttcattttacttatacattacatataattagactcccaaataaattcttcctatccttagctgcatgtggctctacacatttatttatccactgaccatgtcaattcatctgtaatatagaaaatggaaaaaaagaaagggagtaaataatacaatgactactactatatagtgaatacctctgcgtgctagaaaccaaattcaggatttctacacaatattccatttaacatcaatacaattccatgaggtaggtattattattcctcattttaaagatgaggaaattgagattcaagcttttgcaagtgaaaataagcagtgccagagttgcagctgccatgaaagctcagtgacatttgcttatttacaaaaattaggtataacctaaagcaagaatgcaaaaaaaaatgaactctgagcacagggaccttgagacagctctcctgaaagcctacacattgttggtagagtgaagttttagggaagcaaaactgtgaagtatgaaaccagatccaacctgagaacagatgcttctgagtaagcaaagagaatttctaaatagctaaaagacagaaacattcctaaagtagacagtttggaatggctcaaaagaaaatgtgcagcttgcgtgaccaccccaaaagattgtcccacctaggcagctgaagaacaacaacttagccttggcaacaaagcaagatcccgtccttacaaaacaaacaaacaaacaaacaaaaaaactaattggccaggtgtgttggtgcatgcctacagtcccagctacttgggaggctgaggcaagaggatcacttgaacctagggagttcgaggctacagtgccctatgatggcaccactgcattgaagtatgggtgacaagagcaagaccctgtccaaaaaaagaaaaaacgaagaacaacaacttacaacttacctttctacttttgaggagactgggagtcacagagtccctgccacaaggtggaggggtaacagatttgattggaagcagtgagttataaatggtgctgtgtcctctagccctctaaccaacacatgactgtacagctggcctctctgatactaaattttccccatgtgctaaagatcgtacaagaagagggttgcaaaatgaagagaatagattaattattatagttaattatatttcttggaaaatcaaccactggtgagacaccaaacccagagaaactgaggaagtggttatatttgcatatgcatagaaatacacatacatgtttgcagataaatagaattttgtctaatatggtatgtactaaattgttaacatagcttcctctggagagtggaacttagtgtcagaaggaacatctatctgtttttaacactatacaacaaacatgttttattattttaatatttttaaagtggttattaaagagaccaatgactagttggtgcaaaataaaaagaagccaggaagattctataatattaatagatcagatttgaggtgacacaagcctcaaacagaattaattcatccatgatgattgatgaagaaacttccctatggaaagaaaatatggattccattcaaagcactttattttggttatttagaatattaaaatatacatatcctctagctgtcttagaattctgattgattacttatgaaaacattttctccttctatggtacaatgttaacaataatacttatgaactaggctgctgtttgaagatagatagacagatgtgtgtatgtatctagaaagttatagttacatatagagtgtgtgtgtgtgtgtgtgtgtgtgtgtgtgtgtgtatccctttactcgtgtcatcagctctagaaagtataagttatcatctccagtatatagtagaggcacaaaggggttatgtgagtagcccaaatcaaaaaagactatagccaggattcaagtccagagagccccagcccagagcgtgtactcgaggacactcttgtatatacttcgtgagaaa

SEQ ID NO: 3421 - DNA, 3065 bp, Homo sapiens
cttaatgatgggaaagcatagggtagcttaagaaaaaataagctattaatatatatataggagaacagacaaaaataaagttggtgaggtaggttaaggctgaatgtcaaactgaagaatcagtacttattcaggtaaggaagattttcaatccaaggagtgacaagaaaatcaagctgaccactgtgagtcaaatggatttggatagggaaggagtaaataccaaaattctatcacagtagttcagatagaaagatatagaaacctaaactagggaagcagtgaaagtagagaacatgttcctacctacaggatggacttgctttttgtatgatctaaaggagaaaacatggctaatcattaagagtccaagactgggtagttgagaaaatagtgatgccattaatttaaatgcagagataggggagagaatctggtcttgatattgagcttggttctggacatttttttttaattcaagcaccaccaggaatttcgggtggaaatgtccagttgacgagcagtgggaaatacaggtggggatccctagtggggacacagtacttaagtatggatttgatagtcatttccacagaagtattagaaaaatataatgtggagacagagattctgagtttgctcctgccttacactagctgtatgctctaacaagactctcaacttctctgagcctctgccctctcatttataacatgggatcaaaaatatatatatcattctacctcctcatagggttgatgcagactaaaatgagataatatctgagaaagtgctataaaaacagctgttatcaaaaaaccatttaagtgctttatatatgtcaaactatcctaggaaactattcgaataattttttttctcagtaaaaattatactattgcagattatgttgggggccgaggatcttaaggtacagtagtatgcaatcataggtcctgaccagaaggtggcaggagaaagacttagtcagagcttcttgaggattccgtatttataatcctgaacgaaaagttcattttacttatacattacatataattagactcccaaataaattcttcctatccttagctgcatgtggctctacacatttatttatccactgaccatgtcaattcatctgtaatatagaaaatggaaaaaaagaaagggagtaaataatacaatgactactactatatagtgaatacctctgcgtgctagaaaccaaattcaggatttctacacaatattccatttaacatcaatacaattccatgaggtaggtattattattcctcattttaaagatgaggaaattgagattcaagcttttgcaagtgaaaataagcagtgccagagttgcagctgccatgaaagctcagtgacatttgcttatttacaaaaattaggtataacctaaagcaagaatgcaaaaaaaaatgaactctgagcacagggaccttgagacagctctcctgaaagcctacacattgttggtagagtgaagttttagggaagcaaaactgtgaagtatgaaaccagatccaacctgagaacagatgcttctgagtaagcaaagagaatttctaaatagctaaaagacagaaacattcctaaagtagacagtttggaatggctcaaaagaaaatgtgcagcttgcgtgaccaccccaaaagattgtcccacctaggcagctgaagaacaacaacttagccttggcaacaaagcaagatcccgtccttacaaaacaaacaaacaaacaaacaaaaaaactaattggccaggtgtgttggtgcatgcctacagtcccagctacttgggaggctgaggcaagaggatcacttgaacctagggagttcgaggctacagtgccctatgatggcaccactgcattgaagtatgggtgacaagagcaagaccctgtccaaaaaaagaaaaaacgaagaacaacaacttacaacttacctttctacttttgaggagactgggagtcacagagtccctgccacaaggtggaggggtaacagatttgattggaagcagtgagttataaatggtgctgtgtcctctagccctctaaccaacacatgactgtacagctggcctctctgatactaaattttccccatgtgctaaagatcgtacaagaagagggttgcaaaatgaagagaatagattaattattatagttaattatatttcttggaaaatcaaccactggtgagacaccaaaacccagagaaactgaggaagtggttatatttgcatatgcatagaaatacacatacatgtttgcagataaatagaattttgtctaatatggtatgtactaaattgttaacaatagcttcctctggagagtggaacttagtgtcagaaggaacatctatcttgtttttaacactatacaacaaacatgttttattattttaatatttttaaagtggttattaaagagaccaatgactagtttgtgcaaaataaaaagaagccaggaagattctataatattaatagatcagatttgaggtgacacaagcctcaaacagaattaattcatccatgatgattgatgaagaaacttccctatggaaagaaaatatggattccattcaaagcactttattttggttatttagaatattaaaatatacatatcctctagctgtcttagaattctgattgattacttatgaaaacattttctccttctatggtacaatgttaacaataatacttatgaactaggctgctgtttgaagatagatagacagatgtgtgtatgtatctagaaagttatagttacatatagagtgtgtgtgtgtgtgtgtgtgtgtgtgtgtgtgtgtattcctttaatcctgtcatcagctctagaaagtataagttatcatctccagtttatagttgaggcacaaaaaggttaaatgagtagcccaaatcaaaaaagactatagccaggattcaagtccaaagagccccagcccaaagcttgtactcttggccactcttgtatatacttcttgagaaaaataaatgtattaaaaaggacaccaaccata

SEQ ID NO: 3422 - DNA, 3063 bp, Homo sapiens
cttaatgatgggaaagcatagggtagcttaagaaaaaataagctattaatatatatataggagaacagacaaaaataaagttggtgaggtaggttaaggctgaatgtcaaactgaagaatcagtacttattcaggtaaggaagattttcaatccaaggagtgacaagaaaatcaagctgaccactgtgagtcaaatggatttggatagggaaggagtaaataccaaaattctatcacagtagttcagatagaaagatatagaaacctaaactagggaagcagtgaaagtagagaacatgttcctacctacaggatggactcgctttttgtatgatctaaaggagaaaacatggctaatcattaagagtccaagactgggtagttgagaaaatagtgatgccattaatttaaatgcagagataggggagagaatctggtcttgatattgagcttggttctggacatttttttttaattcaagcaccaccaggaatttcgggtggaaatgtccagttgacgagcagtgggaaatacaggtggggatccctagtggggacacagtacttaagtatggatttgatagtcatttccacagaagtattagaaaaatataatgtggagacagagattctgagtttgctcctgccttacactagctgtatgctctaacaagactctcaacttctctgagcctctgccctctcatttataacatgggatcaaaaatatatatatcattctacctcctcatagggttgatgcagactaaaatgagataatatctgagaaagtgctataaaaacagctgttatcaaaaaaccatttaagtgctttatatatgtcaaactatcctaggaaactattcgaataattttttttctcagtaaaaattatactattgcagattatgttgggggccgaggatcttaaggtacagtagtatgcaatcataggtcctgaccagaaggtggcaggagaaagacttagtcagagcttcttgaggattccgtatttataatcctgaacgaaaagttcattttacttatacattacatataattagactcccaaataaattcttcctatccttagctgcatgtggctctacacatttatttatccactgaccatgtcaattcatctgtaatatagaaaatggaaaaaaagaaagggagtaaataatacaatgactactactatatagtgaatacctctgcgtgctagaaaccaaattcaggatttctacacaatattccatttaacatcaatacaattccatgaggtaggtattattattcctcattttaaagatgaggaaattgagattcaagcttttgcaagtgaaaataagcagtgccagagttgcagctgccatgaaagctcagtgacatttgcttatttacaaaaattaggtataacctaaagcaagaatgcaaaaaaaaatgaactctgagcacagggaccttgagatagctctcctgaaagcctacacattgttggtagagtgaagttttagggaagcaaaactgtgaagtatgaaaccagatccaacctgagaacagatgcttctgagtaagcaaagagaatttctaaatagctaaaagacagaaacattcctaaagtagacagtttggaatggctcaaaagaaaatgtgcagcttgcgtgaccaccccaaaagattgtcccacctaggcagctgaagaacaacaacttagccttggcaacaaagcaagatcccgtccttacaaaacaaacaaacaaacaaacaaaaaaactaattggccaggtgtgttggtgcatgcctacagtcccagctacttgggaggctgaggcaagaggatcacttgaacctagggagttcgaggctacagtgccctatgatggcaccactgcattgaagtatgggtgacaagagcaagaccctgtccaaaaaaagaaaaaacgaagaacaacaacttacaacttacctttctacttttgaggagactgggagtcacagagtccctgccacaaggtggaggggtaacagatttgattggaagcagtgagttataaatggtgctgtgtcctctagccctctaaccaacacatgactgtacagctggcctctctgatactaaattttccccatgtgctaaagatcgtacaagaagagggttgcaaaatgaagagaatagattaattattatagttaattatatttcttggaaaatcaaccactggtgagacaccaaaacccagagaaactgaggaagtggttatatttgcatatgcatagaaatacacatacatgtttgcagataaatagaattttgtctaatatggtatgtactaaattgttaacaatagcttcctctggagagtggaacttagtgtcagaaggaacatctatcttgtttttaacactatacaacaaacatgttttattattttaatatttttaaagtggttattaaagagaccaatgactagtttgtgcaaaataaaaagaagccaggaagattctataatattaatagatcagatttgaggtgacacaagcctcaaacagaattaattcatccatgatgattgatgaagaaacttccccatggaaagaaaatatggattccattcaaagcactttattttggttatttagaatattaaaatatacatatcctctagctgtcttagaattctgattgattacttatgaaaacattttctccttctatggtacaatgttaacaataatacttatgaactaggctgctgtttgaagatagatagacagatgtgtgtatgtatctagaaagttatagttacatatagagtgtgtgtgtgtgtgtgtgtgtgtgtgtgtgtgtattcctttaatcctgtcatcagctctagaaagtataagttatcatctccagtttatagttgaggcacaaaaaggttaaatgagtagcccaaatcaaaaaagactatagccaggattcaagtccaaagagccccagcccaaagcttgtactcttggccactcttgtatatacttcttgagaaaaataaatgtattaaaaaggacaccaaccata

SEQ ID NO: 3423 - DNA, 129 bp, Homo sapiens
agacttggggctagacaggttgaaatcatggctagccatctaacaagctttgtaactttataaattgtttattttatctgagagttgatttcttcatttataaaatgaagatggtatctgctgaatata

SEQ ID NO: 3424 - DNA, 436 bp, Homo sapiens
attgtatttaaggcaaataaaacaaagaaatcatttattcaacaaatatgtattaagggtctactaagaatgagcactgacctaggtattggggatacagtggtgaacaaaaggcccaaaatctgccttcctggaccttactttagtaatagagatatgcagacaacaaggaaaataaataagtaaaatatatggtatgttggaaggtaataagtgctaaaggagaaaacaaaaataaagcaggaaagagtagtataaaatgttgtggaagaggggcttaacatttcatacacagtggctagggaaggctttattgagaagggggcttctaagccaagccctgaaggaaataagagagataaccctgtagacattagaggaaaagcattccagacaaaaggaacaagtgcaaaggccctaaagtagaaggatgcct

SEQ ID NO: 3425 - DNA, 129 bp, Homo sapiens; identical to SEQ ID NO: 3423

SEQ ID NO: 3426 - DNA, 129 bp, Homo sapiens; identical to SEQ ID NO: 3423

SEQ ID NO: 3427 - DNA, 436 bp, Homo sapiens; identical to SEQ ID NO: 3424

SEQ ID NO: 3428 - DNA, 577 bp, Homo sapiens
acgtctttgtctggctgatgttgttcagctatttctctgttccggcggcattacaacgccgcgtgctggtgtatggcgtgctcggggcgattgttctgcgtaccatcatgatcttcactggcagctggctaatttcgcagttcgactggatcctgtatatcttcggtgccttcctgctgtttaccggcgtgaagatggcgctcgcccatgaagatgaatcaggcattggcgacaagccgctggtgcgctggctacgcggtcatttgcgcatgaccgacaccatcgacaacgagcatttctttgtgcgtaagaatggattgctgtacgccacaccgctgatgctggtactgattctggtggaattgagcgacgtgattttcgccgtggatagcattccggctatcttcgccgtgaccactgacccgttcattgtgctgacctcaaacctgtttgcgatcctcggcctgcgtgcgatgtatttcctgctggcgggcgtagcagagcgtttctcgatgctcaaatatggcctgacggtgattctggtgtttatcggtatcaagatgctgattgtcgactt

SEQ ID NO: 3429 - DNA, 898 bp, Homo sapiens
acgtctttgtctggctgatgttgttcagctatttctctgttccggcggcattacaacgccgcgtgctggtgtatggcgtgctcggggcgattgttctgcgtaccatcatgatcttcactggcagctggctaatttcgcagttcgactggatcctgtatatcttcggtgccttcctgctgtttaccggcgtgaagatggcgctcgcccatgaagatgaatcaggcattggcgacaagccgctggtgcgctggctacgcggtcatttgcgcatgaccgacaccatcgacaacgagcatttctttgtgcgtaagaatggattgctgtacgccacaccgctgatgctggtactgattctggtggaattgagcgacgtgattttcgccgtggatagcattccggctatcttcgccgtgaccactgacccgttcattgtgctgacctcaaacctgtttgcgatcctcggcctgcgtgcgatgtatttcctgctggcgggcgtagcagagcgtttctcgatgctcaaatatggcctggcggtgattctggtgtttatcggtatcaagatgctgattgtcgacttctaccatattccaatcgccgtctcgctgggcgtggtgtttggcattctggtgatgacgtttattatcaacgcctgggtgaattatcggcatgataagcagcggggtggataatttttaatctgcctaagccgtgtaccctgtcattaacatgagcaccgttttctccctctcccttccagggagagggtcggggtgagggtaatttttcgcaccgatgctggcctgttcccctcaccctaaccctctccccaaacggggcgaggggactgaccgagtccttttttgatgttgtcatcagtctggaagccgcacgttggctt

SEQ ID NO: 3430 - DNA, 904 bp, Homo sapiens
tgggcattatggaacacggcgcataacgtcggcggcgcactcattcccattgtgatggcagcggctgcgctgcattacggctggcgtgccgggatgatgattgctggttgtatggcgatagtcgtggggatttttctctgctggcggctacgcgatcgcccgcaggcgttaggtttaccggcggtcggtgaatggcgacacgacgcgctggaaattgctcaacaacaagaaggggcagggttgacgcgtaaagagatcctcaccaaatatgtgttgctgaatccgtatatctggctgctttcgttttgctatgtgctggtctatgtggtccgggcggcgatcaacgactggggcaatttgtatatgtccgagacactgggcgtcgatctggtcacggcgaatacggcagtgacgatgtttgaactgggcggatttatcggtgcgctggtagccggttggggctcggacaaattgtttaacggcaaccgagggccgatgaatttgattttcgccgccggaattttgctttcagtcggctccctgtggctgatgccatttgccagctacgtgatgcaggcaacctgcttcttcaccattggtttttttgtctttggcccacagatgttaatcggtatggcggcggcagagtgttcccacaaagaggcggcaggggcggcgacggggtttgtcggcttgtttgcttatctgggggcgtcgcttgctggttggccgctggcgaaagtactcgatacctggcactggagcggattttttgtggttatctctatcgccgccgggatttccgcactgctgttactgccctttttgaacgcccagacaccgcgcgaagcgtgatgcatctcaccttttcacttcatatccggcaaaactaagaaattttcca

SEQ ID NO: 3431 - DNA, 2086 bp, Homo sapiens
gactgcctcatcttctgcccaaaagagggagtagcgtggtgaatgggaaggaaccctgggtttggggttccagtgctgactctgccacatagagtcatctgcttctctctcttggccatctgtgaagtgagggtttgggtcagtggaaggctgcttcttcaagccaatgtttcttccagaagttgccgtggggattgaggagaaaatgaacagagctctaggatgcttgtctggatttatttattacttttttaataagactcacctaaaaccaccaccacctcctcctccaaatactgggagggtagggttttcatgaatggagattcctgtgttcatgccacaggacatcttagctcctctcacttctttcctgggaatgtagggacctgcctgctccccatctctgtccccttagttaccatttccctctctgtggtcctcacaggtcctggatggaaggaagcccaccggggggaagctggaggtgaaggtgaggctgcgggagcctctgagtggccaggatgtgcagatggtcactgagaactggctggttctggagcccaggggcttgtgaggtgggcagctctctgggccttcagaacctttgccccctccttttactcaactaactactcaactcatatctggagagaaaacctaggagtttctcatctatgagaaagacctaccatgctgggtagggcttatgggctgagtttctgatgttcctcagtagaactgggaagagaaggtaaccttccaaggtttaactatctatctatctatctatcttcaggaaaccctttctaaaatctttgtgttttcactgcagtttagactgacttcttgtgctttgcacccctgtgtagccgatggccagcaccaggagaggagtcaggccgcgactgtgcaggagatgactttcccagctttgctggcttcagaagcctttgtacataagagatgctgctacccaagcaccaaagacctgttaagcatgtgcactactgaccacgactctggtctttcctgttgttggcccctctggggctctacagaaacaggctgggttccaggagcccatctccccgctgtctccccctgccccgagtctggaagagggcaaggacacttccattcctctgtaccatggagtcctgcagccccttaacccctgcgtggcaactgtgtacagcttacccctgcctccagttgcaccacttctagatgtgcctttaaaagatctaactatgggatgggagaacttgagggtgatcgggaacctcccctgctgagggtggtgtcagggttccgtgactccagtgggccagtggtagcctgtcccagacaactccgtcaccccagctctgcctgtgcctttatccctgacagctgctgcactagccttcctgcttccctaaggacttagtggagggggaaagttgtttttggtactacttggtgggaagtaaggggaaggttggatcttgggtttggtctacccacccaagagaaaagactgttaactggaagaaaaaatatatatataaaattttatgtagacacgtttatttatctaggaaactaagtctaactcattgtagggattttatactcaactatacagagtatccaccaaagtcctaatctaaagtcctgctccctgtcactttttaaaagccagggtagcagtaacatgacaaacggctgctgtggcttcctcttgagagaggacagggaaagcctttcctcttcggctggttatgtggggaacttccttagtttttttccacaagaaatctcctttggctttgtttttctgaatggatggagactatgaaggggtttgtagttgtaagagatttaatattcaaaactgaaatattctgcatttcttagaaataccccatcttcccccaccccctttttgaattattaattcaagatcaacaaagcattcctcaagatcacttttaaaaaaggttagaagtgaagcaaatacattcagcttactgatcactatagtattgcataagcacagctcaagaactgagctttgtatgtgtccttttgggggataaca

SEQ ID NO: 3432 - DNA, 280 bp, Homo sapiens
gagccctctggccgatttttttttttttttttttttttgagacagagtagctctctgccagccaggctggagtgcagtggcatgatctcagctcgctgcaacccccacctcccaggttcaagcgattctcctgtgtcagtctcctgagtagctgggattacaggcacccaccactatgcccagctaatttttttatttttagtagagacggtgtttcaccatgttggtcaggctggtctcgaactcctgacctcatgatccacccacctcagcctcccaa

SEQ ID NO: 3433 - DNA, 32154 bp, Homo sapiens
gccaagctgaaagttctactctttctagtggaatatcaataggtgagaaatacttctctgagagggttgcaatttaactttaaataaaaatgttaataaaacttggctggaaaaaaaccccacccacacacagagaaaatttggttaaaaaaacaaagtagcagttaaatatgggatgaagttaataatttgtgatggttttaaaagtgcttgctgtttttaactccagaaggggaagcatttgaagaaggtggaaaaagaacatatgggctggttgaattagttaactgcatgtgatttggatatggggaggaggaagagtgtggagtcaagaatgacttccggttatttgggttaaacaagtataatagttagatgatgatgctattaccaaggtagagaagacagagtaataatctgtgggcagtgaagcgtttgtgaatttggggaatcaggtgtgttttggacatgtttagtccctatggagatgtcaggtaggttgttgaatatgtgaatctggagctcggggataaggtcagatctgaagatatacgagaggtagcatatttataagccatgattggttgagggtacctaaagagagagtgtacataaataaaaaaacattctcacatttagaagtctgattattttttaaaagaaggatgagtcatcaaaggaaactaaaaaggagagatcagtgaagtaaggggaaaaaaacaaaagcccagtagatgaagtatctcaaggaggaggaaagtactgaatgtgtgaatatcaaatgcagaacaagagagctaagatgagaatggggaattgactgggggatttggcaagataaaagtcattggtgaccttgataagagttgcttcatggaagtgtcagggcatggcctggattggagtagatttgaaaatgagaggtgaggaaacagagatagctactgtgaaggagagcagaaaatagagaccatattagaaagggatgtgagattaagagagggatttgtttgtttttacttcctaaacttttaatttttgagtcttctagatgagcattatttcttgttacaattagaaattattcatatagcctgggcagtgtggctcacacctgtaatcccagcactttgggaggcccagatgggcagatctcttgaggtcaggagttcaaaatgagcctggccaacatggcaaaaccccatctctactaaaaatacaaaaagtagcagggcgtggtggtgcatgcctgtaatcccagctacttaggaggctgaggcataggaatcatttgaacccaggaaacagaggttgcagcgagccatgttcgcagcactgcactaccctgcctggatcacagagcgagattctgtctcaaaaaaagaaagaaattgttcatataatagctacttttatttttaaaaagaaataaaggaggaatatgtcttcatctatgattaactaccagattgttcaaggactaagcctattgttactaatatcttaatattggtaaacagccagtagaaggagatgcaaaaggagattgattttctggaacatactgactttcttagcccttgagagttaaaattaaattatttcagagctctccattaccattcagtagttgtttattctgatagtcccctttttatataaaaatacaagtgattaaatgataaaatgttttaaaaagaaggcaagtttgtcacctgaaatacctcttatcaatgttctaagttgcctatatgcaaatactaatctcagtatgaagaataattttgcaaaagaaagaactttttttcagtcaaaaattttctacacgtccatggaatttggcatgccacttaaagcaaaaagtttttaaaattacagctctcaagtatataatattttactctttctcataagtgttataatgagaattattctgtagtttatagcttttacttttcatggatgtccttttggctaccaaaagattattgtttagttattttattgagttacagttagtgtctcagtgtggagacttttctcttttagagcagatttttgcatttgtgtttattttttaattattctaaggctaagtaagtaaacagtaaaagatcattgcatcctagtttgtaaactaagaacattacacataggcatttaccttcgaggatttttgttttaaagctttaacaatatgaaaaaaagaataagtctattaccataagatgataggtgttaatatacacacacgagtttttccctcagctttaacttttacatgcaatattaatctacagtgaaggctttgaaaatactgtgggaaaattaaccagtgcttagaacaatggccttaaacattttctaatgtggtatctatcctagataatcttgagtagtctcacctagctaactaagagaagcatattcactctgagcttcatgcttacattttctacaaataagttatcctaattatgcttaaattttcagtctttaccacatagtgccacaaatcaaaggataatgtagataatgtacaagaccccaccaccaccacgggttacctctggttcttctgaaccatacaatacagaaaattatttcagtgattgttatctcagtttatccaaggatggtacataactagtgccattgcaaacccgtagaagggtattaatccatcgtctctaagagagacgagtctaatggataccttacagcatccattacaggtgtctgatggataccttacagcattagaatttgagtctctcagaaccctgcccgtaaaaaagagtttgagtctctcttcttagaaccctgtctgatagacaatttaacttgacctattaatcatcctaatttttttgagagccagaattacctttaaagtaacatttaagtaaactaagctgttttggactctctaaattcattccccatagtttttttgttggttttttttccccctagctaattgtaaacgttctgtttgaagaccattttattttaactgatcttttggccaaagagaaaattgttgcatttttatagcaccggtttttggttttttaaatttagagattccatcttctttgtctctagagacaaataagtggatttcattaggctttttatacttagggtagtaatggactttaatacaaagagaaaggagtatgccatgaatcgtcaaggattttataattatattggtcctaaattatgacaaacctaataagaaattttgtgttattttatgttctctaatggtaggaaaaattgtttattgacataatgaatttcagctacaaataggcaagcaaaaatgttttatgctattttgttattttaggttgtcgtgtcaactgtattccaatatattgcaaaataaacctaacagcagtaatattagaataaagaattaatatgtggatatgttcatctacaatgcgattgtcattttatgagcatagttaattaatttatttttacattgtgaaatgcaaactagagaggtaattctgatgtttaaaaaataggataacttttcattttaggtagcagcgatggttctgaactaagtgaagagacctcatggcctgcttttgaaaggtaagataaattgtccatttgaactacttggagtttattttgtctgggttaaataatataatacaaattttcagagataatatttactacatatccctaagcgattaagttttctactggtaaaagaaattagaagttgatatttaagtttggatatgtaagtaatgagaatgaatgatagtcttatctctaaatgtttatttggtggcatgacacatgtatttgaattttaatacatttacatttataacttaaaaataataaccgatcatcgacaagtaacctacttacatattcaaaaaattatttccttaagttctggttcatttaagtaattttaaggcatttagtggaatggtcaactttattctctgctgctttgtcaaggacaaaatgatttaataaattttaaattatacaagtaaagcaagttaaggttagaatttaaatggtcataaactcaaaattttcagagtacacttttatactgaaatactctaagttgtgctcccttctccttcctttgttgctttaagctgttaaatctgtcatctgcctgtagcaaatatcatactatattgaggtctaagtacatataagatctgaagaatgtgaccaaacaatgcaaataattatttattaaatgtccattaggattcttatgttttcactgaccatttcagttctgccatttcagactcataaggtatttggcttttgaccaaaacaattgctcccttttttgtatatgaactaagtaactaaatttctgaaaatgcctatattcattactcaagcgggtcatttagattgaatgttaaatgtcatattaatactgaagttgaaaatgtgtaattgcataactccttatcagtcacaatttataaaacaattttaaattaaattttatttgaaatcataaatttcatgctgtttaattggaaaaatagatccttattttttatgtgacttcataaagatttctcactattatgtgattaagattttgtttataagttctacattgcaaagtacttttgatcctttctactctaattatcagtgttcccaacttttgttctctttgttttgcgggataataataagtaaaaacaaattatttttatttatttttgcattatttttcttgcaacctttacttctgatctgttcatttgggtttgcctgaaatgtgaaaaacacaagaattgcctttgacatgttgtctgaatttgttcaaattgtctttccctctagaaagaacgtaaaaccatgagaagttgattatagagtgtactgtaatctttatatttaaaaaatattgattaaccaaattgttttttagattgcttgacttatgactaaccagaatggtggtgtgttaaataatctgttctcatcccagcaggttacttatgaagacagtatttaatgatgttaccttcacgtctcaaaacaatttttttgctttataacaggtgttttgctttgcagacatgtgtggctaaaaaaagctacttttcttatgccaagtttaaaatagtgggctcttagaacattttgagaacagtgaaatgaatgctgcccagcaagattcagacatgaaataatagaaagtgaataaagaactaggatataaagtactactcatggatagtgaacttgaaaaatgtactctgaatgttgacataccattttctgttcttattttctagacagacatcaaatacattgtcttattttctagacagaaatcaaatacattgttgtctttttttctagacagacatcaaatacattgtttaagttgctaaaataatgcttttcctttaaaacatcatttatcaacagtgctttcgggttttcctaggcaaagaagtatcagtatttttatgtgtctgtttttattttttttgtttttaactattatgtgccattttggataagtattaactcatcatttttatcatttattggctttgtcagttaatgtagaaataatataacgcctatattactcagttcatttcttttatttactataaaggataaagaggaaaataaagttttcctcatgagtttacaagccacattgcttttaggtgtcttcatagggacatataataaaaatgaattacttatataaatccgggcatcatatttaaactagaatccaagaagtggtatagaaacgtaagaatttttgaagtatttttgaggttttttttttattatttggctataaatagctctttaattcttttagcagatttgtgaaagtgaatgtatatgtaaatatatggtgtgtactaaatacctctaagtatttctagagtcaatagtagaagaaaaaattttttgaaatctatgctgcatgctttaaaaaagaaagaggaacaatcacatactatccttttgtaagatttagaaagctatattacaagaagaaactattatactgttctaggtattgataatgactgtgtgaataaaagtatatgtaatatatacaatttataatggaatccaacaggaacagattataccattctctcggcccggtgacaagagtggcacgaaatggctatcgaagtcacatgaaggccagcaggtacaattcccctgcattcaggggtcacagaactcccttatggtgttggtgattggcttacatgggtgtggtctgacgttatttcttttctttctcaactaattgatttaaaaactaaacaaattacctagaaaaactttctttccaagatctaatatgaagataaatttcaactattctttctgatccacagagctaattgctaaaacttgcatcttaatgttacatattttaaaatgcttccaagttggtagcctttaaactgcaccagtctttctaatgctgatagtttttgaatgaacaatataaaaatctgcttctttattcataagttgtaatcaaagcattttctttgctaataaatttatatttgatttgtctttttaaaaagtttttcagataaactacaggtcctgaatgtagacgagtctatttcataaaataatcatttgtatatttaaattcatattcattcagttgtttgtctggttaaaccaggtctcttttggactgttattagctgtggaggcagataagggtggtgtattgattgggaacgtggggtttagtggtgatgggtaatcagttcataatacaacaaaataccaaacttcagaagcaaactttacgtcagtttgatggtgtctaatctccgtgcatgtacctccctgaatataaatagctctagcatgaaatttctactggtttataggttcttaagtcactctgaagacacctaaataatcacaaaggaataaactggcaaactttagttttcattgctcttataggaattctgcagctcatgtcaagtcaccagtgacatttttgtcagcatgtatgttttattggctcatgtagaaatcattaattattgtattaaacataggaccttaaatcaattagggaaagatattaaagtgttggttattttgtgatttttttttttttaaaagatacatgaaaaggaaatcttgagttttgggttttttcctttcgtggagagctattaggccataatcacttatccattgacaccatttaaatgttattaaaatgtattgcagaaagctagtttttaaaatatattattattgactttattacttctttctgctattttagaattaaattaagcatgttttctttttttttttttgagcttgtatttttattttcagttttatatatacttaaatacttttaacaaatagaatcctcatttttcctaccaggacttaaagtttctatgtggaaaataaggttgcaacagtgatgcagtgtggcatgttaagaagaagaaaacaaatcttaaatttttaatttaatatttactaaagtgaattactgcattctttctaaattatactgttcaaatatgtaataaagtgtgttttttaaccatctgctgactttaataactttctaatcaactttttgtacagcttataaatttcaagattaataaacctttagaattgtcagtgtcttctcagctctgaataaagtaacaaacttttaaaattaagaataattacattttatttaagtacctacttgatgactattgtagacaaaagctcttatgtgttcttttcttcgttattatagttctgcagaatcagaagatttggcagtacatttatatccaggagctgttactattcaaggtgttctcaggagaaaaactttgttaaaagaaggcaaaaagcctacagtaagatttcatcatattatattttaatacacctctaaaaatatgcaaatttataagactctgtaaaagtactaaaacaattaaaataaaacctgattatagtagacttgaaataatattaaataaggtcctcccctcttatccttgggtcatccattccaagatcccccggggatgactgaaacctcagatagtaccaaaccaaattaccatcatttggaacatgtttctgttcatgtcttccattcacaaatataataccttttctatcttaactaagcacttaagcccacacagtaaccgtaacttttgcagtttgcgatgctatagcaaaactagcatgaatttctttttccttcttcacaatttcacagatacaaaatttgttcttaccatggatcttagcaaccttagcgtctaatttttctttccttaatccaagaagttttcttttcacttaaggaagcagtggggagtgggacacaagggtagcacatatagtgtggagacgctggacaaagaaagggaagattatgtccacagaagcacagagcagaactgtgtgagattttatcatgttactcagaacaacacatgattttaaaacctgtgaattgtttatttctcaaattttccaataaatatttttagactatggttgcctgtgggtaactgaaaccacagataagagggaaaatattgtacacatttgtttcaccatgttttcttaacataaaatgttattatatgtgccatatagatttctgttaaatcatgtgttaagggtgcttaaatcctgtacttttttttacccccattatagttcgtatacaaaattatttcttagagaaccctgaaagtatatcatgaagaagtattttagtattaagtttaggtaaaatagaaaataaagagtaacaaccctaaaaaatggaatttgattgtgttttatcattttatttaaattcctgtaatacagttttgttttctacataacatagaatccaaatattaaatgctttccaaacctataactatattggggggggaaaaaaggaagattggtggaacaaagctcttaatatgtatcaaagaagtttcttcttcctcaacaccagcatagtagtttgactactaaggaacaatttttttccctttctcaaatttgaaatataaaacctttgatatatattcacacttaaagcttttgaagatatgggggcttcatataagtaatcttattttgttgtttatatcacagtaagccaaaggcacatacaaatcaagaatctcttaggcaggctagtgaactcagaattgcatgtcagttgaagcattaccataccttttgtgtgctggatgctagaaatagagcagtgaacaaggtgaggcaaagtgtcttcctcctggattacatttcagtgaggagaaatagagaataaggctttaaaataatgtcataggatacagaatgatggggcaaggagggatgccaccatggcaaaacatttgagctgagatctgaatgaggaaggtgagttagctgtgtgaatatctagagttcaggagacaagaaggcttgtgtagtttacgcattgaaattggggaaggtggaggagatcaagtaagaggcaaaagctggagttgtttgatgataaattaaacatgatgtatgagagaaagagtgaaaacaaagataacttctaggtttggggactgagatgggtgtatgttggggacatttattgaaatggggggcaggtcagtcttggccaagttcagtttgatatgcttattaaacattcaagtggaggtgtcattgtggctgttgaaaaagtatggatcatgaggtcagcagagaggtggcagggagatagatttgggagtcattagcatacagatagatagtatttgaaatatggaactggatgatagattatctaagaagaaagtatagctagagaagaaaacaaggttggagatggggctctgtagcattaaaggtctcccacaaagaagagtataaaggaaaactaaggaactgttatcccagaagcctagcagttacagtacttcaaaaagcaaagagtggccagctgggtcagatgctgttaagaggctggctatgataaggatagaggctttgctaaaattacaatcatcagtgaccttgatggcccaaaagccaaatgaaatgagttaagtagaaaatgggcaaaacagaagaagtagaggcaagatttagagacacccttgcaagaagttatgctgtgaaaaggagaagagaaattggttggtgtctggggagtgaggagatgggtcaaaggagggattttaaaggtgggagtactattaaggttcatttgtataatggtggtagagggagagagattgagaagcaatggagttaattgcaaaagcaaacttctttattttttttttctttttttttttttattatactttaagttttagggtacatgtgcacattgtgcaggttagttacatatgtatacatgtgccatgctggtgcgctgcacccactaactcgtcatctagcattaggtatatctcccgatgctatccctcccccgaccccacaacagtccccagagtgtgatattccccttcctgtgtccatgtgatctcattgttcaattcccacctatgagtgagaatatgcggtgtttggttttttgttcttgcgatagtttactgagaatgatgatttccaatttcatccatgtccctacaaaggacatgaactcatcattttttatggctgcatagtattccatggtgtatatgtgccacattttcttaatccagtctatcattgttggacatttggattggttccaagtctttgctattgtgaataatgccgcaataaacatacgtgtgcatgtgtctttatagcagcatgatttatagtcctttgtgtatatacccagtaatgggatggctgggtcaaatggtatttccagttctagatccctgaggaatcgccacactgacttccacaatggttgaattagtttacagtcccaccaacaaatttacaagaaaaaaacaaacaaccccatcaaaaagtgggcgaaggacatgaacagacacttctcaaaagaagacatttatgcagccaaaaaacacatgaaaaaatgctcatcatcactggccatcagagaaatgcaaatcaaaaccacaatgagataccatctcacaccagttagaatggcagtcattaaaaagtcaggaaacaacaggtgctggagaggatgtggagaaataggaacacttttacactgttggtgggactgtaaagcaaacttctttaaaaagtgagagagagttggaatctagggcataaaaagagagttgagtttgcctttagatagaatcggggttaactattcttttgtagctggaggaaagactgagtatgtgggtctacaaacaggtagttacatggcagtgacaggagtatttgagattaagatttcagaagtgatacagctcaactctgaggttaggactttggttgaagtgaagtggacttgatcattggcacttagaatgtaaagaaactaagaagccaggagcattgtaatagtatattcctgtgtttgtcctatccaggtagcatcttggacaaaatattgggcagctttgtgtgggacacagcttttttactatgctgccaaatctctaaaggctaccgaaagaaaacatgtaagtatttgttctctacatttttagcgtggtttcccagactgttcatggttataaagaaagcagtcctaatgggatacaaaggttttttgggtttgccttgttttttcctatcttctagtccaaaagtttttacatttatttcttttttaaataccatttttccattgcaaatgtcaaaactgcacattacgcttatctattttgacatcaaagctttctcaaatctggagtttcctgttcaatattgttcaaaactattgccttggagtttcctttcctaatcagcaaaatgtggaaatgtgggaccaacatctaaagttctttccacctcaatctctggttcagtgattcttcccaacaatgaagaggaatgatcaattacaacagttactgcaatcactttcttgtgcttcatattacttaaaagaagcctcttttcaccctgtagaattttcctataaatcttttttgcatgctgttttgtttttacataccagtgatagaatctttgaaaggaagaatgattttctatgttgcattaataaaatctgagaggaattttatttctaagtcacatgttttgggggagaaaaattacgtggtttatcctactgaggaaaggtaagccagtgaagaaaaatttaagtcctttttctacttaaaacttaaccaaatgatactgtataattcagagtaattcagagaaactcttctttattctcacagttttagccctttaatcaaaccacaggtatagaaaagaacatttttggtttaaatgaatgtgggaagtaccgtaagatagcattgcctttctttatcagctatacccaccacctgccaccctcctgatcatcatgactcattgtcttgcttttcttcatagtgttagcatatatgtttccctaattaatccatggtttcattttttaactgtacctcagtgggatcatatatattcttaagcactagcttttttgctcactattattatataattgttaagatagctcttgcattgagataaaggacttgagtgaaggatcatggagatttcttcggtgaatatttattttttgtattctggtcaaattgacaataatgcctatataccctacaacatttacatagattagttttgctagaacaatttgtagagttagtactgctgttctcaaagtgagaaaaaggttggattcattcagttcaattaaatccttagcttcatatggaaagtaacttttcacatagccacattgagatacttgctggatagatttcacttagctgactattgtagaaaagtcattattcaaaataaaatggtttttttgttttttgttttttcttagtttcaattagaaaaagtccaaattagagaagttataactgaatttgtcatctaatggatatgttaaatattgttttgtgctttgcattgttgcttgtgcataaagttactagtatattatactttgggtttttaattatatgaggtttctgataggtaatgtatgcaaaatgtttggaaattaaagcatagtgagttgtgagaaaatcttattgagtaccaaggaaattgaccgcatttctcatcttttctaattaaattaaaatataattaaagaataaatttgaagaacaggatagagggtatagagacaggtctatatctatatttggtattaatcttgagatagaaaagatatggcacagaactaaatggaagaaaaaaattttaatcgttttcaaataaagttagaatacaaataaattggaggaaaatatctgctatatgtaagcaaccgaaaaaggattaaaatcaccatttaaacatagcaccacctgtattgttgtgttttggttttggttttggttttggttttggttttggtttttttttttgccaaaatatttaacctgaatcttatgaggaaataatcaaatccaaattgtgggtcattctatgagacagctggcctagattcttaaaaagaccaaaatttggcaggtggagtaagggcagggggacaggaggactgttctagattaaaggagacttgacaactaaatgcaatgtatgtcttttagttgaatcctggagttatattggggaaaaaatttaaaaagctataaaggttattattggaacaacttaagaaaatgtaacatggactttatgtggttgtctcttcaatttcttagaaatgacaattacgttgtgattgtataggaatatattcttgttattaaaagatacatgttgaaatatttagggttcaatgttatgatgtctgcaatttgcatttgaatgttcagaaagatcaaacaaacacaaaaatgtagattaaggatatatggctaatcattgtggcattctcaacttctgtacagtttgaattttttcaaaataaaaagctggaggagaaaaaaaatcatagattaaaatatacctgttcatggcaataaacccagaagtgggacatatggaagtctgtataccttattttagtattctataaagtatatatttttttgcctatgaagaacagtttgtgtgggtagagtgatcaacctcacttactatttaaaaatgcaaattaagggagacactttcctgccattagacaaaaatttaaaagattgatgacatagcattggtcatgatatggggaaacagactgtcatccatggctggtaaaaatttaaattggtattgtttttgtggtggccagtccgagtcagtatttagcttggtaataaccagaaattcctcatctgagaatctgtcctactgaaatttttgaacaagtgcacaaagattatctgtagaagaatatttctataatatttatgacaacagaaatctggaaatacccaaaatacttatcaataaggaaatggttactgatagatgaaaaacacaagtcagagtgtaaatatatcccccattaatacgtaaaaaccaacagcagcaatgacacaaacctctgatataataaatgcatagaataaggtctggaggttgtcacctcaagtgatgattatatctggggaatgtgatgggattcgctggtggttaaagggcatttgcactctagtttcatccctgtttctgaagcagtttatgttgcttgagttactttttactttttgaaaaagggaattgaggtggaagtttttaggcttaagaaaagaatattagaagatcatagtattcatgtcgaagtacattatgagctgtcaaatcagcagtcctgtggtagggccaatttcattcttcacagtagtaaaacttactgatttctttagctttcatatttcaatttcatgttgttatgaatgtgccatgttcattctttttcccatttcctttaatcgtgaagcatatcatacatacaaaagaagataggtagtgtacatgtacattttaaagcataataaataaaatgaacacctgtatactctccacccagtgtgaggaacagaatgttactagaaccgtcaaagccttcccagaggcatccacttcttccctgtcaaccatatccacagcttcttgctgtcctgaatttcttgttaattgtcgccttgtttttctttagtgttttaccatgtacacgtccttatacaatgcactgtttgatttttaaacaatacctgaatggcttcacatacagtcttaagcactagcttaagccaacctgttcttcttttataactgccctttctcagaattaagaaaagaagttgtagctaaaataataataaaagaatggttaactacaaaagtaatagacaggctaagaatacccttcttttttgaaaaatacaagtaagaatattgtcattaagaattatctggttgcagggagctgagatcacaccactgcaccacagcctgggcaacagagtgagactgtctcaaaaaaaaaaaaaagaactctctgatagcactgctgatttattacatcatcagatttaagacagcatagctactaaaatgcaaatgtccttcctataaggagtagtacagtaattcagaaaaaaaacaacagattaatatatcatattcacaaacatgctctctgggaatagggaatagatcagttaggttttgatgcagagttgaagctgggaaggtctggaaagtaggagattatctgaagaaggcatgcctaggatgaaattcagcagtaaaaggccccaggctggctgagaccagcatgaagtcacaaatctcatctttcattaggagaaactgaaaatacactccctaacactgaagttttgctagaataaaccataaattttctgtttccgctaattatctttttttctctcagttcaaatcaacatccaataagaacgtatctgtgataggatggatggtgatgatggctgatgaccctgaacatcctgatctcttcctgctgactgactctgagaaaggtgaattgttagaataactggggcttacgatactgcgtatgtgtttgtgtatatgtatgtatgtatgtgtgtgtgtatacttgtcatatatataatgttttatgcatacatgaagaacttgatgagccaaaacctagtttcactggaatactcaagagagaaagtatttgtgtagttttatctattgggaaatacttctgtcccattatgtattttaataatatttgtggagcttattttctttgctccatgggcatatatgcttgaaaattaaaagcccagctaatccctagagacctaactaggaaaggagggagggaatttgagaatatataccccattgttacttcaaatttttagagacttgccatataggccatactgcttccttcatcaataccttgaaatggattgttattcttaagttctgaaagtggcagagttttcctttaaatatttattctatcacttttaattaaattattcagaaccaatattctgcagtcttatccacacagatctagagatgccacacaattattgtatttatttagatgtattttattctaaagaatatttaagaacaaaattatttcttttaatccataagcagcaaaacagtgactttctgaatatatttggctcagatcactttccaagttaattataatattttacatacagtatatagagagacacttatgaataaaataactggctattgaccattggagtttataaagtagatatgagaaattggaggatgggccatgtataatcacatcatatgttcttcttactctacctgtgactatagtggatacctcaaggctcatcagaaaatatccccaagtggttgcttttcttccatcataacaactgctagctgttgacaagtaccagaaagatactttcagcagttcacaactggaatactatgttaccttttattgacttcacaactatattttgacctctgtttattcagatactattttgtatcaacagatatcccacttttatgtttcagtgttttaagtaaacaagtaagcaaatatgttggaggcaggaaaaaataataccaaaatgtcttctttttagattaagtagattgatttacagaataaatacaccctactcaacattttttttcccataagttattggggtacaggtggtatctggttacatgagtaagttgtttagtggtgatttgtgagattttggtgcacccatcacccgagcagcatacactgcactctgtttgtagtctttttaccctcatcccccttctcacttttctccccaagtccccaaagtccattgtatcattcttatgcttttgcatcctcatagcttagctcccacgtatcagtgagaacatatgatgtttggttttccattcctcagttacttcacttagaataatagtttctaatcttatccaggtcactgcaaatgctgttaattcattcctttttatggctgtgtagtattctatcacatatatataccacagtttctttatccactcgttgattgatgggcatttgggttggttccatgattttgcaattgtgaattgtgctgctgtgaacatgcgcatgcaagtatctttttcatataatgacttcttttcctctgggtagatacccagtagtgggattgctggatcaaatggtagttctacttttagttcctcagggaatctccacactgtattccatagtggctgtactagtttacattcccaccagcagtgtagaagtgttgcatgtttaccacatccatgccaacatctactgtttttttattttttttattatggccattcttgcaggagtaagctagtatctcattgtagttttgatttgcatttccctgatcattagtgatatggagcattttttcatttgtttgttggccatttgtgtatcttcttttgagaattgtctattcatatccttagcccacttttcgatgggattggtttttttcttactgattcgttttgagttcattgtagattctagatgttagtcctttgtcagatgtatagattgtgaagattttctcccactctatgggttgtctgtttactctgctgactgttgcttttgctgtgcaaacgctctttagtttaattaggtcccaactatttatctttgtttttattgcatttgcttttgggtttttggtcatgaaatccttgcctaagccaatgtctagaagagttttccaatgttgtcttctagaatttttatagtttcaggtcttagatttaagtccttaattcatcttgagttgatttttgtataaggtgagagatgaggatccagtttcattctcctacatgcggctagccaattatcccagcaccgttagttaaaaagggtgtcctttccccactttatgtttttgtttgctttgttaaagatcagttggctgtatttgggtttacttcagagttctctattctattccattggtctatgtgcctattttcatagcagtaccatgctgttttggtgactgtggccttacggtatagtttgaaatcaggtagtgtgatgcctccagatttgttcttttcacttagtcttgcttcggctgtggtgggctcttttttgattgtatgtgaattttagaattgttttttctgattttgtgaagaatgatactggtattttgatggcgattgcattgaatttgtagattttgcttttggcagtatagtcattttcccaatattgattctacccatccatgagcatgggatgtgtttccatttatttgtgtcatcagtgatttttttcagcagtgttttgtagtttccttgtagagctctttcgactcctttgttaggtatattcctaagtggttttttgttttgttttgttttgcagctattataaaaggcgttgaattcttgatttgattctctgtttggtcattgttggtgtatagaagcctactcaaaattttgaattcaaagccccagcctccttcccatatcaaaggcataattcacgaaattacatttcaagatgagagcattttcattggatttagttaacagattctttgttttcttcagtttctcttagcatgcctaatagaactacttcaggtagccaaaattttatgaagtctatctatactaatggttttttgcgggggaggggtgagtatgtaaattgtagctgtggccagctttattgtagatatggctttttttcacattgacctaatgtctgtgtctgagttcagcaagtgtaacggtgttacttgactaaacatttggtgaagaaacaattacttcagaaagtgaaaaagttattttgagtgttagaatctcaaggaaaagctgaataatgcttaaatatagttaggctcttgagccattgaatgcagttattaaggaaagaatagaattcagcacaaattgtgaaataaaaagaacttaggtcaatgaaaaaaggaaataaagcttaatttagagcagcctatagtacatggatcctttcttttctcaatttgttttctcaccttaatacatataaccatttaaaatatcctcattatatgtcagtcttgaattaaagtcaatatagaaattacaaaatacacacagcacaaatgaatatctaatttcttaaaagagagaaagttgcctcctagactttccccaagagccctcaacagaactggaaatctgtaataatattgacaaatatcttgtaactaaagactaaaagcatagtctatcaatgttatatgactaatccttaattatactgaatagctagtgtttaagtattaaacatattgaagcattctggcatgttaaaacttaacattaacatctactaatatttaggccaggtgtgggggctcatgcctgcaatcccagcactttgggaagccaaggcaggcacatcacttgaggtcaggagttcgagaccagcctagccaacatggtgaaaccccgtctctactaaaaatacaaaaaacttagctgggcatggtggtgcacacctgtaatcccagcttattgggaggccgagacacgagaatctcataaagctgggaggcagaggttgcaatgagctgagattgtgccactgcactccagcctgggcgacagagcgagactccatctcaaaaaaaaaaaaatctaatatttagatcatctaagtagtaagtattcagaaccaatattctgcagtcttatccacacagatctagagatgccacacagttattttatgtaggtgtatttcattctaaagaatatttaaggagacaaaattatttcttctaattcataagcagcaaaagtgactttctgaatatatgatagcatgtaaatgtgttgcatcgagaactctttattgtattggaaatacaataaaaataggaaatacaataaaatggaggtgttgaatagaattctaaaactgaaaactctagtcatgtttaatttgctcattattatctggcagaattattatgtgtcgtccttacatttttaatatttcccccttattttggataattttaggaaattcgtacaagtttcaagctggcaatagaatgaatgcaatgttatggtttaagcatttgagtgcagcctgccaaagtaacaaacaacaggtaagcatttctcctaattctcagaatagtccataatttgggaacatatgtaaaagagttccaagagaagtaaacagactagttctgaattaactaggagaatggtggtgtttttattcttgttgattacagttaataagatatgaaggtctacatcttagtgaggagctagacagtaatcatgcaaacaagtaacaaaatttcgaacagtcagaactatataaagaaaacaatagacgtatgtgatatagagcaatgggagtacagacaacttttgataacataaggttgggcagcaaagatctccctgaggagatggtattgacaagaaccacaagaaggaacgagctataagaagaggagagcagagtgctgtgtaagggaagagcaagtgcagggagcctgaagctggaacaagcttaaggtgagttcaaagcacagaaaggtagctagtatagtagtcagagtatagttctctaaagggtaaaaattagatggcatattaaattaataaaaattattcgaattcatctttatttgatctattgacaatttgatgtgggtttctgtggtggtagtgaaaccaaaaaccatttaaattttgtttgcttttattttactgaaacaaaaatggtctaattgaaaggctttcagctgcagaagagcaggaatccattgtgttgttttccccaaaccctgttgcacagttagagttgaaccacagattggtagagcagacataaaacacatagccacatttatagaaatttatatagactttttgtagaaccagttgtttgttaaatatatttgaaaatcattgacttagcatattgataatgcagaagtctatggttagcattatcagtaggtaatattgaatatgatgcactatataagcttagaaagcttacagaagtatttttcaccctgtcatatcaggatgtaagttattaccctttcttgataattgaaactaaggctccataatacaaaatgacctacacaggtcacacaagtaaaaaatggtggattcaaactttcttcatcctttaagtccattctttttgtttgttttttgacttttgggttcagagggtacttgtgcaggtttgttacatgggtatattgtgtgtcactgaggtttggtgtataaatgatcctgtcacccagttagtgagcagagtacccactggtttttcaaccgtcacccctctcccaccctccccactctggtaatgctcagtgtcgattgttcccatctttgtgtctaggtgtattcaatgtttacctcccacttacaagtgagaacatgcagtatttggttttctgttcctggattaattcacttaatggtctccagctgcattcatgttgctgccaagggcataatttcactgttttttaaaaatcactgtgtagtattccatagcatatatgtaccacattttctttatccaatccactgttgacaggcacgtaggttgattccatgtctttgctatagtgtatactgctgggatgaacatacatgtgtctttttggtagaacaatttattttcctttgggtatatgctcagtaatgggattgctgggttcagtggtagttctgtttcaagatctttgagaaatctccaagctgctttccacagtggctgaacttacattcctaccaagtgtataagcattcccttttctctgcaaccttgccaacatctgttattttttgacttagccattctgactggtgtgagatggtatctcattgcaattttgatttgcatttctctggcaattagtgatattggccgtttttcaaatgcttgttggccatgtgtatttcttctcttgagaagtgtctgttcatgtcctttgcccactttttaatggggttgttttttgcctgtaaatttaagtttcttatagattctagatattagacctttttcagatacacagtttgaaaatattttctcccattctctaggaatgttggtttattctgctgatagtttcttttgctctgcagaagctctctaattaggtcctgtttgtcagtttttgtttttgttgcaactgcttttggagtcttcatcatgaagtctttgccagggcctgtgtccagaatggtatatcctaggttatctttcagggtttttatagttttaggttttgcatttaagtctttaatccatcttgagttgatttttgtatacagtgtaaggaaggggtccagttttaatcttctgtatatggctatccagttatcctagcagcatattgaatagggagccttttccccattgcttgtttttgtcagctttgtcaaagatcagatggtagtaggtgtgaggcattatttctgggctctctatactgttccattggttctatcctgttccattggtatctgtttttgtaccagtaccatgctattttttggttactgtagtcttgtagtatagtttgaagtcaggtagtgtgatgccttcagctttgttctttttacttagaattgctttagctatttgggcttttgttgttgttgttgttgttgttgttcccatatgaattttctaatggttttttctaattctttgaagaatgtcattggtagtttgataagaatagcattgaatctgtaggttggtttggacaatatggacatttaacagtattgattcttccaatccatgagcatggaatgcttttccatttgtttgtgtcatctctgattactttgagcaatttttgtaattctctttttcttttttaattttttttttttttttttttttttggagacggagtcttgctctgtcttcaggctggagtgcagtggcgcggtctcggctcattgcaacctccacctcccgggttcaagcgattctcctgcctcagtctcccgagtagctgggagtacaggcgtatgccaccacgcccagctaattttttgtatttttagtagacaaagggtttcactgtgttagccaggatggtctcgatctcctgacctcgtgatccacccacctccgcctcccaaagtgctgggattacaggcgtgagccactgtgcccggcttgtaattctcatagtagagatcttttacctccttgattagctgtatccctagatatttttttctttttgtggctattgtaaatggaattgtgttcttgatttggctctcagtttgagtgttattggtgtatagaaatgctgttgatttttgtacattgattttgtatcctgagactttgctgaagttgtttatcagatctaggagctttgggtcagagactatggggttttctagacataacatcatatagtctgaagagagatggtttgacttcctctttctatttgaatgccttttatttctttctcgtgtctgattgctctggctgggacctccagtaagtattatgttgaataggagtggttagagtgggcatccttgtcctgttccagttctgtaagggaatacttccaacttttgcccatttagaatgatgttgctgtgggtttgccatagatgactcttactattttgagatatgttctttcagtgcctaatttgttgagggcttttaacatgaaaggatgttgaattttatcaaaagccttttttgcatcttttgagatgatcatatggttttctgtttttaattttgtttatgtggtgaatcacatttattgatttgcatctggtgaaccaaccttgcatctcaggaataaagtctacttgattgtggtgaattaactttctgatatgctgctggattcagttagctaatattttgttgagaatttttgtgtctgttcatcaggtatattgacctgtagttctgttttttcattgtatctctgctagtttttggaatcagaatgatgttggcttcatggaatgagttagggaggagtcttttctttctcgatttttcggaatattttcagtaggattggtactagctctttttcgtacatatggtagaattcaactgtgaaatccacctatttcaaggcttttttgggttggtaggttgtttattactgattcagttttggaactcattattggtctttttagggattcagtttcttcctcattcaatcttcagaggttgtgtttccaggaatttatccatttcttttaggttttctagtttgtgtgcatataagtgttagtctctgaggattttttgtatttctttggagtcagttgtatgtcacctttgtaatttctgattgtgattatttggatcttttctcttgttttatttgttaatctagctaccagtctatcgatcttgttttttctttcaaagaaccaacttttggttcattgcttttttgtatgcattttcacatctcaatttcattcacttctgctctgattttggttatttctttttttctgctagctttggggttggtttccttttgttttgtttttctagttcctcaaggtatgatgttaggttgttaatttgagctctttctaacttcttgacataggtattgagtctgatatgttgtgtctctgttttccttagttttaaatcattttttgatttgtgtcataatttcattctttacccaaaagtcatttggaagaaagttgtttaagttccatataattgtgtggttttgagaaaacttcttggtattgatttctagttttattgtactgtagtctgaggctatggttggtatgatttcaatttttttgaatatgttggcacttgctttatgcccaagcatgtggttgatcttagagaatgtgccttgtgccaatgaaaagaatgtatattcttgtgttgttgaatgaagtattctgtagatgtctgttgggtctagtttgtcaaatgttgagtttaagtccagaacatttttgttagttttctgcctcagtgatctgcctgacactatcagtggggtgttgaagtcttccattatgtagttatctaagtctctttgtaggtctctaagaacttgttttcctaatctagatgctccaatgttgggtgcatgtatctttaggatagttaagtcttctggatgaattgaaccctttatcattatgtaatgcccttctttgtcctttttgaccattgttatagtctgttgtatctaatataagactagcaacctttgttcttttttgttttccatttgcttgataaatcttgctccttacctttactttgcacctagtatgttgttacatgtgagatggttctcttgaagatagcagacagttgggtcttgcttctttggccagcttatcactttgccttttttgcctgtttacattcaaggttactattgatgtgtgaggatttaatcctgtcatcatgttgttagctgcttgttatgtagacttcattgtatagttgctttatagtgtcagtggactatatacttaagtgtgtttttgtggtggcagttatttttctttcatttccacatgtagcactccttaaaggacctcttgtaaggcaagtctgatgatagtgaattccttagtctttgcttgtctgaaaaggattttctgtttccttcacttatgaagcttagtttggtgggacatgaaattcttagttggaatttcttttctttaaggatgctaaaaataggcccccagcctcttctggcttgttaggcttctactgaaaggtccactgttaacctgatgaggttccctttactgccccttttctcaagctccatttaagatttttttcttttgcattgaccttggagaatgtgatgattaagtgtcttggggatgctcatcttgtatagtatcttgtggggagtctgaatttcttgagtttgcacatcaacttctgtagcaagattgggataatttttgtggatcgtatcctcaaatatgttttccaagttgcttactctgtctccttttcttgcagtaacaccagtgagtcataggtttagtctctttacataatcccatatttatcaaaggttttgctcatttttaaaatttttttctttaatgtttgtctctgttaatttgaaggagtgctcttcgagttctgagattctttccttggtttggtctattctgttgttaatgcttccaattgcattatgaaattcctaggctgggagtggtggctctcacctgtaatcccagcactttgggaggccaaggcaggcagatcacttgaggtcaggagttcgggaccagcccggccaacatggtgaaaccccgtctctgctaaaaatagaaaaattagctgggcatgttggtgcatacctgtagtcccagccactagggaggctgaggcaggagaatcgcttgaacctgggaggcagaggttgcaatgagccaagatcatgccaccgcactccagcctgggcaacagagcaagactcccatctcaaaaaaaaaaaaagaaaagaaaaagaaagaaatttctagagtgaatttttaaattccagaggttcagtttggttctttcttaaaatggctgtgttatctttcaactcttggattgttttactgttttccttaaactgggtttcactttttcctgtatctcactgagcttccttgctattcagattctaaatccaaagtctgtcatttcagtctggttaagaaccattgctgggaacctattgtagttgtctggaggtaagaagacactgtggtttttagagttgctagagttcttgcattggttctttctcatctgtgagggctgatattcctttatcctttgaagttgctgacttttggatggtgctttttgtttttatgtttttgatttcccttcagggtttgactgtggtataagttgggtatagtcaattggcttcctttctggatgtcttcagagaaccaaggttcagcttggcactcctgggctgtgtcctgtaactcccaaggggctgggactgggcccctggctttttcctctggcctcttgaggtcgaccaccggctgcactgggtggaccaaggtgctcccaggctgctggcaaaacctctccatcaggctactggcaaaagcacttcctcaggggccactgttgaaagtgttctggcaggatggtgggggccactggtaaaagcactatggtgacagtcgcccgcaaaagcattccaacagaatagtggaagctacactgtgtgcctgctcccatgggagtggccaaacagggaccttggaaggggccagtagacagtgggacatgcagctcagactcaccccagtcccatgggaaacacagccctgctctctccaaatatggcagttagcaaaggtcagagccacctagaggagtatgaagagccttggtgggtgggcgcctatggccgtgttcctttgcagctttccccacaccataccccctgggctccatgtagacctaagttctgtctctgccagctctccaggcagttccccctggcaactcaaatatccaggaggactatgggatctcctgccactaggatcccagcggtttgtggtgagagtgggccattccacagttactttactcaccccttccttaggagctgttcaggaccaggaatgagtcccagcactccacagccctgtgcagggttcctagcttcttcgctcttcaaccctggttctgcatcatctctccacccactctcagaaaatcggtgattttctctcagtgcatcctctcagaagataggcttggagtatgctggtctactagatactcagatctctcttggtgggagaagctcttcctggctttgcctagttggccatcttgtcccaatcccgagggcatttttttaaaatattgttggagtgggctttgttctctcatagtttttattgtttcaaatatatatgcaacactaatagcagtatttagtaccatttttagcaacctccataaaggacatgaaatgtcatagagcgaaaattattttttgccttgtcaggttagtgtctggggcagaatgaaagaaacagatcaggctttgtctagactaagcctttcaggattcacctcattgctatacattttctttaaatgtaatttagggtattaagactctttttttttcaatctcagattccaagatgaatctagacaatatatacatataccagcttaaaggttcaatttcttttactgtattagtgagtatttctgtgcaacaagtcaaccagacgtgtataaatatttgtttctatacttgcaagaattagaatagtggcaaatttgtaagtagaacctgtgaaagttttagtagaaaactctgactcaaatgcaaaatatcttaaaccacattcaggcaacttaaaaagaaatgaaacttttactttacttaaatacaagtttctttttttttctttgagacagggtttcactcttgttgcccagcctggacagtgcaatggtgcgatcttggctcactgcaacctctgcctcccgggttcaagccattctcctgcctcagcctcctgagtagctgggattacaggcacccaccacaggcccagctaatttttgtattttcagtagagatggagtttcacaatgttggccaggctggtcttaaactcctgacctcaggtgatctgcctgcctcagcctcccaaagtgctgggattataggcgtgagccaccgcacccggccaaatatgagtttcttataatcagacctgaaaatttatactttaagcacttgagcatttgtgttgtatttgatttgtaattcagttatgagtacattggccaacataatttttttattcagaagctgacacttgtaaggtatttatgtttttgcatataataggtttcagagagaggttgctaaactgtgagagctgtcttaaggacagaaaagaccactgacatatgaatacctctcccagtattttggaaaactggttttgaggatttgttttaacatagtgaaactctaataaggaattttgtttttctgtacttattttaatcatgattttacaaataaattcttagtaatgtttgttataaaattatttttgctgattttaaaaatatgcacctaggaatttttgtaatatataatgagaaaataaataatggcaaacaagtgtatctggaatctcaccctaccagagtcatacttactcttgctctcatttattcattcagtaaacgtctactgagccccctgtgttagacaagaaagatattgtctctaccccttctcctgtatagatgtcattttactagaaagagtattaactcattttggtgattttctctcaaaaatgttctagcatgttaattattcataaactattgaagctccttatatcaagttccttttaaaagatacttaagtagaaagattgggcttgcctaaataacaaggaaagataagaaatactcctttgaaaaacaacttttaaactcagtttttaatgcttatattttttaggttcctacaaacttgatgacttttgagtagaagcctgagaaaaaaagagaggtgaactgttgcttctacgtgagcatgaggacctgataaaagagcgccagctataaaccatcctgtgccaggaagagcccagaggctctgtctcagtcgttggagttctcaaccaaaaaagcactaatttcagggaatgatttgagatattcccagagaacaaattggagttgcaaaacaaactgccatgaaccatgcttcttatctcagaactgacctgtggaaaccactgccttaaaagaatgaaaggaaaaccaacatgaaacaccaaatagtgtgtgtgaatcttctggcggtgctgtgcttggaatagatcgtagctaatttgcatttcttttaactttgtaataattttagaggggggaattgccttttttagatatgctttaaaaaggaaaaacatactcttgtggattccatcaggagctggttttgaaccgaggtgaagagacttagcagggattgtaccagcagcccacctgcaaggtttgttctccctctagtagtctgcaacctcactggctttctcacagcaagagtgtaggaatgagaaatgttagtcatgtgagttcttgggtttgtttgggattgggtgggggtgtttgttttgttttggatgaggggagaatttttttaaacactaaacttctgaaatgtagtactgtaaggggaacattatttcctgcaggaggtacaaaggctgtgtgttcatttgccagacgctttttttttaaataggttccagaaaacatggttgtttctaactagggttaaagtttagctttctatatgaattcattgttggaccacagatctgcttaagtaaagagctataatcccaacctaaacttttctgagattttacaataattagatctttttccaagttaattgggttttcccttctcccagtcataggtggtttttatcatcaagacagactgatattttgtcaggatattttcttttacagtgtttgatgtgcataatgccagagttatttttttattattcattttctctctttttgttcaatatgagattcaggatcatatttgtttaaaaggtaacacatagagatgtatgtatatattttgttataagacatacaaaataattttaagagggataaaggtgaaaatatcagattctggaaattttaagtatctaaactttatacttgtatgatttaccataaacataccaaaacatttttctgaaaatttactgtcggtctctgacatgaaaccgtattttgtcagtagttgaccaagcagttttatgagaactcttctatgcaatgatgcatttaatttctaaagtaaatgttgaattattaaaaaaaaagtttgaaggtaagatgccttagaattttaatgaaaaatgacactcaaacaaaggctatatgtcgaatgttataaactcttgagacataatgaattttagcagtggcctagagtaaggtaatgctttgtgactgatatctactaatagacttctgttactttgggcctcacataaaatttctcacattcgtattcttagagaattttatacttttttattataagtattttgcccttgagtccatgaaacttcaatagaaaatattgcttatacaataattagcttaaaatccatccaaaggaaaagagaagagctttttttgagtgttaagttttttaatttagtattctgtttggaaaagatgttaagagttcaaatatgcttcttatgtaacagaaataccattatttctggggtttagtgacacaggctggagaggacaaaagtttcctgtcctgaatgatttttcaattaatgctctaagcttaacccatgttgggtaata

SEQ ID NO: 3434 - DNA, 386 bp, Homo sapiens
gtttgggttataagtcagcatttttaattttatctttcaaatttttaagtcttttgtaattggatttattgtcgatttattagttcagtagaaaatggtatccttgaatagttttcttttttcttaatagctgttttctgattcagtaaaatgccttgtttgcctaaaagcttttatttcttactttacctgaatttggaaatgggattttgtcaacaatgcatttatatttggggacgataaatgaacattacagagggccatcataaataaaatcaggatagcaatatacctttttaaaagagttacaacctttatatcaagacagtcattgtttgtcttaaccaaaataagtcaaaaataacagctataaaaattattttctt

SEQ ID NO: 3435 - DNA, 437 bp, Homo sapiens
ctgtaaattctaggatcagtttgttatgttccatgaaaacactgttgttatttttattggaattactttggatttataggttaatctgagaattcacagttttgaaaaatttactcctttcatctgtacacatgtctctctgttcatttagggcttttaatgtccttcagtaatgttttacagttttctcctgagtagtctcttacattttttattagtttatgtctaagtaagttagtttttctttctactatgaatgtgacttttttgttacatttcctcattgactattgtgtgtaggaatgccattggtctttatgttgattcttatatctagcaaccttgttgaactcccttacctagttataatggtttgtccaaagatctgttggaattatattagtggcaaataagaatagttgtttcttcctttccaa

SEQ ID NO: 3436 - DNA, 537 bp, Homo sapiens
gagaatctcactgaaaaaataaattccaagaggcttagttaggtatggcagggcaaagatattttataaatattttggcaagtagagacaagagaaaatgatgcgtgaggtattttcaatagaagccaattgagcttcctcatttgcatgaagcatctgagctgttttcctaagttccagttcctcctcctcaggtgggcagccttacagcctctgcatttgactctgtcaagatgagactgtagtaaagtgagctctttgtatcattgatgaaagaaagaaaggatttaaattaaccattgggactgagttaaaataaaataaagctataaaaagatcatggctgcttgaccatgagaaaaacctagaaaatagtcatttgcatgagtcatttgttccccgagaacagcattctgttgaatggtgtccatgaggaaaatgctcaaatagataccattggttttttaaaaaattatttcatcagtaacaatgcaatttgggtacagcctgatctgcagctacgtcaggctgcagcct

SEQ ID NO: 3437 - DNA, 625 bp, Homo sapiens
acctctgggactctaggggctgacctgttcccttgttctagctctgggatagcccagtgcaaacttactactgcaacccggttgtcctctccatggcctgcagctgttcacccaaggagtgcctgagcatcctttcttggaggaactacaaagagactcgctcaaggacttcctgtcagcagcagaaatgctgagtcatcagtattctgttacagttcattgaaagcagtgctgacagtggtgcggccagatggacaatagtgagagctccagggccccagctcagtgctgcacacaatgggtgacaccaaagaaaagcttttattaaaataatacagtctataatgaagaaattaaattttacaaaacttcaacccactctccagatgattaaatgaattattaggaatatttcttttccaaaaaaaaaaaaaaaaaagaaagtatattgacctttaaaaaaaaaaaattagaattacactttcctggtttgtaccttgtacttgcacatcattgtttggagaatatttttccatatcattaaaacattctttgaaaatgtaaacttcacagatcgagaccatcctggctaacacagtgaaaccccgtctctactaaaaataca

SEQ ID NO: 3438 - DNA, 442 bp, Homo sapiens
cagagatctgtcaggtgtgcccacacaacagaagcacttgtaaactaattaagcacggtcactgaatccttttttcaccagccttctaaagatgttgtcttaaaaacataagaaagaaaatccatttttttaaagcaatgaaatgttctaattaggtttgaggacatttgaaggagcgattgttttttccccaaaattttggagcagaggggacgttttacatcatcctaacttcatgttcctctgtcattttattttatttatttatttttaattccaaaggagaaagttgaatcaggaaaatttgtcttaaaatatactgcttagtttagagacggacaaactaatgtatttttgtaaatcatgggtggcggatgtcaaaatctctcattaattaccctgtttttttctttaaggaaattgattcatgaataattggaaa

SEQ ID NO: 3439 - DNA, 442 bp, Homo sapiens; identical to SEQ ID NO: 3438

SEQ ID NO: 3440 - DNA, 1408 bp, Homo sapiens
ggagctgcacttcagagagtcccactgtaatctgttaatagaatctgctttaaatgagtcactccttagactggcaatgacacccagcttagtctgtaaaatcaggaatctttgtgttggctgaaggaacttagtaatcttagttgaattcctcttccccatgtctttcaaaaccagagcactgggtcgaacctaacccacaaaataattcgtccaaattaaattgacttttttacataacatcagcaccaccccttacacttttaaagttaaagaccctgttgatcaggttacctggaaatttcaagtgcatctgaccagggattatcaagctccttgtgacatctgtttctgatgctgtgaatgtgatgtcaccacaaatagaggattctgaattttgctggtactaatgctgagtggtgacttattggggccttgctcatgttactttttcctgacgtcattcaagcacttgatgacttgggtcagtttgttgcacattgatgaataacaagtgacacccaatgaaattacctcttctcctttccaatgcagttcgcttgtacataaatgtaacgtcatattgtttacaggttatttttgtgcgtaattgtgatagcagatttagctcaaactttaaaggaatttgtttactgactggtgttaaaatgaatgtgcttattacagtataaacatcattaattatggactcacatgaatgcatgtctacatgtcgtcagttctcagcagctcagttattcagcaaaaagtctgcagtctgtgaatagcaaatatacataaactactgtgactctaataactctaactgtttttaccttgggatgtaacactgtagatcttcgcctgctgtatttctttcttacctatttgtttttgcgagaaaaacatgatagaaaatgctactactaattgtcccaatggaattgcacatcattttggcaatcattggttcactcagaaggcaaccgcctatagatggaacagccctgagcaacatataaatatatacatacatatctatgtatgcaatatctacactgcgaattactaccatctattctcactgccaatggaaacaaactactcttttctttggattcattgatggatataaaaaattaatttgctattaactgctttcatattctgtttagttcttatagtatggtaaatgatacaggtgcagtatcagtattgtaaaattgtatggtgaaaactacaaaagtcattctgtggatatattttaaaaggaagaacagaaactatatttcagattcttgtgtgaatataattacagaataggtaactatttttatgtgtttccataaatgactccatttcatatgcattgtaatttagcacaaatcataataaatcatttggtaac

SEQ ID NO: 3441 - DNA, 1582 bp, Homo sapiens
taccaatatcccagggatggaattatggtagggtcattctaattccattttatacaagggaaactaaggacccagaaagtttaaatcggtcatttatttgtttgtttatgcatatatccagcaaatatttgttgggtacatactatatataggtcactgtcgtgagcattataatgtctaagcaatcaaatttggagtaaagaacttgaattaagttcattcaattcctagactaacattatttctatatgtagttctgatcagtattctagaattatggtttaaatatccagttataaataatatatattacagatttattattatgtacctgaaactctactgagtacttttcatgccttatctcatttaatcctatcataatccaatgaagtaagccctaccactatcctctctttacagatgaggtcagtgaggctcagaaagataaagtagcacataaaggctcatagctaaaaagtggcagagccagattttcctctgagtttattagactctaaaggctgctggcttaaccatctctttgtacaatctgttctctctgttctctgaactttgcctgtttctcctctctcctatgctaaacaaggtgagatcccagcctgacatccttcctaaaagtcatcagttttttttgtttgtttgtgacttgtatctgcctaggaggtaaagaaagggcagatttgctacagcttgtactttatgccacaaaaattttcaagggggcaataatgttgtagaacaagtatctggtgagtactgataccctaagaaactcaccgtgataagctagcttccacgtctggagaaaatgacacctgcaattgcttgctgtgctgcacacaggtcactagggcaagcttcaggagaagtaaaataggtgtatgagcgtgtttatatgtgtttatgcatgagtgtatctaggtatctgctattttcatcttttggcttgttaaacagtctcaggtttttattcaagacaggtcaaaagcccaaatgtgattaactgccctcagcatctcattgttactgttataagttgggaaaaagagaggcagctttagaaaagaaacttcgccgaaatacgtgcatgcatgtgtgagtgtgtgtgtgtgaggagtgtgtgtatttatgtgtgttttgtgtttatgtataaaattatgtatatatatgtacatatgtgtgtacatctatcttaatgtgtatatataaatatatatctatagctgtacatatgtatacacccataaacaaagctcatagtttaaaactttggaattttcagtttggagaacttattattattacaatttatatttggtttcctagacggtctaatatagttctaatttccaaaattctcttccactaaaagtggatatatttatttatggtgccgagaacattaacaaaatatttagatttaatatctatgaataataaaccaaaaaaagtgcatttaaggaaacaccaaacttgtaaaaactggctctcttatccaaaccatttgttggaatttcaaactacatgttttcacacttcttcattccaaaaaaaaaaa

SEQ ID NO: 3442 - DNA, 1408 bp, Homo sapiens; identical to SEQ ID NO: 3440

SEQ ID NO: 3443 - DNA, 1582 bp, Homo sapiens
taccaatatcccagggatggaattatggtagggtcattctaattccattttatacaagggaaactaaggacccagaaagtttaaatcggtcatttatttgtttgtttatgcatatatccagcaaatatttgttgggtacatactatatataggtcactgtcgtgagcattataatgtctaagcaatcaaatttggagtaaagaacttgaattaagttcattcaattcctagactaacattatttctatatgtagttctgatcagtattctagaattatggtttaaatatccagttataaataatatatattacagatttattattatgtacctgaaactctactgagtacttttcatgccttatctcatttaatcctatcataatccaatgaagtaagccctaccactatcctctctttacagatgaggtcagtgaggctcagaaagataaagtagcacataaaggctcatagctaaaaagtggcagagccagattttcctctgagtttattagactctaaaggctgctggcttaaccatctctttgtacaatctgttctctctgttctctgaactttgcctgtttctcctctctcctatgctaaacaaggtgagatcccagcctgacatccttcctaaaagtcatcagttttttttgtttgtttgtgacttgtatctgcctaggaggtaaagaaagggcagatttgctacagcttgtactttatgccacaaaaattttcaagggggcaataatgttgtagaacaagtatctggtgagtactgataccctaagaaactcaccgtgataagctagcttccacgtctggagaaaatgacacctgcaattgcttgctgtgctgcacacaggtcactagggcaagcttcaggagaagtaaaataggtgtatgagcgtgtttatatgtgtttatgcatgagtgtatctaggtatctgctattttcatcttttggcttgttaaacagtctcaggtttttattcaagacaggtcaaaagcccaaatgtgattaactgccctcagcatctcattgttactgttataagttgggaaaaagagaggcagctttagaaaagaaacttcaccgaaatacgtgcatgcatgtgtgagtgtgtgtgtgtgaggagtgtgtgtatttatgtgtgttttgtgtttatgtataaaattatgtatatatatgtacatatgtgtgtacatctatcttaatgtgtatatataaatatatatctatagctgtacatatgtatacacccataaacaaagctcatagtttaaaactttggaattttcagtttggagaacttattattattacaatttatatttggtttcctagacggtctaatatagttctaatttccaaaattctcttccactaaaagtggatatatttatttatggtgccgagaacattaacaaaatatttagatttaatatctatgaataataaaccaaaaaaagtgcatttaaggaaacaccaaacttgtaaaaactggctctcttatccaaaccatttgttggaatttcaaactacatgttttcacacttcttcattccaaaaaaaaaaa

SEQ ID NO: 3444 - DNA, 434 bp, Homo sapiens
gtccttgggctggcaggaaaagtccatttggtgtgtaatcctaaaattctgcattgctatagagcaagagcacttacgctgaaatccatgagctctttgaaattgtgtaaaatttggagagcttttacatctctcatttcactgtgtatctgattttcaaagagaaaaagtgttaaaaaggatagaaaacacaagcttagaacagtcactttaaagaacaaagttttaggcaaaaacactgagaatttcaactcggcttgttgggagttggccctcatttatatccagcccttggctatgaccatcaacaacttgagggagggggctacatcagaactgagggcttttctctagaaagatctagattgaaggacaccaccagagagaagaagctaaaaaaccttgtgaatatcttcagaggaatgtttattttc

SEQ ID NO: 3445 - DNA, 373 bp, Homo sapiens
aatggagcaaaatcctcagtacttaacagtgaaggcaaggtcttgtgtctacctaggtgtgattgtaactgttaaaaattgcaggcaggcatggggcagttgggaaatgctcaggtttttttttactgtagttcaatgaatttaagcaagccacttgaattttctgcattaatttactgagcaccatcctgtatcttatttatgcttgtctttataaacaacacgtaatgcacattttgattcgtttttcaaggcttactgtgttggttcatatcctagttccaagaaaagcacgtttggcagaaataaaagtttttactccaaattatttgataagaaatttggattcaattttagcatctttttgtgtctt

SEQ ID NO: 3446 - DNA, 13605 bp, Homo sapiens
ggtcctaaaaagacatggaaaagagcttataaactttagcaaaaggaggaaagtagcagaaataacaggagagatccagcagtaccaaaatcagccttactgtttacgagtagaatcagatatcaaagtaagttgaattatttaaagattcatacttctgattaagtttctaaactacttaataaaaggcaggtttattttataggggagaaaaagtaaaataaaccttaaaagaaataattcaaatttacttgtattaaatgttttcttaactttccatgaatttcaaactgaatttataattttgaatattaataattttttctttgcatttattttagaggttctttgaaaacttgaatccgatgggaaatagcatggagaaggaatttacagattatcttttcaacaaatccctagaaatagaaccacgaaaccctaagcctctcccaagatttgtaagcatttgtatatttgtctggtgatgtcattactaccatatgtgttatatagttttccataaaggtattcagggatgaagtatacatgtgatagttaaaagtaatgaaaaagtacttaataattatgtccaggaatatcccacttccttccaaataaatgaatgttagtattaatttgagtaaatcctgatatcaaagatgatgaaattgagcaaatattatgtaagtttttaattttttttaccccaaaaaatgttaagattttaaagacaggaattttaatgaatttatactaattcacttgtaataaaatatctacttatgacattttaaaagtaatgacttattagaactttcaaccatgaatcatgagccataaaataccaagttttgctaacaatactttcttgggaaaataaagtttccattgttttttgttacttgtcagtgcccagccaaatttatgaatagaatcaccaactcactgatttgactatgtactctcttgttcataaaaaagtcaaaagtctgccaggtgcggtggctcgtgcctgtaatcccaacactttgggaagctgaggcgggtggatcatctgaggtcaggagtttgagaccagcctggccaacatggtgaaaaccctgtctctaatgaaatacaaaacttagccagacatggtggcgggagcctgtagtcccagccacttgggaggctgaggcagaagaatcacttgaacccgggaggcggaggttacagtgagccaagatcgtgccatggctatccagctccagcctgggagacagagcaagactcgtctcaaaaaaaaaaagtcaagaatcctgaattaaacatagatggcttctaagtgaccaagataaatcacataatgtcttttaattaaagtgtatgcaattgcctgacagcaaaatttctcaagcccttgttcagtttttaataagatggattaaaaatagaaaattataaataggtatataatctgatccaatgaagcactcactgagaaatgatcattttgcaaggaaaatgcaataaaaccaacatacatacacaaatgaaaattgggcaatttaatgtattcgtaaatatctcaaatggtcctgatggcatcactgtattacagaatagaaaggtattgtaattcacagtgatgatcctggcttttcaacaaggttaaatttgctcaaaatagtctgttttaaaaaccagggaaatatacaatacattttagaaaaacttctacccaaatgtattaaaataacaaatactctagtatttataggactaaaacttagttatttaaagaaatgcattctttaacaatttagataccagggctttagcaaaatagaatgttaatgctttaaatgttctacttttatttgaataattatgtccttattagtgatttatgattttcctgtatattagctgaattttaccaggcacatatagaaaaactttcctttctactacagtgtttaaagtattgtgtttcttttgatatgtctacagccaaaaaaatatagctatcccctaaaatctcctggtgttcgtccatcaaacccaagaccaggtaccatgaggcatcccacacctctgcagcaggagccaaggaaaattagttatagtaggatccctgaaagtgaaacagaaagtacagcatctgcaccaaattctccaagaacaccgttaacacctccgcctgcttctggtgcttccagtaccacagatgtttgcagtgtatttgattccgatcattcgagcccttttcactcaagtaggtgcaaaaattctaagtgcattaaggtatttgttagtactatacatgctagaggtaaaaaagaatctctgttatttttttgtatgtgtgaacttgtagttaagtcaaatgccatttcaaaagataatattataaaaatataagacaaattctaaactccaccaacttgaaatttctaaaaaatctgctggaacagccctctttaaatttattatacgttaatgaaaggcctagtggtaaaattggcagcttaaatttcatttgagcttttcaaatgcattcctcttatccagaggagacaaagatcagtcttaaaatctgcaagtaattttagtcccatgtttcaaatgctgcctggctccaaaattattatacaggctgaatatccctcatccaaaaacccaaaatccaaaatgttctaaaacccaaaactttttgagtgtcaacataatgctcaaaggaaatgctcattggaagttttgagatttttcagttagggatgctaaaccagtaagtatgatgtaatattctgaagtccagaacacttttggtcccaagcatttcagataaaggatacttaacatgtatttgaatactagtcagggtacaccatctactctccaccaaattctttagtagcttttaattttgcaatgtatcagatttaagcccttttcgtctacccagtggtcccctgatggtatataatggctgctaatacactatctgtgcttttcagtgcagcgaaacaaatctcacagactgcacactactgcttatccatctcttatttctagaccagcactgtcctatagaaatatgtgagccacatgtataacttcaattgtctagttagcctcattaggaaaagcaaaaataactttaatacattttatttaacccagtatatcagaaatattgtcatttcaacatgaaatcaatataaaaatttatgattgagatattttacattccttttgttctaaatctttaaaatccagcgtgcattttacacttacagcacatctcagttcagacaagccacagtcagatgctcaataatcacatgtggctagtggttgccggactgtacagctcaccttttgaaaggctaccttttcaatctagatcaccaataattttttaaattaatttcatgtgaaactttaaagctcttctaagaaccctttttcatttgttcgttattaaatcaaaacttcaatccagtcacctttaactctttcatgaccatttccacatgcccttaccgttggctatcttagctcgatgtgctaatcaagttccccctaatttgacatactagaatctaatactagaggcagcatgacattattatgggggaggaggttgagaagcactaacctcgaagttagaatttctggtttgtcatcccagtctgctaattagctttctgatttaagacaaaatactttttctgtgccttctgggggtcaaattcgatttttaagattctctcagttggaagaaatctaactaaaaatatacttaaaataattctttggtagtatattattttgaaatttggtccagaatcctatttgtttattcctgtagtatacatacgtctgtagttacccagtagtctttgttgtctttgggccatctaaagtatatttgggctgggcatggtgtctcacacctgtaatttcaacactttggaaggccaaggtgggaaaatcacttgaggccaggactttgagaccagcctgggcaacacagcgagaccccatctctcctaaaaaataaaaaaattagctgagaggagaggtgtgcacctgtagtcccagctacttgggaggctgaagtgggaggattgcttgagctcaggagtgtgaggctgcaatgagctgtgatcatgccactgcactccagcctgggcaacagagtgagaccctgtctcaaaataaataaagtgtatttgtcttgagaatactatgacttggcattatttggtgactgaaggtacatggagtcttttttttttttttaattttataaaaattttggtagagatagggtctcgctgtgttgccaaggctgctctcaaaattctggcctcaaacaaacctcctgccttaatcttccacagtggtggggttatagatgagccactgtgccgcgccatggagtcatgtgatacacatagtaagctgtcagatatttttgataagttcaaatagacaccaagtaaaaaaagattcccatttattctccccagcttgccaaccccctaaattaagtaatgaaatgaaaccagcaccttttcagtatatctgacttaaaatcattatttattctgacccatttaactgtttgcaggattttttccctagagcagacagctataggcctgtatcattaaggattctcaaataagtgaactattgaaaccacataaaagccatcagttgcaaattctacttctctttgtttaagtagctaaaaatgaaagtggtggaaaaaacaggagataagcatattaagttctctactagtgctgaatctttaaatgactagctaagcagcgaagaagaaatcattctagaatgcagtgctctggatcctgctttgttataaacagttataatagcattaagttaacagtatttcacttaaacagctggacaggtggagaaaacattgtttcaggagttaggctttgtaatcttagacttgagggttttctcaatttctctttgtttatgataaagaaaaaccctattactactccctttgtttttggttaaaaactgaaaataactgattttgaaatcaaataaaccagtgtaatataaagccatccatgtgttctgctaatcccttaaaacctatcagttgcttttgtgtattaaaggtcttctccacatgcttttgtcttcacttttgcctaactaacagatgtgcgagtgccagaggatcacccagagcctccaacttgctacccactgttttgccaccagagtgaatacctatttccttgtttccctcagggcctggcagaaaagaactgccttgactgcagtcatatgtcatcccaacatattccactcaaagcagtacaaagttccattgtttaagtttttcaaaaggcagagtttgactagaatttttttttatcagttataatactatactattctttttttactcttacggttttttcccaaaataatctacttttaaaaacctataattaattatttcagccagtatctgctgcatatcttattccttgctaaacacttacacgtcttcactgggaaagcttgcagtcttactgagagattaaaaataatcatagtgcaaagagattcacagttaaacgctaaaaatagtggtaaagacataaatactggagaagcttatagaaagatgacctcagaatgagcaagagtggtcatggaaagcgttgtggcaaagacagggcagagaagtggccacgtacttagtgctgccacacatacattcaaagccctgctccacaccttgccctggccaggtccacctttgaggtgatgacgacagttgctgagaaaagagaaaagaccactggctcactacttgtttctgctgctataatagagaggagaaaatgatgaaatgctctttttaccttcctgtttgaagattgcctggtcataaaagggagtcagaggtctgacttctccatttccatcccttaggggactctttaacaacaaaaagaatgtattacaagtatgtcaagctgataacgcaaggcttttcctcctggaagattgctgtaggtgatgagtttctaatcccaaatatatttgcatttaccaggcttttgtgagtttaagaagttatctatcatatctttttttttttttctatagaaaaatgcttgtttctatcaagaatgactcctttataaactggggagtatctttaagagtggtttcaaccctgactgtatagtatcatctgttgaggagcttaaaaaaaatatgtaggcccagcccacactagactggcattggtacctggtatcagtattttttaaaaacttcccataggattctaatgtacagccaagattgaggaccatttgtctgtcatctgggattatgcttaataaattaatactgttttttaaattaattagatttcacttctaagtcattatcagtaaatttactcagtatctaactgacaagaatttctagcatatatttcttgattagtgcatgtaaaattctaaaagaatttctatagtattttccaggcaataagacaactagtgccccaaatttaccaaatgcatgagtctaagcctgtgctatatataaatatactcaaagccaagtttacatctgtgtacacaagtgtgcatgcatatgtacaattaaagactatagttgtaacagtcatgagcttgtgttttgattttactcctattcctgtattgtattaagtgtactatcatgttcttgaggcatatctccaggagatatgtttatttcttttccaggaaaagtgggacatatataagtagggtaaacgctagagctagatactcctttaatctctattacgtcagatctctggctcccttttacaaccaggcaatcttcaattataggtggctaatagggaagaaaatcatcggcagagcaacagcttcatgtaatttcagagtagaaaaatgaattttaatcttctgaaaggtaatattagaattagctggattgctacacttaggaatcataggttccaaataaatatcagtacatacggaaatcagataatgggacagattatttgaaattagggctgcctagaaatctggaatgtgagatcaccctccttctgaccaaatatgcttgaataaacttaatattccaaattatgtgagggattgcctattgtgcaaaaaaaaaaaaacgaaatctgaatttaaaaaaaattaccacagtctagtattattttagtctcttggatgttataacgttatctgttccatctgttgttaatatgagacactgtacaaacaaacaactatattgatttagaatcagtatagatcacctagctttttgtctcaattttcctactttaatgctcttggggctttcgcttttgattttcagttttttccttaaaataattaatattgttgaaattagactttctaaatttaaatttatcagaatttcctatgtaaaatgagtctaggcaccaaatgtttaatgactttaaaaaaaatgtttatgactataaaaggaaaaaccctgtatcaatttcaagcttgttttatatccaaagtgctagttattttgtgatgagaatatatgccccaagaacatttttgaaagacatataattagtaacttttttatttttcaacttacataaaataaacttattacttgtttcacaagtttgagttttcaaaataatatttactaaatggcatatttatatacatccagctgaactttttgcttgaattgggtttctacattttaaaaagtctttcagtaatatacgatttttttatgaatgtttttcatttaataattatgaaatcaagtaaagctaaaaggaatcttaaattcccaatatgatatcatttttttcttctcaaaagtaagtagtaatgaggttttactataaactgttacagcattctttaaaacgacaatgacaataacattttcatcataatacaaatttttgcagatgagttgaatatatcaatgaaagaaaaaaatctactttttcttgtttcctttcacaggcaatgataccgtctttatccaagttactctgccccatggcccaagttagtatatttggtttaagactcataattcttgctttggctttaaaaatcaaaccaagtgtaacctttcctgctaaaactcttcttgggtctggcagcattggtaccttgcttgcaacatcctagaagtgaggccttcacttgtgctatctttagatcataagtgatttgcttaaatttatatatttctcatgctttttataaaaccttgtttctctcttaaaagaacatattaaataagtggcttccacatttaaccatttcttttttccaactatagagttctaagtatattttaatgctcaactttgaaaaaaaaaaaaaggcaagagcatgcatgcgcatatgggaatgctggcagctacatgcagtttctaaatcacaaaatatacttagcctgatggcaggatagattatagacaactgcttttgactttagaagaactttcttataattgtaattattcaaagtatagcctaaatactgataaacaaaataaagttccattttaattgtaaggtaaactaacaagtcactaaattccattattttaattatttaagctaatatttttttgctgtcctttcatacaatttcaaaatatgtacaatggaaaatactagttacaagctgaattaactatattcttaagaaaaaaggtaggtgatcaaaatgttgatcatttaaataatatcagtacacaaagtactctttttaagttctatattttataacatgtgacaaaataaaaagcttaatgcttaaagggaaaaaaaactgccaactataattttgaatgatggtttaagtatttttttcacatctttttttatagtaggtataaacaactaacttaagtgttgttttccaaagtgtatttatatgcctaccttatgttcttgttaccataaatgtctgtaagagaggttctaattagtagctttacttactttttttgtgccagtccaccaacttattcttaaatcagattcactagattttagtgtaatttctgttttcatggtcagggctgcctccgttgtcttgaatagtgccatcaccgttaaaatttttggatttagagtataatgagcctctttttgcttacaggcaaaggggagcctataactaaacaaaatgaggagaggcccctcacctagacactatgattctttcccttgcatcctttgagagaaatgctagggagagacattggagagagtggttaagagcacacactctactcccagggactatccagtaaggtggggaagttctataaattctaataaagtcaaagaaaaaaatgaacccattatagaatctaaaaattaccattccaaagattttcagtagctcactgtctcccagacatctgagaatcagactcaattaaaaatttcaataatagagtaaccatgggaatgttattttgttcaggcaaaataacagaataccttaggcagcttttttctaaatattctgctaaaaaatgtctgcatgcttttatggcagtttgctttaatgaaatactattcggtattggtttattgaacagcttttggtatttctacacattacttttaattataagcaatttccagctaagacttttcaaggtaaataaatgaaataaaattcctgtggactttttcttaaaaatttaacatcccacaggatctgcttctgtatcatctataagtttaaccaaaggcactgatgaagtgcctgtccctcctcctgttcctccacgaagacgaccagaatctgccccagcagaatcttcaccatctaaggtaaagtaagaaatcttgttgtgtagaaattggaatcattacagttcattataataaacggctgtctagtttagttctcactaggataagttaacatttcagagtatacaggcttaatagtttaaacaaggattacatatagatttagcatgcagtaatgtttctttcttctgaaggtagttttttggtatgcattcaagacccttgtaaacctaaggctatggttattttcagaaaaaaacaaaagttttaatctgtaaagtaagaggaatttggtttcaagcagttctttaaaagcatacagagaaagtcctgaagctttgtatgaaggcacattataagtcaaactgtattttgacatatgctaaaatttacttatctgagcccttaatagtaaatctgacatacttttaaatggagttttcatgaaaattctgggtttggaagagaccccaaaggctcaaaatagctattatttctacttatttaattttgtttttttctttttggccagctgttaaacttaattcattagttcttaagctgtccagagtgcagagcaccaggataagtcaagacaagacactctttgtagaacttcatgaatgttaacatagttaacttaaaattataaaataggtactttatgctaaattagaaatgatcttagattgagtgataagctaagcaagcagtagcaaacaaaattttgaggaaaaaaatttaagtaaaaactacggcaaactttttttttctatgaattgacagaacctcccatttaaaacatatgccagccttggcaacagagcaagaccttgactctacaaaaaatgaaaaaaattagccaggcatggtggtacatgccagtggtccttgctgcttgggatgctgaggtcgggggatcacttgagcccaggaagttgaggctacagtgagccatgattgcaccactgcactccagtctgggcaatagagcaaggcattgtctcaaaaaaaaaaatttttttttaattaaaaagaaaacatatggcaaaactccctgttccacacttagcatcctgccaatagcatgtttgaaaaccccaacttaattcttatagtcatgatacttcataaatttattaataaatgtgtattttattcttttcatttgttagattatgtctaagcatttggacagtcccccagccattcctcctaggcaacccacatcaaaagcctattcaccacgatattcaatatcagaccggacctctatctcagaccctcctgaaagccctcccttattaccaccacgagaacctgtgaggacacctgatgttttctcaagctcaccactacatctccaacctccccctttgggcaaaaaaagtgaccatggcaatgccttcttcccaaacagcccttccccctttacaccacctcctcctcaaacaccttctcctcacggcacaagaaggcatctgccatcaccaccattgacacaagaagtggaccttcattccattgctgggccgcctgttcctccacgacaaagcacttctcaacatatccctaaactccctccaaaaacttacaaaagggagcacacacacccatccatgcacagagatggaccaccactgttggagaatgcccattcttcctgagttcctctgtactgggatgtatattttcctagccccaaatccattgctggcaatggatgcactgaatgtgccagcactgaggagttaaaatgagaactccaaacactaacgactcttcttcaagatgcagtataagacaatgaattttaacctagatgtaattatacaatggaaatggtattccagtttagaatatggaaagaccgacctagaggaattggacaactgattgcacctgaaaatcataaagggactttttctggccaataggcaggagtcctctttttgtgaagtgatcttttgtgaagtgatcattaaagggatggaaaacacagtctagtgtccagcaggcccacatgacagtttttgtaattcaaattatgcacttttaaaaaaaaaaacttaaacagggatcttaatatcttcctttgttttcctttgctttactcttctactttagaatattttcttaaaaatcactcaaaggactgtgaggaaaggctgtggtacctgaccttgttgaaatcaaggcccggcactgtactacaggcctgtttacagattattacggtgaactgaatgggtaccgaggcttcaccaaagaggtacttttttgttgttgttgttgttttaggaataattgtaccaattttaagagcattccccccacctgtccccacacacccaaacaaaatgtggtggtgttgccttcaaaaaagagaagttttgtgtcattaacatgacagaagaactttttaaaaaaaaataactgtcaactattctatttgcatttaggagactgttcatctatgctagattgtcattttccctccttctcccacagaagtttactggtagtccatgtcatggctcgtagctatccctctaaccataccatggaaatgcaggcacccaatgtgaaaaggagcacttgctgggcatcactgacaccgctcatgttttacacatagttgagtaatcagcatatctagaattatcttgcattgcctaaatcatatgtatatagtgaatgttatataatatacctggcaggtctgttttaatttaattgaataaagatacaaatactttgtttggctggcatatattaaattattatatgaagaaaatggttgattcttatttcttttagttgaaaaacacacaaaaacactaaacataaaagcacgttttgtggtacgccttggtttctagttctggatatatgtattaatcttaaagaatgatctaaagtcacagcttggcatataggaagatacttggttagaataggatgggtatcttttaagcagaactttgtaagtaagttttaagttcctaagcaacaagtatacagtttgttaaggtttatattgaacattctaccttgcttgaggttttctgctttatcaaaactattcataatagaacatctacctgcatcattactatcataatatggattattcataaagcgtatgtactgttcttctgagtctaacaaatactgtgactgaaatgcatgcaccttgttgaagagaaaacattttattaatctccactataatgtctgtgaaatgtgcagtattccatccttagagagtttatctggttcatcagcatctgcatgtatcctctgaataatgaagcaacatttcagcaattctgttaaccacaccattagagacatttttagaagtgctgcaacatggtgggaacctagtactttaataatttcctatgatatttattagagcataaaatgtacatcacgatagtacagtatgtagtcctttaagaccagaaggtatgttaactgcaccatcattaagcagtctatcctattttcttatttatttgttagaattgaatcctttctcaatatctgtaccattcctatgatggtagccattcttctctttataaaatatttcctctttgaaaagcgtcctaaaacattaatttcaaatcccctcttggatgcaaagtgtccctaagaccatccattcaacagtatttatgtgagccaacttactagagccgctaca

SEQ ID NO: 3447 - DNA, 2093 bp, Homo sapiens
gtgataaccccttttcaacctatctagtctataaagaggaaaaattcagatttggagttctaatcctatttctcccaaagggaactattcttctaccccatggttctaggagaccacttcactgtgcaacagttttacatgcattgtggatggaggatatttttattctgaactgttacatttaggtaaaaatattttctgcagtggtaactgattagaaaaatgccaattggatgcccttaggtggaggtgagaaaatggcatccttgccttcttctcaatatgaaacattaactagttgacaaatttatccttgtagtaatgaaaatctatttaatcagggaccagaaatggctgaggagataaatgcatcattacaaaattctgcttttgaatcctggacattacaagggggtaaatgcagcatgactttttgttaaccacattccaaaatgtggaacatttcttttagaaatgaaaatatttcaaggctgatgtattttaagactacacattatcaggaaacatacattgagagttcgcttaattaaaggttgttgggcatcaaattatgtttagtaggttactattctctaacaactcaaggatgctttaatggatctgaatttgacaaagagcatgccacactaatactacagtcaacaacagcccagagaacaattactatgtcagctggaggctatattatgattctaaattcttaaaggtttttttccctccataaatcaaaaattaccttatgtaaaccaaaaattagttggtatttatggtcatgatcttaattctcaagtttagcttaatcttgtatttcattgtttgtcttctaatatgacagcttaaattcagatttttaagtgactcagcaaaataggaggagtgtcccaatttattagtgttgtacatattgaagaaaacctttttgttccttcagatttagaaagaaacagtttaaccatttatttcttggtattctgctgctgtgaataggtttacttattcttttaacatatattgtgtgactacgcaagtataggtcctgttgtattgcattaatctttaccagtaactaaacatcacaaggttaatattggtttggctgaaagaattatgcagtaaagttatttataagggaacatgatgactttattcaatatttttcttctttgaaacatctcattactaacttttaagattatttcataatcccttatacatgagccaatgaaatattttgagctctacttaagaagcatgaagtctatattataaatctaaacaacaaaagcacttgtaacttgtttagtaaattccatgccttattttccatttttgacaccgtaaagtgcattttctgtcgactgtgagcaaatttcccttttgcctttaatgaaaatagtgcattaagtagccaattgctgcagaattataaagcaaattagctaacagtgggtcacattggactaccactcaaagaaacaagatgcataacagatgatggaaggtacatgtggtgtggcttagggagagcgcacctgtgccagatgcatgccactttcagtagctgccaaatgtgcctttaattaagaacatctctaatttttttcttcagatcaagtcagcatttggggtcgggatttgggcagggaactttggggtgcaaatatctggtgaaaccaccagagaatttgtttgtcaaagtgacatgtataattttagttgagacgtgtttgtgtatatatgtgtatttgcctttgtttagtagcacggttatttgctaaaataattgtcaaaaaattgctctgtcggtcggtctttgatgtaagaacaaagtgtggtctatacatctaatatggcctttgtacctaaccatgttcataggtaatctttgtactctgtgtgcagcagtatttggtttgcatttaaagtgaaaataacggctgttatttttctggcattactaagataaactgaaaaataataaagaaaaatgccttacatagcccacaagtgtattatttttgcatgtatttattttagagggcagtatttttgaaatcattagtgattctcat

SEQ ID NO: 3448 - DNA, 3561 bp, Homo sapiens
tactaaaaatacaaaagttagccaggcatggtggtgcattcctgtagtcccagcttactcgggaggcagaggcacaagaattgcttgaacctgccaggaggcagaggttgtagtaagccaagatcgcaccactatactcccgcctgggtgacaaggcgagactctgtttcaaaaatagaattttttctaaggtaaaaggaggatgtaccttaatcaggtttgtcatcaaacatccaagcctttagcattggctttgccctttgcttttacacagctctgatcttgtgtcctccttctgttatgtgtaaatttgccttgtctccattcttgctttccagctattttagaattgattctcatatcctggcctgtcttttaaatgtctctcttctattttgaaacaatatacttctttcattcaatcgaaaacctttgctgaatgcctctatgtgttatgcccagggctacatgctaagaatagacagataagatacagttccgtagtttctgttcccttgaaagagcagagaaataagtcacagcactgtgtagtaagcataacactgtattgtagaaaagtgtagactgaagtgtggacaaatgccagagaagcctagaatcctaagcagctactttatcctgggaaggatgggaaagacatcagcaaaaaaggtgaaacctcagccctcttctttgtcataatgctctgttttctctttccctagaagagctgcctccagaggtagggtatgttaaatgatatattgaagtacaggagtaactagactttctatttatatattttttaaaacatgaaaaaaaaacctaagctttactaatatataattctcaggtttatgttatacatacacacatatacgctatgtttttattaaactatatatgtgtatatagggagaaagcgaggatatgtgcttaaatattttttactgatgcagtgtaagatcaaagtttggacaccactgctgtgatcatttgttcttttagctagccatcagttaggcacaaaataatttccaaatttcatcccaaactgtaccaaagtgctacttataagcattttcacaacttcattcaagtgtgctttcaagaacaaagctgtgagtcttcattcccactgcccccatttcctccccaaaccagttaatcagttcttggggagtctacctcttaaatatttatccactccccattatccccacagacactagggcagccctcatcatctcaccaggactattgttagcctactaactgctcttcatgttactggtcttaactccttccaacccacctggcttcatagtacacctagagtaatccttccagaatgcaaacaaaatccttctaattccctaattatctcctagataaaagttaagctatttgacaaaaggcacacttcatgacccagtccaagtgctaatacccacaaactcttcacagatgggccatcagtttgtgaccactatggaaggttgatttgggctgccattgagcatgcatactcttatggacgtgtttgtcagactgaacactgagctgagtggatcatgcaacttgtgtagaggacagtataaatggctgaaaataaaagccaaatgacaggcagatgtgaaaataaaaaagcctgtgcttactagaacacacagtcactttgtcttatgaatgtatcatcaggcatagcccaggtgctgagaaataaccaagtaactaatgcacttaataactggatccttttaaaaaccaaacaggcattgatgtcagatttcattattgctgatctgttcaatattgatttggatccttttatctttccaaggatgtggccaaagatttctgtggtgtatgcctctaccacaaaagcatttagaagtacaaacccagcccttgcctatgtctatcctcatatcctgccactcttcctctaccccacacaccaaacccctatggtctagccatactaaagagcaaattatctctaagtatgcctttcaagcaagcttcatcatcatgaatcaatgcctttatacacactgctgctttgcttagactgctcttctactttattctactcattacacttctcattttttgggacttattctaagcattatctcatctgtgatgctttttctagtcctcccagctcaagacagagtttggaatacctcctttttgctctcatagcatgttatgcattcctactaatatagcacctcctagtatgtagcgcttagcaaattatactgtagtagccaacagttcaaagctctggatccctgaggtcaggaacgccttaagcactggactgctggaggtctttctcatctttgtacctgcagtacctaatgcaggacttggcttacagcagagaatccgtacacatgtggggagtgaacgaactcaggatcttttttctcctcaaagcattgtaatcagtactttagggaaaaaggtagaagcataagaatattagggcaagatgcaacaacagcatcaacaatcacaaccacggctaattaatacttaacgttcgtcaggctctattctaagctcatacatatattcactcatttgtttctcacagcaaccctcctgtcctcattttacagatgagaaaaactgaggcacagagagactaattaagcaatttgcacaagatcacacacacaggctgctcgcggtgactcacgcttgtaatcccagcactttgggaggccaaggtgggtggatcacctgaggtcaggagtttgagaccagcctggccaacatggtgaaaccccgtctctactaaaaaatacaaaaattagctgggtgtggtggcatatgcctgtaatcccagctactcaggaggctgagacaggagaatcgcttgaacccaggaagaggaggttgcagtgagccaagatcgtgccattgcactctagcctgggagacagagtgagactccatctccccaaatctcaaatataaaatataaaaaaaaaaataagatcacacacagagaaggcagcagaactggttccagagcctttatgctagaatagaaagtgcctgttattttgttcattctcctcctcgtccagtgtacagctgtagtgatggggaaacaggaaatcaattactaggttgccactaagtctacaaactattgaagaccagaatttacataaatcgtatgcagtcccacatttgacaggcttgcaaaaccttccacatttccatgagtaagcctatccaaatagtactacttctcaattgcaaatcataacaacctcttgtgtggccgtcagagctgactaagcagaaactatgatcctctgaatttagtatttttcctgtttgccaaaaatgatgtgtcattagtgacgaagttattcttaaagttcctttaacaaaactgtgatttatatcaaataacaatggcttggagggggtatggaaaattgattattcttcctaacaaatctattaattttattaaacttggtctccctccctttttcttggatgtttataaaatttaagtctttctaa

SEQ ID NO: 3449 - DNA, 9375 bp, Homo sapiens
cagttccttccacatggtattttctgattgtgctccctgtcttgctagtgattgtcatttttggtaagtgccctgtttaattttgtcagagaaattattccctggggcctctcgccgggcaggcagactttcagctttcaggggctgtttgcttcaattaagtataaatgggtgaaagcccaaatcaaaactttgagaaacgaataataggtacacgctgagggctttctaaacatttcttttggccaggcgtggtggctgatgcctataatcccagcactttgggacactgaggcgggcggatcgccttgaggtcaggagttcaagaccagcctggccaacatggcaaaaccccgtctctactaaaaatacaaaaattagccgggcgtgatggcaggtgcctgtaatcccagctactcaggagactgaggtaggaagaattgcttgaacccgggaggcggaggttgcagtgagccgagatcacaccactgcactccagcctgggtgacagagcaagactccatctcaaaaacaaacaaacaaaaaacaaaatttttttttaaaggatgcttcattaatagaaggctggattacacagatggtatcttgggatttgagggatataatctactttgcttctccattccttcaaattgtggtgacaaatgttcatttatgtaattccccaagaacttctctgggattttgggctcccaggacttggttatttcatcttgaccaccccccaccacccatcaccccagcctcatttcagtcttgattttctgggcagaaccacactttagaagtgtggtcatgcctgggcacagtggcacacacctgtagttccaacactttgggaggccaaggagggaggacggcataagtccaggagtttgaggttacagtgagttatgatcgtgccactgcatgccagcctggacaacagaatgaggccctgtgtctaaaaagtaaatgattttttttaatagaagtgtgatctatgtcatctcttaaagtggtcccgggcccatccacacacagtgagcccatggtggttgctcattggccaaatctggtccaccaatatattttgttttgccgtgtagcattgtctaaaactattaagtagcttataacatttaaaaattagtgattcacatttggaaacgtctcttgaaaatgtgaaagatttggatcattggatcccaaatttccatagcatcagtttattagagctgagtagcagctacgccctaaagagagggaatgtgctccctaggttttgaccacagtcgccaccactccatattgtctccacctaggccatttaactcatctatgtacctgatatctgtagccatttcgtttgtgactctggttctgagctgcttgtcatttgaagtctattttctctcatccttctttgaaaaaggaactcttatccaccaacaaatagcactttggctgggcccggtggctcatgcctgtaatcccagcactttgggaggctgaggcgggtggatcacgaggtcagcagatcgagaccatcctgaccaacatggtgaaaccctgtctctactaaaaatacaaaaattagctgagtgtggtggcacgtgcctgtaatcccagctactcaggaggctgaggcaggaaaatcatttgaacccgggagctggaggttgcagtgagccgagatcgtgccactgcactcccgcctggccacagaacaagactccgtctcagaaaaaaaaaaaaaaaaaaaaaaaaaaagcactttgtatttcctgatttaacataggtattgactttctgaaatttgacagctagtacaggcagttgccagtgtctccttctatacactcatttattcactcattcatccctgcatctatttaccttatgttcattgagcacctgttatgttgctgataactgtgcaagtctctggagctagaaaaaaatgagcctttgcgtgcatgagccagtgttgctcaaactgaggcctgaggaacagtggtcccaagtgactgtcctggaaaaaggggttccatggtcaagtaagtttgggaatcactacatcatactccaccctttcttagacatgcacaatgcatgttattaagactgttgactttatgaagtagtccagtgaagagccatatttgtttcctccagcattattggtagcagagcccgtctattatgtaatttcttttttttttttgagaaagggtctcacttttttgcccaggctgagtgcagtggcacgatcacggctcactgcagccttgacctcctgggctcaagtggtcctcccacctcggcctcccaagtagctgggactccaggcatgcaccatcgcacccatctaattttctatttttttgtagagacagaaaaatatctttctctgttgcccaggctgatctcaaacccctagcctcaaggcatgctcccacctcagcctctcaaagagctggaattacagacgtaagcccccgcacctggctgtaatttctataaggaggagaagcttcctagaataacagtggttgattgttgaatacctatacttttttaaacaatacattcttaatgctttttgtgagttacttcttataatcctcccagcatcacagtgagataggcactcttacagagaaggcagccaggcacagagatgctgaggaacttaacccaggtcacatagctagtaaatggcagagcaaggacatgaacccaagcaccaaactgggttggtttatggcctctgcagcacagttagaagcaatatggaggtatgggagttccttgtggctcgctcatcatgtcaccccattagctctatgcaggtttggcccatgtagccaactgtggatctgcggttcctttctacgtttgcagcacaactttatttctccagggatgcttacaaacattcaaaaacaatggaacaatgcaagtggctgcagctgtggggaagaaacttggcttgtttcattacgtttcagccaactgggatctttggttacaagtgaaggttatttgatttagctttcacttgtaaaatgagtaaggttttggtttttttctgctgcattttggcatcttcctcttcagagtgacccctcactgggaaattttcttataagatccagctttttaatgctattttctagtttcattctagctcctgctctctgtccctatctgttttgtttttgtttttgtttttaagaactgtaaagattgctatttgttttcatttttggtttttgagttaccatgtccctctgatgcagcatctctgtctcttagcggccgtgggggtgaccaggcacaaatcgaaggagctgagtcgcaaacagagtcaacaactagaattgctggaaagcgagctccggaaagagatacgtgacggtaggctccaaaattgtgtttgtagaaaaacaagccttttatatttatacttttatttttttacccttacatagagatggccacagtaatgagaactgtttgtataatagaaggcaacggaagggcagggcctgggcctggctttgtgttttatttcagctcttctctgcagccaaccaagtcattatctattgtttcttctttaatgaaaaccaaggtcatactctgtgttagacaaaacagcagaagatcctatccattgtttgttgagttaaaatattgctcttgggattctgttttgcaggctttgctgagctgcagatggataaattggatgtggttgatagttttggaactgttcccttccttgactacaaacattttgctctgagaactttcttccctgaggtaaaagagcattgatcatattccgaaggtcgagtcttgaataataatgaaggtgcttgttgctgttgtcaaaacgagtgtttgcttccaaggcagctataatgtgcttggtacaaaaataatggcttaagtttgagcagagcagggaggagggtaattattaattgcattgattagggtataaaacagtgatgggtcactggtgattattctttgcccagtaacaaaaacctaggagggacagaagctcagagtgatgatttttgctttcttttactctcaatgtagaactgaatgtgtagctgggaagtgagctagtttatttaaaaatcaataaattgtgagctagccaatttgttgtgtttatctgcatgacttacattgcagtgactagattattcactattacttctcaattggaaaggaaaaatactactggtcaaaagggaggaaagtagacatggatggaattggagttgaaaacaggcatttttagccatgtagagttcttatggttctctttggtagtttttctttagctggtcagtttgtattgtcctcatttagtagacgtagatgcacgaactgattaattcatttgttctagggctctgaggagtcgtctacttaaccttttgggttgctggtcttacctatgttctcacgcctccattttctcacccactcactcagccttctccatttaccctcccaagtctttggcgaggtacactcatcctgcgtatcatcactgccatgtcctgataccccagctctgccatattgcccttcttttttgcggtatgatgaccacatagaggcccaacctcttaaacacatcaataccaatgatcacatttcaatctagacttctaagcaacggctgaaatctctccaggccaaaggagagtttgtatcaccttaccagaagcttctccggaacaattggccagaagcctagagttcagaaacccagacacatgcagtaagcaatttccagtttctctataatttagaagaggacaccatgatatgtaatgcggggtctggaggttggaatgcctccataaaacacctgccatattttttggtccaagccttagtgttataaatcaagaaggctgtaaataagacttcagctttttgtgctggtgaagtttgtttcctttaacttatcctccaagagtaccgaggcaccgagatctaccatttgccacctcatccatttctatggcagaacaccgcctggggaaaggaattcgattccccgaatcaggatgactgtgtggggcttctgcaaaggttgcatcacgagtcctatttctgagctatctgagatccccattaagaatttaaaagcaataaaataacggagatttttgactatcaacatgaatgctgtgtgggcttttacagttaatgattgcccttgagtgctgaataatctgtggcctgaaaaaagaaatgttcttatcttctaaatttggtaatcaagaacaagatagagtaatgaatgtaaaggaacactgttgcaagttgagtgtttccaaaaaaaaaaaaaaaaaaaagatcccaggaacaatgctaccttattttaggagaagagagatagttgcaaaggaggcaaactgatttaactcagtgttgtgtataatcttgaaaaacaactgggaaagtcataaaaattgaagtcagaagttgtttaaaggagagaacccaggaaaaaacatgcataaatttgtcagaaccctttcaagaagacctaagtcaaaactgattttataataattaagaaaagatagaacagggaaacagatcgtaagaagacaatgccacttaaatgcattccaggctgcagataagtcctggtattaattaggctctttatggattgatcagaagccgaatcctctaggcctggaggttgggggctgtgggggtaggatttgggtgttcagcacctacaaaaaagcaacaggcaaaatccagaggagattgtaggttctcaaaggaggccagggttctttgctctgcctgtcggttttggcttttaaagccttgctttttattttattgactcttctttgctttgcataaagtaggagaagaaataagggtaggcagaggatctaagctgaagaaaagggaaatttgaatgaaaggaggaagcagccttaaaactcagagagccacgggtccaggcgcggtggctcaagcctgtaatcccagcactttgggaggccgaggcgggtggatcacttgaggtcaggagttagggaccagcctggccaacatggtgaaaccccgtctgtactaaaaatacacaattagccagggatggtggcgtgcacctgtaatcccagctactcgggaggctgaggcagagaattgcttgaacccgagatcaagaccatcctggctaacacagtgaaaccccgtctctactaaaaatacaaaaaaattagccaggcatggtggcgggcgcctgtagtcccagctactcgggaggctgaggcaggagaatggtgtgaacctgggaggcggagcttgcagtgagccgagatagcgccacactgcactccagcctgggcgacagagcgagactctgtctcaaaaaaaataataaataaataaaaagaattgcttgaacctgggaggcggaggttgcagtgagccgagatcacgccactgcactccagcctgggcgacagagggagattccgtctcaaaaaaaaataaagaattgcttgaacccgggaggcagaggttgccgtgagccgagatcgcgccactgcactcctgcccgggcgacagagcaagactccgtctcaaaaaaacaaaacaaacaaaaaaacacacagagagaaccagggcggcacttccgtatttacgattaagaatcaacctgtttctcctgtctatttacatgaagttggttcagcagaaaaatattaagaaccagaaaatgcaaacctagggtctgggggtttttttggtttgtttttttggggcttttttgctttttactaggggaggatatggccaaaatagtttcaggtcttttgcttgggcttgcagatttgaaactatgaagcaaaattctctacagaagaaatttacttcacaagatataaaattagctcaaagtttctattattatcaaaaaagaagaaaaacttgaatgttttgagtttagagtctcattctgtggacttaaagtattgcttaacatacttttaaagtttaaccattgatttttaataagattgatgatacactataaaccctttttatattccagagctacctagcatttagaaaccagtggggtgatagcattgtggtctagtttgctataaattaggaataaaaccagtaatgataactgacacagggcacttactctgcacccattttattttcacactaaacctctgaggtgggaaccattactgtccccatttcagagatgaggcaagtcagacacagagaggttaggtaacacatcccacgtcatgtgaccagtatgtgattaaaaccaggactggaacccaagtagtttggtccagattctatgcttttaactaccccctgtctttcaatatcattgtgtattgaaacagtagatgctacttaggtaagacttgtaaaacttaacaacgtaatttagtctttatctttagaaggtaaattgcttgaagaggggtctgatatttgcataatcttcatcaatgaccccttctttaactcttaaatcacttcttctaaaacgtgggatgataccttcatctaccaaacctggaactaatgccatgataattattattcttagaggctttcggaattcagtggcgtttcttgaaagctgaataattatttattatgtattagagaatacgcagccaccataaacccaggggcgcttcagattagcaaatagtgtctctactttattaaaacggacttgggtattataacaaaaatacactcttcatttcctttggatgttatgaataataaaagtgtctccttcctctcagtcaggtggcttcacccacatcttcactgaagatatgcatgtaagtctctacgttttcatttttagcccagtgactgcctgatgttcatagtgttatcatcatcactatcatctctattattattactttgaatttttattgtgggttttttttggatcatgaattcaatattgaataattcattgtcttggaaaacccattgtgggtctactttctaactttaaacttatatatgattgtgtattatactatatatttttttctttttatcagaacagagacgccaacgacaagaatgaaagtctcacagctttggatgccctaatctgtaataaaagctttcttgttactgtcatccacccccttgaaaagcaaaagaatttttgtgtgaaggacaggtattagtccattctttgatgttttaaaagcctttaagaaaaaatcaggccgggcatggtggctcatggctgtaatcccagcattttgggaggccaaggcaggcaatcacttgaggccaggagttcaagaccagcctgaccaacacagcaaaaccttgtttttacaaaaaaaaaaaaaaagagagagaaatcaaacctgagtcccatattttatttccaaaccactatctgaacttggtatcttgagaacatgcacttttccaaaggctatttgattgggagtttatgcagccttctctccattttagatcataccaccccaacacaatttttttgttgttgttgttggagtctcactctgtggcccaggctgaagtgtgtgatcataggtcactgcagcctcatcctcctgggctcaagctaccctcctgcctcagcctccccaagtagctggaactacaggtgcatgccaccacacccagctaatgttttgttgttgttgtagtagagatggggtcttgctatattgcccaggctggtctcaaactcctgacctcaggtgatctgcctgctttagactcctaaagtgctgggattataggcgtgaaccaccatgcccggcccataaattcttaataaaaaaagcagaagtgttaatttttatttttaaaacatcccgaaactttggaagactcacatcttgttaccactctagtttaaatgctgaaaacacagaaaatgttctagagatagaagtggttagaatctaaacattaaaaaaaaaaaaaaaaaagctcccaacccaacaggccagctccctgccctgccagtgagcttccatggaaactcccatgggtgtccagctaggcctgcagccaatggttcacccagctctctttttcaacaggtgtctgtttgcctccttcctaaccattgcactgcaaaccaagctggtctacctgaccagcatcctagaggtgctgaccagggacttgatggaacagtgtagtaacatgcagccgaaactcatgctgagacgcacggagtccgtcgtcgaaaaactcctcacaaactggatgtccgtctgcctttctggatttctccgg

SEQ ID NO: 3450 - DNA, 11047 bp, Homo sapiens
gcgaggtgaagcggctgtgccatgccgagcgcaggaaggactttgtctctgaggcctacctcctgacccttggcaagttcatcaacatgtttgctgtcctggatgagctaaagaacatgaagtgcagcgtcaagaatgaccactctgcctacaagaggtcagggcaacctccccctctcccctttccccatccaggcccctcctccagggctgcctgtcaagtggaggaagagaatggagcccctctcacctgctttttctttgataccaaactagccatcccccaaacatagtgaggcttggcctgtttcagtgtggtttgaggaacagggcatagagctgggccttggaagaacttgatctttgtagagttttatatctcaagatggaatcaaaccctcagttcccccatctctggagcagcagcattttatgttgccccatgtaatatgggaccagtaagatcatcacaaaatggttacattagtcattttctgcaagaatcataaagccaattcaaacagtgtatgtaaaagaaggaaatgaattggctcacagaaagtccaggtacacctgcacacaggcattcagatgacaatgttagcctgagtgcctccagctctcaggtcaacctcctcctctacattggcttcattctcaggtctgtggtggcttccagcagctttcctcaggccagtgcagcaatcccagcttctaaggaaggacaggatgcttctccttccaaatactttcatggaagtcccagggaggattgcctttgatcagcttgagtcatatgctaaaccttctatcagtcactggaggtgtagaggtggagacaccctgatgggatggttgcttgcctttggagtgcagggtctctgccagctcttaagaagaagaaggttagccaggagagggtctcacacctataatcctagcactttgggaggccacagcaggcagatgacttaagcccaggagttcaagaccagcctggaaaccataatgagaccccgtctctttttttaaattaaaacaaaaaagaggactgaaagtgggggaggagtcattccagaaaccagtatacagccacccagaagtctcttgagaaggatttgctgtgtctctgataaagagagaccctccttgaatgacatcttcctgggctgcaaggtaactagagaaaacagactgattctcacaagtttaccctcctaagtcaactgtgaaatctggtggtgtccagcaggctgggccccatctcaaggctgacttagaagtgacaactttacaaagtttttatgggtagcttattgcataatatcttctatcaaattttccccacctgtagccagcctgcttctgtcatggccacaaatgagatcctctgccgcccagctaggtcatgagcaaggtggggtgtcttgtctgttttcacagttcatgatgacacaggtggcaccatccccatgttaggctgggaagtcaggcagccacagctttctcccatcaagtcctgcttgtgttccctgtgcccgtcatcccatcacctgcgattctgtgaggttccatagccttctgttttccatacaatgctttgctttggaaacgttgaagttttcctgtaaataacagaatacacaacaggtgcattctagcatcctacctgcactgcttctccataacttactatgcagcctcactggaggtcacaggagggtacaaggatgatcatttcactcctgttttaccactcccagctggttgatgggatgctagttccccttaaactttctgagatttcagagattcttagtacattcctgccttttaatttaaggggcccttattacaagggtgtagacagccccaaagcaaatgacttcagaacacactctgtttcgacattagtgttgcctgggatattcagagctcattaacttccaggatgatgtcactctgtgttaggtgggcatgcgagcccgtgaggcatggtttaggccgttgcacttggacagtcctctctgcagcacccactatctgcgtttcagggcagcacagttcctgcggaagatggcagatccccagtctatccaggagtcgcagaacctttccatgttcctggccaaccacaacaggatcacccaggtgagggcagactccttgttaggcctggcctgatgtctcggggttataggcaggcgtgtagaggttgggtggaccacgagcccaagcagacaagctcagtctgcagcttccatctccactgccctacttgagagtgaaatgtagctgaggacttaagtctgtcctcccaaccccaggtggccgattcaccctctccagttgtcatgctcgtgaagccctctcagccagtgctctgaccctgcatcagggttgagaacgtggggtctggagttaggcagccttgttttgtaatcctagaccaccactgacccactctgtcagacttggggccaatctaagcctcagtttcctcatccgtaaaatgggtctgttattttgagaatattatgagaacccatctcataggactgttgtgagaaataaatgataccagtatatgaaaagtccttagcatgcagatcctgacagatgttcagggcctaggaagacatagctgttattgctgccgctgctttgccagggtacacccctcagctgccattttcccattttgcccaacataagcaagacaagcataactgtcacttcagcctaaacagtctctagcaagaatatctgcaggactcaggccaaaactgaggggatcctccatcttccaagggtgttcacattcaaatccatatcacggaggcccttgggttgacagggcccttgccactctttgttaactgcagaaagctgttcagtaactgaggcctcaggttttctttctcttgcctgtgggaagtaccagcagtgccctcctctgcataccctgcaggggcctggttggtccctttggagagaaagggcctagggtggggacctcagacccttctctaatagatgtttttctactgctgtgtcctgccaagagggagacacctgcccccctccccaccgccagctctcctcccctgggtggggttttgctgccgttgtctgagaagacatcctagataagcccacatcctccaagctgagctgaaatgacaagaagcctattgctgtaaaactgagctgctttttagctcaggccaggatagcactttctaaccatcagaactgcctgggaataaaatagggggtgagttccttgccatgggaggtgtgcaggagtactgtggggacatcaaggagaggattcaggcatcaggtgccagctggcatgcagcctcgcctccctggagctgtgattcctggccatcagcggggaccacaccggccagctgtagggcttctgcaggggtgcaggtgagggcacaggatacatgcgctgcctaacctgagggtggcgctgctgttcagtgtctccaccagcaacttgaagtgatcccaggctatgaggagctgctggctgacattgtcaacatctgtgtggattactacgagaacaagatgtacctgactcccagtgagaaacatatgctcctcaaggtaaaactcccctgaggccgcacccatggagcctgggcttaccctctcaccttcttcttattaaaaatccgttttaaaaaacaatgtttcttttttcttaaacattgatacagatcttacggcacataatggtttgtaacctgttcctttcctgtaatataatataccgtagtcacctttccagatgtcattaaggctatttctacaatgttatgtgtaatgactgccaagtattctgttgtattggaacattgtcatgtaacatatcccctgtggttggatatttgtttgctaaacttcattgaacacccttgtagcagtttttgtgcacatctttttgtcaaggcaaacttcctagaagagaaattgctggctcaaagggaaaaacagaataaatctttttttttatttcaatagtttttggggaagcaggtggctttttgttgcatggaaaagttctttgctggtaatttctgagattttggtgcacccgttacccaagcagtgtatgctgtactcaaagtgtagtctctcacccacctccctgccttttccccaattctccaaagtctattatatcattcttatgcctgggcaccctcgtagcttagctcccacttataaatgagaacatacaatattttgtttttcattcctgctgttacttagaataatggcctccaactccatccaggttgctgtgaatgccattattttgttcctttttatggcttagtagtatttcatgatgtatatatataacacattttctttatctgcttgttggttgacgggcatttaggttgattccatatttttgcaattgtgaattgtgctgctataaacatgtgtgcaagtgtctttttcatacaataacttctcttcctctgggtagacacccggtagtaggattgctggatcaaatggtaattctacttttagttctttaaagaacctccatactagaaaacaaaataaatcttcaagcttttgctacattttgccaaagtgatcacaattgtttcatcagttcacacgtttcattccagaattgtcatatgtattgttttggaaaatctggaatatacagcaaagcataaaaaaatttaaatctctcacaatctcttcaccaagagttaacacttttagcattttcttttccaaggtggagtctcattctgtctcccaggctggagtgcagtggcacaatcatggttcactgcagcctctaactcccaggctcaagcgatcctcccacctcagcttcctgagtagctgggactacaggcacatgccaccacactcagctatttttttaaaaaattttttgtagagtcaaggtcttcctatgttgaccaggctggtcttgaactcctgggctcaagcaatctgcccgcctcggcctccaaaagtgctgggattacgtgcatgaggcactgcgcctggcctactttcagcatttttatgtacgtccttctaagttttttttctatgcttatatattttcaaaatttgcaatctgcatgaccatgtatccattttatctcatgtgactaaatttatttggctatgttatgctgctgtgaaataatgtgatttccataagccttccttagccattattccattgttagcttaggttgtctctaacttatgccccacagctgtagcactgacatgaacagccttctcccattctttatacacgctgcagagccccttttgattctgtcccagatcctcacctctcaatgttctggtggtttttcctttcttctccttcagtgtctctcctgctattctgagaatcccagccctgtgttggtgctcctgttttacatgtcttagcacctcagttaagtttgcagggctgagtggctttgagacttgttcactctggcttcgtcccaacatcagaaatccggagaagccactcacagttcacatatccctctcaccactggtgctttgcctgggtgattgctgtaactttccacaagctaagtcactacctaccagcccaccaagtagtcttaatgcggccttcaaattctccagccccccatacccggacttccctgccttcttccctctctgttccccaccctcttcaatctggccttcacatggttttgccacatggttagtttgtgttagtgaactcagatgccaccgtggagcactgtctgctcttatgcagaaaacgatgaagttcattctgcagaacaaaatatacccacagagtggctcacacctgtaatcctagcgctttgggaggccaaggcagggggatcacttgagcccaagagtttgagaccagcctgggcaacacagtggaacaccatcttgacagacaaatacaaaaattagccgggggtggtggcgtgcacctgtagtcacagcttcttgggaggctgaggtgagagaatcgcttgagcccaggaggttgaggctgcagtgagctgtgatcataccactgcactccagcccgggtggggtggggtagggaacagagtgaggccatcttaaaaaaaaaaaaaaaaccggaaatgcacccacagaggaagcaaccttagcagtaccctgctccaccctgttcgtgtcagatgagaaatagaggaatggagagaagtgactttctcatggtcacacagctgctcaggcccccttctgcatacatgttaaaaggagcaaaacaagccagcattcaggagactattagaagggttggaatcaagaatgtcaacctactcagagggcaaattcaggaagagattttttttaaaaaattaaagtcaccagcggctccttggaaacatttacattgtcctttctgtggagaaagaggtggatactttcacattcactaactgttcaagtattcatcagatgcctgtattgtgccccaccctgggatacagcaaggagctaggagtagccctttctctcagaaagatctaaatgcggaaatattgtcaacagatcctgttcagctcctgtctctgctgcttcgctgtgtggccttggcgagctgtctaacctccctgtgtctctgattcctcatctatagaataaggttattgcagagaacttgactcaagagaaaatcatgcttattaaagctctgagcacagactctggcccatagtaagggctgaagaagtagctgctgtagtaatacactaaatttctggttgaaattagacttacatttcctgcctttatttgaagatgcatagattttcataatataatgtgtgtctctacagggtgtgtgtgtgtgtgtgtgtatgtgtgtgtgtgtgtgtgacacatatacagacctacctttttgtttttaaacttttccagcagatgtgattagtttctatgctctgccctcttctcattctaggtgatgggctttggcctctacctaatggatggaaatgtcagtaacatttacaaactggatgccaagaagagaattaatcttagcaaaattgataaattctttaaggtcagcaactggggctggggctgggcagagggctgaggttaccagcgccaagatgtctttgggggaaagggatgaaatgagccagaaaactgtcaggtttttttaattgagctgtagctccaaagatcccaagagtaggaagaggaggagaatagaatggcagggcctccagctgccattgatggaggcatttatgccctagaaggctgctgcatgaaagccacacatcgttccaagttgcaggattcagctgggatttggctaggaggaggccctgtgattcttttctgaatgctgcttttttttttttttcctgaagtcccttgtcacttaaagaggtacatcccagaagacagcacctgctctaatttccagtataaatcagagctcgcagaagtagaatgattaaagactggattttaaattggttcacatttgcaaaatcacagcctctcacctggtacaccagggaccacctcagcttgcccttacctctggatagaatgcctcagcaacgttcatcatatactcactgtgtttcagtgcctctgagagttgatcttttggccacagatctttaaaaatttgcagttaaactaagcctcttagaattttgcaaaggaatcttacactttggaattaacttcccatgttctcagtttattctagcattgggcactgccgacatggagcaagcctgagaggtcagtcatgggaaagcccagattaatattcacagcagaactcagtggtgtgacatggagggcattagatcgagcctgagtcccactgactcttcaaggttaaggaaaaggaacataagtcactaagaggaatcctgtgccttggctttgcttgttttcaagggtggaacttttacttttctctagagttgccccagatgaaaatagggctcattttgggagacccttgcaaaatcttccctaagtcagcatgaatgagatgagggtagaagagaaatacaacctctcccttggcaggcctgggtgtaagtctggctctgccacttaatagctggatgacgttgggaaagtcactaaatcactgaaactgagttccaagtctgaaaaatatgaataccaagggtatcggctctgtagcgttccctggaggattcagtggggttacatagatgactcagagccctgggttgtataatcctggcttcttgacttctagctggtctgactttatgaaaaatcacttaagctgtttaagcttcagttcttcttctctgaaatgggaatgataatagtgcagacttcacagggctattgtgtggcttgagatactgtttttaaagtgcttggcatagtacctagtgcatgagaagcacataataaataccagcctccccgccatttgccctggtttttggtcgggagttgtttgccctctggtgttaggtattattacggttttaattgctttgaaagtacagactttctcaggaagaccaacagcgctcagacacctgcttctagcctagaaatcataacagcaaggatgctttaagccagggaagattcgagtggaaaggaccctgcactgggcagccatccatccagtccttggccttcacacatgctgttggctaagtgaccttggacaagtcactttgcctctctgggctccgttgcctagaacatagagttggttggaggcaggggaggacctatacgctggctagggctccgtttggcttcagagtcacatggtagcgtcatcggaagcagaaactaggggtcggcccccaggcacacacagaggcctgcctcccacagtggggtggcagcgaaggcagccaccccaacccctcctcagcatctcacgagctgtgtttgcttcctttgcagcagctgcaggtggtgccccttttcggcgacatgcagatagagctggccagatacattaagaccagtgctcactatgaagagaacaagtccaagtgagtgcctgccgtaatgtctctcggctcccgcaaggatgcccagcccgggcagagagccgaggggccacttcagcccctcctccctccccagatccctgggcaggtggattccatcagaacacaggtgccggccggaggggagccgcgagggtgctctgagcccttttgtatccgccctctgctgccagcttcaaaagggctcagagcacagccacgccccttgtccagcccagcagtgactcgcatgtcctctcagcaggacagcaggagtccacctcgttccctgaagagtggccagccctcagtggtccagtgaggagaggtggcgttgttcctcctcacactgatcctctcaggttaggtgaccgtgcgctaagtccatcgtgcagtcgacgtgaattgggtgggcagcctcaccttcggccgctttataaaccacaattctgggtcatctatgcaaaggcctggggtgtcagtgcttcactgaagttggggggctccaacctctgctgctcttttggtctctgaggctgttagggaggttccttctgtgtgcttctcgcccgaagttatggcctctccacacagaggggaaccagccgtcctttagtcaagggcgagtgtgttggcatcttaagaagatatgaatggagtgtccttgaactgcatccgcctggagcctctgcgaacaagtgtccaaaggaaagctcatgtagtcgcttcatcaccctctggctgctagcgcgtgacggggttttgcaggaaaagcagggaatggagaatgctgaactcattcctcacttttccctgcctgacttctcgaccagctgaagctggctgggagcggaggctagggaagtgactggggttgggtgtgaggggccgtgtgctcccctctccacaggtaactctttgagtgatattgaagggaggcctgaggaaggctgtcactgttctaccattcttgtgagaaccatatcagggcttcttttgaaatagtaaattctccccagaatctttcttctgccttgtctggtgctcatgcttcatctgtctgctgggtcaccagcacctgagggtagaagagggtgaagggagtggtcctttttctcttggggatggagagtgaagatgttcattcattcatttcctctctgacttaggatggttttcctaatgacatcttttcacaaggcgtggaaaaaaggcggagggaaggaggaaagagggtggaaagagaaggagagaagggggcgagaggtagagggggtgggtggagggagggggccaccccccacgtctcagagtggccctggcttctcccaccacagtgtgcttccatgttgccagggcactgttggaaaagaggcacagtcacattcatatttccgcaatcccagcccaaaggccccccaaagccagcttcaaccgcagagtgtctgtgctgtcagagtgggtaggctggttttggaggttgcccaccttgctttttctgtgctcagattccatccctttgtagtcctagagaggctgtgttcccgcccctctcatattactggtaagtattatggaccaggtatctggaaaggcctacagttggatcctagatgaggctggcaccaaagaggaggaggaaggactgttccattaggcctgaagctcccacagtgttggacttagcaggctttcttgctgaggcggctgggataccatttggtgtcacccaggggagttggccacgtgggctgagcaccaggagcagctaatgcctgttccacccaggcgcctgaggctgggaccctctccgaccccataattttctacccaggtggacgtgcacccagagcagcatcagcccccagtacaatatctgcgagcagatggttcagatccgggatgaccacatccgcttcatctccgagctcgctcgctacagcaacagtgaggtg

SEQ ID NO: 3451 - DNA, 534 bp, Homo sapiens
ctggcacatagtagatggctattaaatagctactggatgaatgagcctcttttcctctctgcatgtctctcactcttggtctctaccttcttatcgactggtacctgacactgtcctaggtgctgggaatgccaaaatgaataagacgtaatgctcagccaatgtatgttgaatgaatgcattggtttgagtcacatagaggcaggttccaggctcccctcaagaaatcagcttcgggccaggtatggtggctcatgcctgtaatcagtcccagcactttgggaggccgaggcaggtgggtcacaaggtcacgagattgagaccagcctgaccaacatggtgaaaccccgtctctactaaaaatagaaaaattagctgggcatggtggcacacacctgtaatcccagctactcgggaggctgaggcaggagaattgcttgaacctgggaagtggaggttgcagtgagccgagatcgcaccgctgcactccagcctggtgacgaagcaagactccgtctcaaaaaaaaaaaaaaa

SEQ ID NO: 3452 - DNA, 764 bp, Homo sapiens
tctgagatggagtctcactctgtctccaggctagagtgcagtggcccagtcttggctcactgcaacctctgcctctcgggttcaagcgattctcttgcctcagcctcccgagtagctgggactacaggtgcgtgccaccatgcccagctaatttttgtatttttagtagagatgggttttcaccatgttggccagtatggtctcgagctcttgaccatgatccgcccacctcggcctcccacagtgctgggattacaggcgtgagccaccgtgcgctgagtgatacgtggttccctttaacttcgcacatggtaaaatcagtttctttccatgatctgtttcacagtctctgtgaagctacctaccacaaagaagtagtgagtgatgactttctagaatctaagtatatggcatgtatttattataagtaaaacattaagtttgctgattgtttacttgtgataaacaattattgtgaactttatttgtgctggacataagtgtctgttttacagtgaaattccattatagagggttacttggtagagaaatgcaaattgtagttggtcatatactaaaatttgaactttttacatatcaatacttacaaataggtgtttattttcccacaaaactccagaacatttaagagtctcgggtgtttaaatttgatgagatttacccaaacaaatagtgaacaaaaggtttatgaaaataagttatgaaactaaaatacttaataaacatccagtgacaataaaaat

SEQ ID NO: 3453 - DNA, 443 bp, Homo sapiens
tttctttccatgatctgtttcacagtctctgtgaacctacctactcacaaagaatagtgagtgatgactttgtagaatctaagtatatggcatgtatttattataagtaaaacattaagtttgctgattgtttacttgtgataaacaattattgttaactttatttgggctggacataagtgtctgttttacagtgaaattccattatagagggttacttggtagagaaatgcaaattgtagttggtcatatactaaaatttgaactttttacatatcaatacttacaaataggtgtttattttcccacaaaactccagaacatttaagagtctcgggtgtttaaatttgatgagatttacccaaacaaatagtgaacaaaaggtttatgaaaataagttatgaaactaaaatacttaataaacatccagtgacaataaaaat

SEQ ID NO: 3454 - DNA, 8487 bp, Homo sapiens
gcggccgcagctcaaaggacaccgagagggtgccagtgcgcatgcgccgccacttccgcccgtgcccggccctccccttccttccgcctcccggaggacttgggtttctagtagtaagagtccggggggcattactcacggtctccccgcctcctcttcatcgtgattgggctgtcaaagtgatgttggcaagtagattggctactgcggttgccagttctgtttcgggccctacttatactgctctgtggggcggggacgaagagtcaggggctgaggagcgagttgcggtagttgctgtgtaccatggtctcggaggtttctgtcccgcggcccgttaggtcctggtcgggttttcagcgaagcaggccgctcccctgcgtttcccagcgggcgtgctgtgccgcccaacaggctctgcctccaagtgccaaaaactcctagtaaagtttgcgcctcgcccgccgtccacaccccagcggccctgacgctgtcccctccgcgaccctcgcctctggaaaaagtgacaggcaaggccacgcccccgcgagggccggcctggagcccgcagcccccagggcctgggacggtgaggggcgtgaatgcggcggggggcggggccgttgccgggggagggggccggggcgcatgcgcgctgcgcagcggggctgaatgtttcccaagtgtttgaaactggtatttgggttttccacgttggacaagtgcggctcggcggccagcggagcgcgccccttcccgctgcccgctccgctcctctcttctacccagcccagtgggcgagtgggcagcggcggccgcggcgctgggccctctcccgccggtgtgtgcgcgctcgtacgcgcggcccccggcgccagccccgccgcctgagagggggcctgcgccgccggccggggcgtgcgcccgggagccaccgccaccgcggcccgcgccctcaggcgctggggtccccgcggacccggaggcggcggacgggctcggcagatgtagccgccgggccgaagcaggagccggcgggggggcgccgggagagcgagggctttgcattttgcagtgctattttttgaggggggcggggggtggaggaagcggaaagccgcgccgagtcgccggggacctccggggtgaaccatgttgagtcctgccaacggggagccagctccacctggtgaactatgtggaggactacctggactccatcgagtccctgcctttcgacttgcagagaaatgtctcgctgatgcgggagatcgacgcgaaataccaaggtacggccgggtgatggatgggcgggggcggccgcctccttcccggcgggtccgggcgcgccgcggagccgggccggtcctgccgtggaccggaggaagcggccggctccgcagcggcggccctcggcaggggcaggaacaaaaggtctggagcgcctttgattcgccaaggtccttgtgtgcaaagcccgggacacggaggaggaaggaggcgcgagaggtctcgctgcaaggctgcgcgaccaaagcgctctttgtagtgaagtgatgaggcgggtgctgcgggggagggggcggcgggtccaagccgcgtcctctaggagggggtgcagattacggcgcgagatggagggatgtgccggcgcctggggctatagggcgccgagacggggctgcaggaggagggcggctgtgggccggggttcccgcggacccggtgcctcggtcccgggcaacgccgttcctctggcccttcttcgtcgccccccactcagtcccgaatctgagtgttacataaagtaccgggtagtactccgctcggggtaggtcggccgcccccgcccagccccctccggccctcacttggagctggacaccgagtaggggccgactgcgaggggcgacgccgccggttgtagtttgcggaggacgagggcttttctctgtgtgccgtagggaagggaagggaaggggaggagcggaggcggggaaggcgcccatctgcgctgcgctcgggggggcgcgggcagatcgctggcttggagaggactgtggcaggtgagaggacctgtgcgtcgttctctgcagacctggccgccccgggtgtcagagagaggtggcgagttcgtgtccgccgggaattgttggctgttggggaaactttcctgcgaggtcagtcaaggctttgggggctctgttttgaatgtggatcaccactcggagtttactaatgtttacaaggctgcgcagtagggaaacggaagagttgggtgggggcaaaaaaaaaaattgaccgctatccccgaaagtactagacgcctctgccgggaaggcgcccctgcgcgttctatccgagacgtagcttcgcagcgaattttataggaacttcattagcatattatggaacgtcccgcctcagccccccagtagttggctgtgatgtccttcgtggaatgtccttatcattcccctgcggaacgattggtcgctgaggcggatgaaggcgggcctagcgcaataactggtatgggtctgtgtttccgctgtcttcttttttctttttcggggaggagcggggtggagggtggacgagttgatttgaacgtcttcgggtcgctcggcctccagccttggattggttcttctcgctgctggggcgggccgtgctcttccgccctgcggtgtggttggttctcctcctggcctccgccctccaaatcggcgattcccataggcggcggctctcggggtgcggggcgagtctcccgctggcctcctccccattggctggaggcctggcgggtgtcgcccctgcccctctccccgctcagcccggccactttcgggcgcggatttatagcagtagcagtgatcccgggcctgtgggctcggggccggggctgcagttcggaccgcctcccgcgacccgcggggccggctcggagacagtttcaggccgcatctctgctgacccgagggtggggccgcgcgtggccgtggaaacgtgagtgactggggctgcgtccacgagggggaccctcggcgcagaaacttttctggaaggtgctgtcctcgggccggacgggccccgtggggtgaccctggggctccggacggaaggaaggcaggggctgagaccactttgatcgttcgacgatagaaaaaagtagcgcggggcggggtgcagggttccagctgtccagacagcaaagttcatggagccactttgtcctcctgtcgttgctggggagagcctggcttgctgcttgcttcatgttcacctagggtgatgaactttttggcttcaggaaagatcacagtcctgcccccccgggagtactggagcggcgcagctgggagcgccgagaagcgagcgaatctgtcgcaagggtcacagctccttggacttcggtgtaaatgctgagctctgccgcgtagttctgaaagacttccacagacctactctgtaggaagtcaaacgtcttttgcttagtaggcatcagttgtatgttaattcataaacttggattataattagtttgtcgatttaaaatggtgtttgaggttgcttgaattatttttcaaacattatcataaaaatacccacccaccccctgggaagttcgcttcataaagaacttcagtgcaacccgtatgtaaaattaaaatacatttaaaataattggacaaaccaatttaaatgttgctacaaccccatttaatctgtaaattgcatgtgctgctgctttccatggtaatgttggtgtggaatatgtttggaaaaaaggcagtagtgtctgaagctgagttgctggcattgaaaaagcagagtgtctggaaggatggcttcctatttagcagtggtgttgttcctgtttataaatatttgtacttagtggctttgttgataaaatactttgcttggagtatcaaagaaatattaggtaacagaaatacttcttggtaattttgcgatgggatatctgtttctcttgcccacaaattaggcttcacctggatggaagcttgcttgtgatgtaaaataacttctgtgttattaaattttaaatttatatgatacagttttctgtgaaatgacaatattgtctttagaactttgattactgatgaaaagaagtgataccattttgtaaccctaaatccatttaaaaataaatggtacacatattttaacattatgataaataagttgaataaattggtattacttggatacgttgaacacagctatttatttttataattaattactatatgagactagggctttcctcctggtggcaggcagcctgcattgttcctctaggagtcttcaaagctgtctttagtttgagaatatactctggaaaatattaccatttagagaagcttcagcgttggcctgagttcttatgtttactctagtgttaggtatatgtcttataactatttggagataagatctggaaaggaagggggtaacattttagacaatccctcccactctcagcccctcccctagtttacaagtagtattgttggccaggcacggtggctcactcctgtaatcccagcaccatgggagaccgaggcgggcggatcacctgaggtcgagagttgggagaccagcctgtccaacatggagacaccctgtctctactgaaaatacagaattagccgggcgtggtattacatgcctgtaatcccagctactcgggaggctgaggcaggagaatcgcttgaacctgggaggcaggttgcagtgagctgagatcgcgccattgcactccagcctgggcaacaagagtgaaactccgtttcaacaacaacaaaaaaaggtagtattgttgccttgtttaaagagactgcaaaaaggttttaggagaataatctggtactgtttaatttaatggttactgtttgaggaaaaagaactctggaatttctgtgtatttaagtagcctttttagcaaggctgtttacttcaactagattttttaatagcttttgtttcttgagaaattgcctaattacacttgccaaattacactttaaaatcatatacactgtcctctaacatgcccaggaaggtttacatttaaatactgaagaggttttcttttgtttttgataacattttaaagtccattgactttaacagatgtgaagatgtttttgtttaagcagtagatgcaaaagtaaaacctaccagcttcgctttaaagcaaggctagtgcattcactgcagttaaaaaataataataatagcccatcacagtggtgcttctgtagtcccagctactcaggaggctgaggtgggagggtcccttgaacctgggaggtcgaggctgcagtgagccgagattgcaccactgcactccagcctgggcgacagagacggaccttgtctccaaaataataacaagtcgtaataataataaagcaaagctaggttttctggattattgtggcagaactgttcttgctgtcactaatacagagggataacatgctagaataaatgtggggactgaaactgaggacctaagtcacaaagtatcctggacctttactgttaacccggttctttaaatcatagagagctattatataaatttatacacattctctcatttaacagggtattctagatgttggtatattaaaataaagaaaataaagaccttttttatttgaaatattcaaataatttataatatattttattaatgtttgtatattgtgtataaatgtaataaataccatgtttatataatgttatatgtatattaataattgtattcaaatagaaacatttgagtaaaaatgatggcagtatagacatagtcattaatagaaagtattaataaatgttgggtcccgagcactgcacctcatttaaacgtttcctcttaatggcttcgggcgttgtcacccgtgcgtgcctgggaactgttctcaggttccctggggtggctggagcggctcctgccgctgtggaagctgggccggcatttgtgttgtgttgtgttgtgttgtgttgtgttgtggttagcacaggaacagataggcccgggagagcctgtggctggtgggctttgttctgggcaagccgtgcgctggcccctaggctccctgccagccctctccgtagacccgtccggggccgtgtgggttgtcccggtgtcctgctcgcgagtgacgcctgtccttcttgcccccagagatcctgaaggagctagacgagtgctacgagcgcttcagtcgcgagacagacggggcgcagaagcggcggatgctgcactgtgtgcagcgcgcgctgatccgcagccaggagctgggcgacgagaagatccagatcgtgagccagatggtggagctggtggagaaccgcacgcggcaggtggacagccacgtggagctgttcgaggcgcagcaggagctgggcgacacagcgggcaacagcggcaaggctggcgcggacaggcccaaaggcgaggcggcagcgcaggctgacaagcccaacagcaagcgctcacggcggcagcgcaacaacgagaaccgtgagaacgcgtccagcaaccacgaccacgacgacggcgcctcgggcacacccaaggagaagaaggccaagacctccaagaagaagaagcgctccaaggccaaggcggagcgagaggcgtcccctgccgacctccccatcgaccccaacgaacccacgtactgtctgtgcaaccaggtctcctatggggagatgatcggctgcgacaacgacgagtgccccatcgagtggttccacttctcgtgcgtggggctcaatcataaacccaagggcaagtggtactgtcccaagtgccggggggagaacgagaagaccatggacaaagccctggagaaatccaaaaaagagagggcttacaacaggtagtttgtggacaggcgcctggtgtgaggaggacaaaataaaccgtgtatttattacattgctgcctttgttgaggtgcaaggagtgtaaaatgtatatttttaaagaatgttagtaaaggaaccattcctttcatagggatggcagtgattctgtttgccttttgttttcattggtacacgtgtaacaagaaagtggtctgtggatcagcattttagaaactacaaatataggtttgattcaacacttaagtctcagactgatttcttgcgggaggagggggactaaactcaacctaacacattaaatgtggaaggaaaatatttcatttagcttttttattttaatacaagtaatattattactttatgaacaattttttttaattggccatgtcgccaaaaatacagcctatagtaaatgtgtttcttgctgccatgatgtatatccatataacaattcagtaacaaaggtttaaagtttgaagattattttttaaaaaggtaaatggttaaattttacatgacagatattttatctattggcctgttccccaaatggccattttaaaatgcttgggtacacttctcttaagtggtctagtcaaggaacctcaagtcatgcttttgctatcaccaatcatagtgtacccatctttaatttatatcaggtgtataaatgtacatttccaaatgaacttgcacttgttatattataattggaagtgcagtcagcagatgctgttgtgaagctaatgtcacaattatgtgcaaaggtgtgcttcctgctgtatgtgagctgtaaaaatgttacgtgaagaaataaatgaaacttggccagtttgttcctctagtagtatatttaattttgacataagtaacttttaaaatttgtcttaaaaatttatacaccagcaatttagacaaagccttaagcaaattttgtattattgttctcacttattattaataatgaagtagaagttacttaattgccagcaaataaatacgtgtcaaaaaagaatctgtattcagaccctgggtcaggaaattactgcccacttgtcaagttcagcccaccatctgtttgaagattatatgaagtttaaattctagtgtccataaataaagtttcagcggaacacagccgtgcttatgtgcgtatgtattgtctgactgcttttgcaaaacggcagagttcaatagttgcacctgaaaccatttgacttgacaagccaaaactattttctggccctctgcagaaagggtttgctgacctctgatttagactagcatctaacattgatttgcccacatattgaaagggtcagtggagttttcatttattattttttatttttttgagattgagttccaggctggagtgcaatagcgcaatcttggctcaccgcaacctccgcctcccaggttcaagcgattgtcctgcctcagcctccccagtagctaggattacaggcatgcaccaccacgcctggctaattttgtattttcagtagagacgcggtttctccatgttggtcatggctggtctcgc

SEQ ID NO: 3455 - DNA, 514 bp, Homo sapiens
aaaaaaaaatcacagataagtacttaaaacactcaagatttgggatttagatcatgattagatacaatagaaagatcctggaatcccgacatgaggacaaaaatggtactgaattctttttgaaaaatagattactgaaaagcgatctaatatagaacagttgcttttacttagatgttcaatgcatatttgttgtataataaccaagttattacagttcagataaagggtccaaagtgttttcgttatgatataatactttctattgtaaactggactaaagaaacgttgtatgttcaaggaagtgttgagcagccatggtgttcctgggacaggctccccaggtgctgagagaggtgctgcaggagtcacagacctgcaggcacgcacttgccagtgactgggacgttggctggtggttctcttttggtgtgattagagctatgtgagttgtctcaatacttgagactgtcggtggttgccaatgctgaataaagcatttatcaaagtaaaa

SEQ ID NO: 3456 - DNA, 1460 bp, Homo sapiens
gctgttcagagtgctatagttaaggtggtgtcagcactttcaatataaagccctactttcataactctacttacactatgagttttcaaaaaggtgtaaatggaatataaattctttttcctgtagcccaaaattgctacatggggtcgcagcctagtgtttggcttgtttctttttctttttcatttcttgcttttcaaaacttatatcatctgagaataggtagatagttcagctgctgcattgaaggcttgcaaactgctgaaatgcacttgaatttaaaattgtaatgcatctgttttctcaaacatagtatgataagaggattttcagatagcaaatgcccaataccagttcttcccctctgacatgctgtaacaaggaattaggagtgttgtatgctgcttcttccttcaacaagtgttctccaaaggcctatttaataatttgattgtaactaggaactacatattattcacattactttctacttataatgtttcttcctatattttttctttttatgttttatatttgagtccaatacctagttgtttttagggcagtttcacataaattatcttatttgaatgatctcagctgaatcatttaaaaacaatcctgggtagcagagtaagtgggtctatccccacttgacagaggagaagaataaggtacaaagaagctgagtgatttgttgaggtcccagtggagtgtcagacctaaacttccagtttcccaattacttaaataaggttcttctcatcagaccctctttcctcatctctctactaaaaaactacagtgaataacttccactgtcatcaaatagaaactttctgtgctggtttcccctaccccacctttctgtgcttgataacagaagctgttgggagccccaccttcagtcttatttgtccttccttgtgggttttctttggcagttgaatttattcctgctaaatgcagaatgatgcctgaaagtgttgctgcaacaacttatgcacacttccatgccaaccgtcacccttctaaacctttttttcatccctgagaactgcagagcttggtctttgtgcagccttcggattaactgtgcacagtggcttttccatgttttccctgtttgccttttctggcaggcatggatgtgtaagctgtgccagcatttggcctgtagtacatgtcctaaatagttatttacacagtttgagtccattttagtcaactgggtaaataacagccctcttcaaaagatttataaatccataaatatgtctttatacatacccaatagacagaaataactcaatctgtcaagaacatatccaaagaggtgtttcccccacagacaggagtaatacatattttaaaactttctctgacatattatttttactgcatttcttttttcctcattccttttccatttttaccacttcattatggcacctgtggtt

SEQ ID NO: 3457 - DNA, 405 bp, Homo sapiens
tggggaattttgaatgactgataatttgctgaattagtagctgttgtgatcagtgaaagagttttagtacacatttttacctaaacattaaaaaaagaaatacaaaatccatggctgggagcagtggctcacgcctgtaatcccagcagtttaggaggccgaggtaggggggggtcacaaggtcaggagttcaagaccagcctggcccacatggtgaaatcccatctctactaaaaatacaaaagttagccagacgtggtggtgggcgcctataatcccagctactcgggaggctgagccaggagaatcgcttgaacccaggaggcggaggttgcagtgagccgagatcatgccacagcactccagcctgggtgacagagcaagactcccctctaggaaaagaaa

SEQ ID NO: 3458 - DNA, 5227 bp, Homo sapiens
attttcttatgattttccctaaaagaaaaccaaattttctactccacctcttcctttcctatcattccacttattgttgctgctttgctaacagccagcttagtaagccatcacacaagttagtgtgaggcttggttttaaaatagataacagagaatcttgattaaatagtatccaactttgtagcataacacagctaattcaggcaatgacatagagatgataagaaacaacatggtttggtagagggaacatttgatttagactctgcccatttttagctgtatgacttacataagtcattttgtgtccaagcctcattttctcccatatgaaaagtgaaggggttggattaaatgactaaaatccccttccagccctatgagcccaatgtattatgatctctgctttgtttccttcttaagaggcttcctactataaaatgtgacctatttacattttaagttgaagtagcccacaataatgaataatcaatttagatttttctcatctcctttgggagaaattaaattcaagcctctattcatttgatgttttacaacaagcttcaaagttggccatgttcattcacagtttgatattttgagacaccaataaaagttttttaataaaagttcccttgacttaaactcaccttcctaatagaagtagtgatttggctcacggaaaaatgtttccagagtcaacatgagaggactggatgaacctacagcctcactcaagctgttgcatcattgctgctgtagcaacagagccctctctgaatacccaaaacacacaattttctccaacaattctaattgcccacccagtatgggaatttgagagcctttggtgaataaccttgatcactcttttgaaatttggtacaacacttgcacaatcacggcaactgtttgtaaatatcttttcttctccgccagtatgtagacatgcacacccattcacaagtaagcccgcaaattcattttcacattttcctcttggtttgtttttatcatgggtatcacattgcaggaagagatgctctaacttacaagaatggaattttctgactatcattgccctcttcaaggcctgattagtttgtagggtggatgggatacaatgcatggtctacaaggtccatgtcaccagccatgatctttaaacaacctcttgcactttctggcactgctgcaatggcccatggtggacacctctgctgtttgtccaaacttctgctaaatagagtagtgttggtatttgttgtgttgtgaactcctttgttgtcagagaagacttcagctcttcaggtttgcaagggcaagatgtaaagctaggactgaaaggattgggttttgtttttcggccggcttttttccattagtgcaaaaaacctgatgcaagggcagcaagataaacacaatttcttcattgacccagataagaacctgtagaaaagtgagagatgcccctaagttcctatttcatttatcctaaataatatcctgaataactactgatcagtttttttctatgtccagccttgcttcactttccaacctccaggccaaatattcattttgatattttacaaaatccttctggtttttacacagggcccttttgtgctgagaataaaaccagctattggaacagacctcactgctttgtagagtcagaagttgacctagagaatgggtagcaacaggtcctcagtttctctggagacacccccaatccttgggtgagtgttgaaacctgacaactgactgttagccttgtcatcatcctcactggagatggagatgttgcagtcggagcctcactccttctggggcactgtttcttctcatggcaaccattttgcctgcctggaaacagcctgttgcctttgctagggggcaaatacacacactagccaaggaagttggtccagcacatctctgaggtttctcccccatggacccatggagcgaattccctgagataaatgatcagaaagttggctgtctggtggtttaatactccataagagttacttcccttatagaaagtcatcctttggcatctagatttttctacaaatcaccttaactccctccctttctctttctcctggaaaacctcagcattgcatctccatgttgcacaacacagatcagattatctggtcactatagagatttgtatataaaaaaactacttttttgaggattttgtatattgtttttctatttgttttctacagcttgaggaaagagctggcaaactgtgaatctaacttgatcttgttgccagcagatatattttggcttcctggtaagagtctgtgttaccagggacaatatattgccctctgatcagtattgcaccctaaatccacaaattcctccagcccagtcttacatttttttaaacaaatcccctagcttgtttgctattatttataaagagcattagaaaatgtatttatagacctggatgttatatgtttaatattaatttagcctttaataatgttataggtttgtaactattcttcagaaattataaagaactcagtgtagactgaattaatctatttagtatctgtaattttgcagacatattttcttacagtattttctatgtaaccacacatgtagaattataactaattagagcacaagaagtttcttcagcaatttagagctaccaattgtttcttgactatatagtcacatttgacaaatttaagaacccagtctttagtgatgcaataaacaaaatgaaccattaagaacaaggaattgcttaaatcccttagctggtgaggatatacatctaaataattcatctttctaactcaaggaatggtgctgattttttaaatgtttgacaccaggccttgtttttccagctgagcattctcattttgcttttctctaagactatcaaagacaaggtattaatagtaggattattcctagatcagaatgtttcatacattcctaaaggtttatgtggaaattggcttaggaaaactttgagtagcagagactgaggatgagtgctagagatgaaatcaggacagatttgttgcagttaattcttgccaagcaaattagtggtaaatgtcacattgttatgtgaattgagcacatatttttaaagaaagtttacaaaaaatttttagaaccaactatgaggcaatactgtatcactgggggctgggagtgggggcttagaatcatactgaaattgtttaaaagcagcccaggtagtttctgtcctcaggtgaataacagactatataacttccccgaaaggtaaaacgatagccactgcagagacgaggtgtcttccttccaccaaatactttctgagatggtggtaggagtagtatttttaccgtggtttaaaaagtagtcagttacatagaaagtgtattggtatgtatttgaacctgctcttcattaaacaaacagattagatgtaccctcgactggcaataattgtatctattttcaagtacagctagctgtcaaagcatgaagctcttgtgtatacacactgacacttggttcacgcatgaagaacagtgcctatgcactttgtgtagctataatgtaggtatctaggtgtaatttcagtgaaatggtgtatagatgtattgtaatttaaatgtatatgttatttttggctattcatctaaatgcagtagacatgttgatcggtgttttgcaaacatttctttttccttcttagataactagtcgtgaatcatttctcctctttctcagtgtggcttgggaatatatatgagtgaagaatttatctgtgaatcctttgtactgatgattgtttgaaagtctgtgtgtgtccagcacctttgtaaatacacaattcagagcagggatgggctgggtgtgtgtcctggttcttagtgaaaggtcatctcatgtctgtttaatacatggtgaatgcaactgtggaacttttgattacctagacttaggtaggtttagaatgagaacatccatctacagtcctcctttgcttggtggattgggctcagaggaacaaaaagttagtctgactctgtgcatattagcatcatgtctttagagaaaggtcagcctctctggttgccaaatactcatcatgatgctcatgacttaaaggttctgaggagccttgtctcccttggatttttgagtcagggtacaggaaaaaacattgctgactaactaactgcaaatgcatctgcaggtgaaaccctacgaaagcacagttctggctataaacttcagagttctctgtaaaaaacttagagcactagaagcacaggaatagtgagtgtacagcttatgcggttgtagaggggcaactgatgaacacaggtcccacatatatgagggagtatgacgttctctacctaatatgttctgtgtgcatgttttgaatgattgaagatgggattaactaatgcaagtttacagttgcctcctaaaacacacattctgtataattatcgctaaatacaatgctgtgaggtctatagttcctgtaacccctttctcctccccaaggacagagaagaactagccatgtgctatagggaaccctgagtgccctactcttttcccaagaagggtaaagcctacaatatcatcagggggcatgaagcacattaatttgcagtggctgcttcatatgaggagatatggtggacaggctaatttttccttgaaaatgtggcttcttcaactcctttcaaatttaggatggaatacttcctgaaataaaactgggctttatgcaggattctctttgaaaattcttgtatgtccagaacaaaagataaaactaattgtattcctcacattcacaatccccattggtctgaagtcacgtagcacagagcatctatagcacatagtgtttaaagactaatgaatgcaaaaagataaaatcttcaactaatttttgaattgtttctcatatatgctactagaaaatgccttgttgatgaagcacattttgggtagttgaggtcttttgttttcgcctttagctttctaagctttcttacaatgtggactgattactgtaacatttcacgtgtaaaataactggatattctttatatactggaaataacctgtgaatccaatatttcactaagtgttttaacttttgtgtatatatctctcatcaataaatgtggatttcaatttat

SEQ ID NO: 3459 - DNA, 619 bp, Homo sapiens
gtgatgccaggaatctcaatgacctgttgattagagggtctctggtcatttccacttgtgtgtggagaaatacatcatttgcatatgtatctagtcaagaagcccttttggagcaaagtggttgggaaactcatttactgggtccaccaaaggaaacccaattctgccatgtttttgcaaatactacacgtccctttgctctcaatagcaaaagtgatgttatagttttttttacttttgtcagaatcaaggcttcggccacctgtgcaatattttcccatggaatgcagcagtaaatccaagtaggtatatccgtgctcagagagaattctccatagttctgactcctgaaaaacaagtctcattagctctcatctagtttgatgactaaaagtgcacagcagttataccccagtggaagtgatttttctcacctagctgctctctaactcttacggctatctagttgtctgagctgctggtttgttttacttattctccaactgaactcattccaaaccaagaaaaaggaccaaatgaaattttcagttattatcatacttgctccttgaataagaatgctagagtctggaggcagaagaagactaagttaaaaaaa

SEQ ID NO: 3460 - DNA, 1512 bp, Homo sapiens
tttttttttttttttttttttttaataggggaaggaggttgccactttgtcaggtttttggatcggggctgtgctagcctcaagataatttggaagcttactattttttccctatgttttgaaactgtttgaaaactggaaatgatcatttctttaaagtttggcacaactttgaaattatctgggcctggtgttttgttcagaatagatcttttacaacaatggaaagttgttgtaaaggcttatatgaaagctattgacctgtatctttttggtagacagcaatataaagctctctcttattgtagttaatacattttggtttgaattctacattgaaattaacattgccatgctttatgtctattcaaataattgtacttgttcaaacagctttacttggaataaccaaaaactggaagtaacccaatggacattggaacaacatggaattgaaaagtacattgtgatatattcaggcagtggaatattactcaccaatatgaaataatgaaatattgatacatgcaactacatgagcaaatctcaaaatatgctgaatgaaagaagcgaaagagtaaaatctttattattcagtttacataaaattctagacagtgctcactaatttgtggtgacagaaagcagatcattggttaccgagatggggtggatggatgaagaaggccatgaagaaaggactgcaaaagactacagggaaacttttgggagtgatctatatattcatcatcttgattgtggtgattgttttgtgagtcaaaatgtatcaaattatatgttttaaatatgtgcagtttagtacacttcagttatacctcagcaaagctgaaaaatccattcaactctgatttgaaatgccatcttcgtctgatgctgtttacatgtctctgagtgtgtttctaggctctcttcaagtctactaaacaaatatatttgactttatgtttctatattgacataaatagttagacagtatcttttcagtaaaagtgttgggagaactgggaagccacctgaaaaaaaatattgatagattcgtattcatacaccaggataaattccaagtggaacagtcatgagctccaaaccactcaagcccctgccttggcattacacttaatgacctatacttaagtcaggccatgacatgaactaaacactggtactaatatcagaatctttttcatagggggcttcctggaacttgacttggacctatgggctagaatttaccgaaagcagctgacccgtgctttgcttttactattccaggaatgcagataaagtctaacttccagctagacatggtggctcgtgtctgtattcctagctactcgggagcctgagatgagaggattccttgagcccaggagtttgagtccatcctgggcaacataggaagccaccatctcttaaagaagaaaaaaaaaaaacctagattttgaccttttcgtcacaagaaaacaaaggctcttatgaagtcccatgccc

SEQ ID NO: 3461 - DNA, 399 bp, Homo sapiens
aactttggtaatagtccattgttatacagttcaggaaaagtttggcacaagcgagctagaatagcaggactgtattattattagattttgggaagaaatagaagatacactgatggaatttcattttctgtctcagtttcactatttttctgatcagtatttgggatttatttgtccttaatagaaatattatgtgaagattaatgaacttttgtacatgaattgctttatgttaattatgaacaattttagtatgatgatatgctaattctttcatttccattttgaatatcccagtgccactttcaccagctctcaaggtaccttcaaattctgcccaccataattctctttcttttaaaagtttaccttggaaatgaatttattctgtggtaataa

SEQ ID NO: 3462 - DNA, 505 bp, Homo sapiens
ggaatgtgcagtagcagaaggaatcacgtatataacatgttttcaggtagctcacagacaaatgaaaaaagctacctttctgtgtatacacagaaaaaccaacatcataccacttttgaagacctttttaaatagcgcagaatatacgcagtagcagctgaatgtgtatgtgggagaaaacgcgagaaaaaatggtctgtgccagtgtaccaaatacccgcagtttgctgaagatctttaaattttctgtccatctttctgcagccttatcctgaacatatgttctctccataaactcatttggccaaggaactatatagctacttgaaaaatatttgtcccacaggtgataagtgatgtattctcctttcaattaataagcaaatagaacatcataatcctcttttaacctcccatccctaatcctggtccctttcctcctttcccagttgtaaccactatttcctttcattatctgtctttccagaccttttctcttccttta

SEQ ID NO: 3463 - DNA, 291 bp, Homo sapiens
ctctcccaagtaaaatgaacactgtattttatactttggttcttgcccagcttttcagaatggcaataggagaagctttcagaggacagttacggtggtctagagtagaccagtgcttttgtaaaccttagcgtgcagactcattacctggggattttgttattatgtaaattgtgactcagtaagtttggaatgaggcctgggggtctgtagttttaacaagctcccagttggtgatcagggaccacacttggaatagcaagaatcttgctccagttcattttttagcat

SEQ ID NO: 3464 - DNA, 148 bp, Homo sapiens
ttttaaaaatgcagaatagctggaattcatccttaatctactttatgttgaggatagggtagtagtatttttttgcagccttatttccttgggttgttcaaggcaaggtattggaaaagttaaaaaactcaaataactagatttgaga

SEQ ID NO: 3465 - DNA, 807 bp, Homo sapiens
ggctgctttattctgagcatcattgcggtcaggcgattattaacgccgacgatgaagtgggccgccgctggctggcaaaactgccggacgcggttgcggtatcaatggaagatcatattaatccgaactgtcacggacgctggttgaaagcgaccgaagtgaactatcacgacagcggtgcgacgattcgctttagctcaagttggggcgatggcgaaattgaagccatctgatgggcgcttttaacgtcagcaacctgctgctcgcgctggcgacactgttggcactcggctatccactggctgatctgctgaaaccgccgcgcgtctgcaaccggtttgcggacgtatggaagtgttcactgcgccaggcaaaccgacggtggtggtggattacgcgcatacgccggatgcactggaaaaagccttacaggcagcgcgtctgcactgtgcgggcaagctgtggtgtgtctttggctgtggtggcgatcgcgataaaggtaagcgtccactgatgggcgcaattgccgaagagtttgctgacgtggcggtggtgacggacgataacccgcgtaccgaagaaccgcgtgccatcatcaacgatattctggcgggaatgttagatgccggacatgccaaagtgatggaaggccgtgctgaagcggtgacttgcgccgttatgcaggctaaagagaatgatgtggtactggtcgcgggcaaaggccatgaagattaccagattgttggcaatcagcgtctggactactccgatcgcgtcacggtggcgcgtctgctgggggtgattgca

SEQ ID NO: 3466 - DNA, 3538 bp, Homo sapiens
tgctagaaatatccaagtgttaaataaccttttaaaagcaacaaaagctacttttttcttaccacttaatagaagaacctgtccctagaggcgacttcattgctatggatctggagtctctgaactcttaataggatgcagcctcacatacataatgtcacccattttatgttgatgaaaacattacaagttttcttcattgggtatgtgttgatgttcacagacagtacttgggcccattaggttttcgcgtctggtcttagagcatgtgtattcatctcagcgtgaatacctcagccagtcttatgaataggaggctatgtatgggcagggaatagattagattagaacactcgcacaagatgaccacatatagaagcagaaagccccaaattccctgggaactgttttttctctagtagctgaatataaggaaatatgtctaatggacaccagttaatactttttaaaactactctttaaaaaaaaaatacgttccccttggttaactgattttttaatccagggtggacattttttcaacctttattaaaaagacaaataaactattttgtagaagatcagactcctacttaactggaagagaaatgtctattaaatgtctctcctctttctctgggtcaagaccatgtaattttatgcttcagagatgaagatactgtttgtttacaaagagtttagtttttaagacatccaaaactctatgctagagcaaaaatcaaatagcaaaggacactagccagaaaatacagtgtgtgtgtgtgcacctgtgtgcctgctgaacaacttgacagtgtaacagataaggtaactgaagatggtggatatttgaattgtattagcttaatgtctacatatctttggccaaaactctattgtcatattagaaacatgttatctttttcatgtttattagtaatttatttttgattctttgttttctttttcgtccaactaaaacaactgtaatgtacttgatacatttatatcaagttctaaagtatttagacaaatccaaatactttgtttttagttttttcctcctttccatcctgttaaccacagtgaaacgctgcagtattttgatttggtcagtgctacggaggaagaccatgaaagctgaattggtctgtgccacccagagtaaacctcttctcttcttctggaaagatggcgtgatgtttttcaaggattctaataaatatcccgcagtcatctcctgagcagctttcctctgtttcacttcagaactccttcccccactttcttcactccagtttcttcacttgcagcgttttctgctaagaaagacttatcatcttgtatctgtttatgcctctcttctttggggcccctggatgtttttgtggatttttacagagtatttatatctgcacagcgtgtattttgttatacattcttacaagcattgatattggggggtacattcataatagtgagaatatctggcagaatgtgtgaatgccatatctgtagatgacgatgaatgtgaagggttaatgtagaaatgtttgtttattctgttacagctcaaaatggaggctgagaatctctaccaccattcccttctctatttgagaatctctaccaccattcccttctctatttgggaaacaatactctcttattttgctatttttaccttcccattaactggcttcactcaacagtgccagatacctatggagaggggaagtaaaacaccttaggtcaggaataataaaccaatgagttagctcagggccggtggacatgttcactggtggaccagttggcattgacctaaacggacagagaaatgcacatggaggagaactacgttgaaatcaagatcctatgtctgttgtattttctctttgcctggagtaaatagcattataagtcattccacccttattagataaccaaagcatattggtctcaatagctttctcctgaaaaatgtgattgaatcttacctgtagcagttcactcttaaggttgaaagaactgtcaatatagataaaatccattccttattattattgattggtgtgacatttgaaaatgtgtctaaacaatatttgtaagtaaaagaaccagtcataagcctcaaatgtgttcagtgtgtaccaagctggaatgggagactggcccctcttggctttaaagtagcatgttgtctttttctagcagcttcttcctagtagacattccagggatgggaggggccagggatcatgtcttactcatttctgtatcgccagcccctggcatagtgtctggcttatgttatgtgaataaatgaatgcttgccaagatctcttcttccctcaagtttctggaaaacctgagggttcgtgatacctgttcccactcctcatcagcgggttggcaagaaagcaaataaggggaaacatttttaacattccaagcaagagaaggaagaacgactattgggaggaggtacaccagagattgctcagtgtgcagcctgctacctcacttttggctctggattgcctggtggtagaagggaagagtattatgtagttagcaccttacatatttgatgctcaggaagaaagtgcaagaagatccctaatagaacattaaagattcttaaaagtttttgaagtaggctgcttggggtgaccagccccacccttacatctccatagttggtacagttagcttgtagcagctgaagctgatgcctggagatcactgtctgttggtctgatctcagtatcatactgagacacctcccctgagccttacctacttaaattggtaaccgtcctaccaaaatttgtcaattttaatcaagtgaggcaagttgcaagggagccagagatacgtgaaaaaagaaaagcagaaatactgatactttctaagaaagaagttgtaataatttctttggcacattgacttactgatatcttttgaaatgcatagatgactcttgtgaaccaaagagagcagtagtggttattccccggcgcaataaaaatgcctttgtgtatcacttgcgattgccagtcatttctgtgccagttgctttcattccagagaatggcctcattctccaaaaaaagatgatgattttagaagtaggatttcctaacaaattatgtggtggggagggacggcggggattttattcatcccgtctgagctcttcatacagtattaccattaggttttaagaacaaagatgggggaggagggagtagaaagctgagagtacgtagaacagctacaagacattagtgggtattcagattttgagctgtgtaaatatcaaacatcggcttccagccttaagagttatttgagcagagagttaaggaggaatgggagattttgtgaataaaatgttttgccaaactgaatgagtctttttgccattatttcttatagagagctattttttaccttctgaaacaactcatcagacatctggggtttatcttgaattgtaccatcattgtttcttaataaaagtgataaattt

SEQ ID NO: 3467 - DNA, 2673 bp, Homo sapiens
gcttaatgtctacatatctttggccaaaactctattgtcatattagaaacatgttatcttgttcatgtttattagtaatttatttttgattctttgttttctttttcgtccaactaaaacaactgtaatgtacttgatacatttatatcaagttctaaagtatttagacaaatccaaatactttgtttttagttttttcctcctttccatcctgttaaccacagtgaaacgctgcagtattttgatttggtcagtgctacggaggaagaccatgaaagctgaattggtctgtgccacccagagtaaacctcttctcttcttctggaaagatggcgtgatgtttttcaaggattctaataaatatcccgcagtcatctcctgagcagctttcctctgtttcacttcggaactccttcccccactttcttcactccagtttcttcacttgcagcgttttctgctaagaaagacttatcatcttgtatctgtttatgcctctcttctttggggcccctggatgtttttgtggatttttacagagtatttatatctgcacagcgtgtattttgttatacattcttacaagcattgatattggggggtacatttataatagtgagaatatctggcagaatgtgtgaatgccatatctgtagatgacgatgaatgtgaagggttaatgtagaaatgtttgtttattctgttacagctcaaaatggaggctgagaatctctaccaccattcccttctctatttgagaatctctaccaccattcccttctctatttgggaaacaatactctcttattttgctatttttaccttcccattaactggcttcactcaacagtgccagatacctatggagaggggaagtaaaacaccttaggtcaggaataataaaccaatgagttagctcagggccggtggacatgttcactggtggaccagttggcattgacctaaacggacagagaaatgcacatggaggagaactacgttgaaatcaagatcctatgtctgttgtattttctctttgcctggagtaaatagcattataagtcattccacccttattagataaccaaagcatattggtctcaatagctttctcctgaaaaatgtgattgaatcttacctgtagcagttcactcttaaggttgaaagaactgtcaatatagataaaatccattccttattattattgattggtgtgacatttgaaaatgtgtctaaacaatatttgtaagtaaaagaaccagtcataagcctcaaatgtgttcagtgtgtaccaagctggaatgggagactggcccctcttggctttaaagtagcatgttgtcttttttctagcagcttcttcctagtagacattccagggatgggaggggccagggatcatgtcttactcatttctgtatcgccagcccctggcatagtgtctggcttatgttacgtgaataaatgaatgcttgccaagatctcttcttccctcaagtttctggaaaacctgagggttcgtgatacctgttcccactcctcatcagcgggctggcaagaaagcaaataaggggaaacatttttaacattccaagcaagagaaggaagaacgactattgggaggaggtacaccagagattgctcagtgtgcagcctgctacctcacttttggctctggattgcctggtggtagaagggaagagtattatgtagttagcaccttacatatttgatgctcaggaagaaagtgcaagaagatccctaatagaacattaaagattcttaaaagtttttgaagtaggctgcttggggtgaccagccccacccttacatctccatagttggtacagttagcttgtagcagctgaagctgatgcctggagatcactgtctgttggtctgatctcagtatcatactgagacacctcccctgagccttacctacttaaattggtaaccgtcctaccaaaatttgtcaattttaatcaagtgaggcaagttgcaagggagccagagatacgtgacccaagaaaagcagaaatactgatactttctaagaaagaagttgtaataatttctttggcacattgacttactgatatcttttgaaatgcatagacgactcttgtgaaccaaagagagcagtagtggttattccccggcgcaataaaaatgcctttgtgtatcacttgcgattgccagtcatttctgtgccagttgctttcattccagagaatggcctcattctccaaaaaaagatgatgattttagaagtaggatttcctaacaaattatgtggtggggagggacggcggggattttattcatcccgtctgagctcttcatacagtattaccattaggttttaagaacaaagatgggggaggagggagtagaaagctgagagtacgtagaacagctacaagacattagtgggtattcagattttgagctgtgtaaatatcaaacatcggcttccagccttaagagttatttgagcagagagttaaggaggaatgggagattttgtgaataaaatgttttgccaaactgaatgagtctttttgccattattatagagagctattttttaccttctgaaacaactcatcagacatctggggtttatcttgaattgtaccatcattgtttcttaataaaagtgataaattt

SEQ ID NO: 3468 - DNA, 16337 bp, Homo sapiens
ggaagcatccaggatgtgggaacattgtgacatttgcacaatttttatttattgctgtggaaggcttcctctttgaagctgatttgggaaggaagccaccagctatcccaataaggtatggtacattagagtctcttttagcttttggattttttaagaaagtaaagaggtggtacctgtataaaaggaggatgagacattcttttataagatttatttcaaagataccagtagaataataagtcattttctgaatttaatatgttgtgaaaatccggggtacctacttcgaaaataaaatttctgccacaagatttaaaataaccatgatggagacaagagtgtgtatgtgtgtgtgttcttatttagtataggattagtcagaaggcctagtgtgaccacaaattttgtgctgtcttctgtgttggtgaagttatcaaacattctaaaaggggagtatccttgtttctttttaaaaacgaatggcttttggaaataaatagaggtagtagttacataactttgtgaatgtactaaatgccacggaattgttcactttaaaatggttaattttatgttatgtgaatttcacctcaattaaaagaaaatgaatggcaagcaaagtcaaaatttgttgatgccagacctgtagtacattagtccaaatgtgcataattgtactcatggggccaaatagaaaacagggcagttcttatgttaaacagtgtattgaaaactcagccttcttgctgagagtgacttgagataaaagtgtaatccatccagttgtgagtatttagtaggatgatgtcacttactcccgtttagagcgacattctggtgtgaatatatccaagtatgaaggcaaaggcccatctttgttggttttcttttgcagcattcttacgtagcctgctatagaaaatctggctgaattttgttaatattatacttttaaagttcccagtgcgatgctaaatattccagatacttttagtttttcatttgctttagtatctgcataaaactttctgcccctaaagaccagcatttatattgcagtaaaagccccagcatttcttgactcctctggccctttcctgcctcttcccactatctctccccattctctccaccactagcatagatcaggaagtataccctgtcaccatatcttttataatagcatcctagctggctgacttccctgcctcccacctcttcatccatcaatttcacttaatatcgttttatcatgtcgccccactctgtggttaccacgatgttctgaatgatgtccagactccccatcctgccctttgagggtctctgtgatcttgccctcataaccatattctcatgcatgtcctatgtgtgttggccattttattttctgtaggtggagccataaacaaaattttgctcatgtcgttcatccccatccacaatttctaggcaagcaatgtggaatagttaaattaattaccctaaaagaccttgacaaactctgtaaatggcacctcttcaaggtagaactaagaaaatttggcaagaaactttgtaaagtcgctgatagtatattatttagaagctgtgaagaagctgttgctggtaattttgcatatgtgttcattgtcaagttcctcagactttccagactatattaattcagccttggcttgactgcctgttgtggtgtatggctccacacctaactagcaacgcagaatcggttctttcagggaagatcacttaggactcagtgctgtcatatccttcagatgtgcaaaggtggaaaatggttgggaatctccaagatcaacatttcctgaagaatatggaaccacttatttgcttttgccctgcattctttagccatttattttaaatgctgtttttttctcttactcaatataggaagttgagtcatatgaaatttctgacattcaactctttttgacctataaaaacggcaattttatatggtttggcccaatatatgtagaaggcatcttatgtattttctgaatcacagtgatgacatacaaatgtaaaattatttgtttaatccatctgttcataataattcatttgtatttatccctttaagttattagggttactggatttttttttttttttagtttttgtttctattattttaagacctataaactttcaaaaaacagagaccctgattttaaataaaaatctgtacaagtcaaaccatgtcctcattaatttggaggccactagttcagaatgcgggagaattttagcagctgctaggctgaaaataatccttaacttagcaaatactttctttagaaacagcgaaaattaacagtacaaacaagtgtatagaggaggtatttgagaaaatcagccattttcaagttcttcagaggtatatgaaaattatttacaaagaatcaatacaatcattttaagttgctatgtatacttgaaaatttttaaatagtgtttctttaaatgtattttataacttagattttcccatgttagtctggctttgtgaagcgttttgatatgtacttagtagttgacatggcataatagtgatgcaatcttgcaacgcagaggaaacaggcaaaatgcctttttagccaaaaatatatatttcctatacttgattttcttgaaatcctagattctgtttgatgagctgttctgtctgcatttcaggtactatgccataatggtgaccatgttcttcaccgtgagcgtggtgaacaactatgccctgaatctcaacattgccatgcccctgcatatgatatttagatccgtaagtgctgccggatcacgtgtatatgttcctctgaaaagtatagttaagtagatcgattgaatatatggcagaactagaaggttcttgtagtaagtggtcttgggtagaagaataggtttgtgaatgcgtgagcaagggtggctttcatctgagaaggcaaaaagagaaatctcaaagtggatggtttacttttattcttctgaggtctaatgagtgattaataaaaagaaaattaaattttccctaggaaacagattttaccttcattttccctcatctctttgattttatattcaaacatgctattaatgttatttaacttatttcttatctcttcttctttcataaaagtacatttacttctagaacatgaaagagatacttgtcttttctgatttttttttttttttttaagcagagacttgagataataaagggaaattcttgatgaaggtagggtttctcccaaagcactccaggcaaaaaaggctgataattgtggtgataacatttccatgtggtctgagatttttgtgagattgtactgttcctgaagggagtttccaaagcaattataataaggtgaccttcaaagcattgaaaacatagtggactttcaataaacacctgttgattgattgtcacctttttagagaacagagagatccttgcatgactttttccattaaaactggtcaggggctgtgcacagtggttcaggcctgtaatcccagcactttgggaggctgaggtgggtggatcacctgaggttgggagttcgagaccagcctgatcaacatgggaaaccccatctctactaaaaatacaaaattagctgggcgtggtggcacacgcctgtaatcccagctactcgggaggctgaggcaggagaatcgcttgaacctgggaggcagaggttgtggtgagccaagatcgcaacattgcactccagcctgggcaacaagagcaaaactccgtctgagggaagaaaaaactggtcgggggtagaaggtgcaggtaatggggagaaacttattaaaagctcttataaattaggtgatggaaattttgacaaaaataagtctgtgatatcatttattcgtgctagccctggcttcagcactgagcaattacagttgacccttgaacaacatgggtttaaaccacgtgggtccacaaatatgcaaatttttttcaaacaaatatgaaaatacagtattcacgggatgcaaaacatgcctataaggagggctgataatgactatattgagaattgatcctttttattctcattgtcatctttaaaaggttttttaaatatatatatatatacgtatatttttggagacggagtttcgctcttgttgcccaggctggaggtgcaatggcgcgatcttggctcactgcaacctccacttcccgggttcaagggattctcctgcctcagcctcccaagtagctggaattacaggcaactgccaccacgcccagctaagtttcgtattttttagtagagacagagtttcaccatgttggccgggctggtctcaagctcctgacctcaggtgatccgcccacctcggcttctcaaagtgctgggattacgggcgtgagccaccgcgcccggccatcatagtagatttttatggtttatacttttgccatcataagaacaactaaatctttactaattattcatcctagcttccttcattccatgttttttccccttgcccatgttcctattctctcgaattacgttgtttttttcctagtgcactaaacctctctgttactgttgtctccttttgcagggttctctaattgccaacatgattctaggaattatcattttgaagaaaaggtaaacaatacacttctgtattttgtgtatggaaatgataccctgagcccctgtccataagctagtcacctggattccttgtcccaaaatagtgataagtttgcttctggccatctacctcttttcttagttctttaccagtgaggcccaatcatgcaatgtcctgaagcagctgatcaggtaagaggccacacctgtggtgtctctgtgtcgaactgaatagctcttggcatcactgaattttagtgtcatactaacctgcgaagccaacttacaaagatgatagagaggttcactgtgcagtatggtcaccactagccacgtgtgactatttacatttttcaaaattaaagaaaattaaatatttagtgtctcagtttcattagtcacgtacatttttttttcttttttttggagacgaggtctcactctgtcatcctggttggaatacagtggtgtgatctcggctcactgcagcctccacctcccaggttcaagtgatcctcccacctcagcctcccaagtagctgggaccaaaggcatgtgccaccatgcccggctaacttttttgtatttttggtagagattgggtttcgccatgttgtccccgctggtctcaaactcctagtcacattttcagtgctcagtagactcacagagctggtagtgaccacgttggagagcccagatgtggaacatttctaacatctcagaaattccatgggatacttctgccctagaagatgcttatcagtacagcatagcaaactaaggaatggttgtacatattaaaaaggaaattcctaaaaaggcccaaatagccaagaagatggaatgaaaggttcaggactgttctttgtgaccatcaccaatggctctctttgggacaggagcaggggggacaggagcaggaaataccagaagtacctgggatgctttttcaaagtttttgtctgtcaccttcattctgaggttcacccctcactcctaaggaggaaggatgttagcaagagacaacacatacagtttgggaaatttatcagggaaagttcactgttaagaccaaaattatacaagttgatggcagcgtttcaatgtatttgatatccagccccaagctctctatacatgcttggaaagtagctgtaaattcagaatgtgagaacctagagtttttaagtattaagggctgtgtcataaaaagaacaattgtcctgtcctactaggcttcatatcatggaccgtttatctcctgaggcttatgaattccctgaaaagtactactgtagttgatttctttcttcttggttctctgcatttaaacatatatatatatatacatatgatggtcaggtttattacatttgaagtgatcatcatgcttcttatagtgtggaattcgccttgggacaggcctgtgctctttcccaacctttgattctggctcatgacaaggatacaaaagaacatgttataagagaaattgtattctcctgatagtgccccaaaatgttacgggtctttctcaagcatctgttgcccttaagaacttgttctgagtgtgtcatcttgcatctatctaagccttttgactctcttttctgtgtgtatctctttcccattgagcaggaatttccataagttaactttccaacagagtaaattagtaacttcttatctccttttatcttgggtagaagcccctcaagttcatagtgtgctcctcattccaggatttgaatatcaaatttatattcaccttacccatgcctttattattatttttggcctcagttgtaaacctcttcagcgtgatctttgcagactgaagaggttcattattttttaccgtacctccgctcgtacctgcttcctccccaaccgctctctagcgtggtcctcttggcccttttagtccctttctctgcccattagctagttctgctggccttttatgaggtactgtgaccaggacaatactatgtatttgagtagaaaacctgggatggttcatcttcttaatttcttttaatccttgcctgaggccttttgcttgatcaccaaaaatctgagagggtgctaatgatactagctaatgtgaaatgctactgttattacagcccatagttctataatctgaatatcctcccccttatccaactatgccaacattttaaaacaatgttaagtcattcagagatttaaaaaaaacaagcctcccccagagaatggatgattggattattttctgagcattgaatcctgctgcttgcacctgatagcctgtttttccactcgcacagtgtgtcttaggacacagatttggtccccctaaagacaggaaaagcaacagatcctagtaaggactgggtcagcctttcatctggactcttgagagcagaatgcaacatcacatctggtctatttctgtttttgtctcctgatgaaataatcgattggtcagcaaattgttggagacagactaaacagtactaaggaaaagtgttggttagaaactagtcagtatcctgattcattcatatgcatacttctgtggactctgctggaaagtaatcctgtctgtcatactttagtgatttgtactttcatgcaccatctgactgtaaatatcactgggaaattcatatctgtgctttcctaaggtgtttttcttcttttttttcttttttgcagatacagtatattcaaatatacctccattgccctggtgtctgtggggatatttatttgcacttttatgtcagcaaagcaggtggtaagaagctcacaaattattttatgttcactacttgctattggggcccagttaccaggcaattaatacaattcaaatttttatgtaatacaaagattttgaaagagaagaggggagggaaatgggtaacataaatgtttcccttgtatgtcggcaccttgcacgtagttctgctctctgtacctagtttattttcttatttcctagacttcccagtccagcttgagtgagaatgatggattccaggcatttgtgtggtggttactaggcaagtacaataattataataaagctaattgcctctgcagttgtgtttgctgagttttctcctaagagaaatgtttcttggcaagaagcttcagctaaacaaattatgccatggaagagaggcacctgggatcatatttctctgagccttagcgttcaagaaatgaaaaaaagaaaatgcccccacattcatggcagtatgttctacaacatggatccatgtttttcttggttgccactggtgtagaaagaaaagtgtgtgtctacttgcacatcacatcctttgaatgtcatccgtctcttcacgatctgtctgccaagttgaagcttctgcaagagggcacgttagagcaattgactctttaaatttccgagggactcatttctaaagacttattttcttcagaggttagctgttccatatggcagtgttcccaaacctgactgattatcagaatctcctggggaatttttaaaaatacaaggatctctgtggaattaaataggcagctcctgtagagctttgttctcacattttttgatatggagctgagactcgttccaagggctttcaatgacaacaataacggattgagactgaccaattggaagagaaatagcagtgaaagaactgtgttctccttgcttcttggctttgagactttatcccttgttgctgtttgtaacatagaaagatccttatgtgctattagaaaaatactccagaagaaaaatttgcaaaggatatgaacatatagttcatgggggaaatagtagcacccaacaattttaggttcagcctcactagtctagtaatcagagaaatgcaaatgaaacccatgcaatacctttttatgttggcctatcatactggcaagatgataaatggttatctcattgctgctgagggtacagtaaaacaactatttttatataataaaaatagtttgggtataaatggacacagcatttatggaaaaatattgtgtattgtattttttaaatgtccacagcctttgactcagtaattccacttatgagggtttatcctaaaatatatcaacatttgtttaaagatttgtatacaaggatgtacattgattttaataatgaaataattggaaataaccatcctcatacatttaagtgtgctacatccatatcatagtcattaaaagcattctatttaaaaaattttaatgactgatttgaagcaaaattccaggcaaaagctcatgaaaaaagcaagatataaaattccatatgcaatctgatcctgtcttagtgtaaaaaaatttacataaatgaatatataagaagatgtagaaagctgtaaaggactagatggtaataatgtatttttatttctttttacagttttgtacatgttctacaattagttcataatatttgcaggactttaaacaataatgttcttcaagaaaaacatctggaaatgaacaaatgcagacatcttgtcacctgatgtttgttttttaggtattggggcattgacttttgctcttctgatgtcagcaaggatggggatattccaagagactctctacaaacgatttgggaaacactccaaggaggctttgttttataatgtaagcaacttcctgaacctgggaacgtgaaaattcctaagttgtaaaatgttacttcaagtgaactattaatattctctgatgtagttgaaggtgtattattggtagatggctttgagacccacagactgaagcagttttgatgggatgctctggtgggttccaagtcacagttcactacatgagatgatcacgatcaatcaaagcaaattaaattgtgtctgcatatttagcaaatccttttgtgcagaaagactatatgtttaaatttctccattccctgttgttgaggaaaggatgctggctccattgtttgctttgtctgtgatggccctcagaccctataagggcaagaaccataatttgggggttaatatcctgccatacaaggtgaagtggtcaagaagcactgtatacatttaacttaagtctaacttgcttttctttgtattgctgtcaaacaacctgtacgacttttaatcattgtaaagctactctaattattctataatgtttttgcacttacatttatctgacctgtttctttccatagcacgcccttccacttccgggtttcgtcttcttggcttctgatatttatgaccatgcagttctattcaataagtctggtgagtttggggttagacagtagaattacctgacagtttctgaggcagagtctcagttttactcttgacttgacctcggcctttttcataatcctattcaaatcatgtgttcctttcgaaaatgtctccattccactttccagtcattgcagcagcaaaagcttttacaggggtttctcaattatttacaaatgaagtaaaagaatatcttcgagttttccattttgctttggaatttgtgtgtttgcatttgaatgtgaaatgtttgatgttttgagaatgcaaatgaatacttacagcacactgcagagactggagccctgcgaagttgggcagccgtccagctctctcaactgctgtttatccttctctgccatgaaaggcagagctgctcacagatccagcccaagctgccatggagcagagcaagaggggagctcaatgatgacaaggtttttctcctagttacagatgagacaggcagcagatgaataagcaaaattagtttcaagcgtctagtgtaagttagctgttactttttaaactggccagttaataaattagctatagattgtcagttaacttgaaagggatcacttgtatgatctgattatctactaacagagtataatatagacacattgaacacacaaggaacaaataaacgtttttaaaatcaaggctttatgttgcacacacctcaaatgcttaagtgcattttgtagaatgacagtaggtgctcagtaaacatttgtttgctatctgagcatgagttgtgaagttatgactattctctgcatttatagtgttgcctctcccatttgccccatcccccaaaaaatgtgaaggtagtgtgtaagagtttgtaaggctctgaattactcaaataatcatttcttcatattaacacaacagtttttaagatctctgagaagtcccacgtagcaaagggctattgaaataaaaatgttgtcaaattccatgtgattgatttagttgttagaatgctgcttctaaaaatcacagggctaggtatttatgataaaatgttttacagaatctgccttcaacttctccagaatcatttccaagttaaagatacattttccttctcttgctttccttgagattaagtttctgagatccgtgaattttccaagagagctaaatatctgtcaaaatattttaagtgatattcattgtctctttccttcagagattcagtgtatctctgaagttattaaaaagtaatcacgtttgttaacttccttttcatttcaatacttgctaaggatatcaaagataatagaataccagattattggcattgcccactgatccagaactaagtttcaaaaattagtctttatgtgtatgcgtgtgtatgtatatatgagacattttattcgtgaaagaaaattaatatttcttaccagatctcagcatcattgtatcagaatttcttaaattatgctgtataattcaaaacctgaaaaaaatttagtaatacaaaaaaactgagccattgaggatttctatgtctgtattctctttcatcttatttcctcccacaaatttactgtgcaagtgtcattatataaagctaacataagagtgagagtgtgtgtgtgtatgtgtcttttaatagagacaggacctccctgttgcccagaatggtagattggtctcgagctcctgggcccaagggatcctcctgccttggcctcccaaagtgctaggattacaggcgtgagccactactcctggcctaaaactaatgtaagaatatatttaaagttattcacagttccatcaacctggacatctgccaattttatttttattgattttcttctagaccatgtctgtttacagagattcttacatagctgtaatccttgtgtggatataattttatatttgttttttactttttttctgagttttttttatgtggctataaaatctctatgatttttgtttttatcaaatgtacaatgcctcctctaatgaaagtgcctttgtttatgtagccattgcaccatcattgggcatttgattttgattcagagttattctttattatgtatagtactttaatgagtgcagaacctttttcttcctttgaattaaactaggattaattctgaaggatgggtaggaatacttttatagacccttaataaggattatgaaattgatttttttaaagaatgacgccaagttatactgccaccaacctgtggctgccagttccattaccaacttgccagattaagatattatttatacattttgaattggctaggcgcagtggctcaagcctgtagtcccagcattttgggaggccaaggcaggcgaatcacttgaagtcaggagttcaagaccagcctggccaacatggcgaaaccccgtctctactaaaaatacaaaaatgagccaggtgtggtggtgtgtgcctgtagtcccagctacttgggaggctgaggcacaagaaccacttgaacctgggaggcagaggttgcagtaagctgagatcatgccactgcactccagcctggatgacagagtgagactctgtctcaaaaataaattaataagttttgaattgctaattttgtagctataaaatggtacagtcttatttactttggaattctgtaattactagtgtgattgaacatacttccaaacagtagttgctagccgcctttcctcttgtgttgagttgttaaggctgtctatatcattttatcattttcaacttttctgtgcttcacagtctttctttgtaaagtgaggtactattcaggcaaatggtaaaacacttccttaaaaattaaaactattatttgttttaagaaaccaatttaatgactttagtggctgctatagcctggagtcaaggcaagtaaagtgatgcgtgatccaattctatttgcaaggaagacaatgttgctgttcctattatgttcagtctgtattaccctgttcaaaagatgaaaaattcagctgtgaaaaagcaatatggctatatcctcttgtaacctctacagagttatatgaaattcccgtcatcggagtgaccctgcccatcatgtggttctacctcctcatgaacatcatcactcagtatcctttggactgtgccgtcacccttatgtcatcatcaggttcttttggcacaggaatggtcattcttttcttctaacagtgtgttgacttgaatatgattttcgctggatttattctgcggtaagctggagacagagaccaattcagggaactccttgtagagggcagaagagatgctagtggtgtagtaggtcagtaaggcacagggcagcaggaggaagtgctctgagtggaagtgtaggagtccattgattgatagtggcgggtgtggtggctcacgcctgtaatcccagcactttaggaggccgaggcgggcagatcacttgaggtcaggagtttgagaccagcctggccaacatggtgaaaccccctctctacaaaaatacaaaagtaagccaggcatgatgatgggtgcctataatcccagctactccataggctgaggcaggagaatcgcttgaacccaagaggtggaggttgcagtgagctgagatcatgccattgcactccagcctggacaacagagtgagactccatctcaaaaaacaaacaaagaactactgtatagcataaatcatctgtgatttgtacctgtgattttttggtgtcctaagatatttccagtgatcacaagctgctgcaaagtcctgaaagaaatttcaaattaccagctacttaggaggctgaggtgggaggatcgctcaagcccaggagatcgaggctgcagtgagcttgatcactccactgcactctagcttgagtaacagaacaagaccctgtctcaaaaaaaaaaagaaatttcaaagtaatcaagttttcgttttttaaaatggttatttcgaatgaccttactttcattataaaaataattatgtctttgaaatagtgaaacgaatcgagattgacctcattcctctgaagtcagctcctagatttgccagagtccctttctggaggaggggatagaagggctggaggcaagataaataaaggtgaatgggatcacccttaccgagagcgtcaccctctgtcattatcttggaggtgcctgtcattgtaaccataggaagactccaacataagaataattgggggttttttggcggtttcaaattggtacccataaatggaatggcaggacaggagttgttctgcaggttctccccaggaggagcctcagagctgccgtagcggaccttcatgttttcttagaatatgagaagttaaaccagggaccatgccagaaggttctctcactgatcccccaagtacagtctacagaaaactaccttgactccactcctccaggtacgtgtgcatccggggtgtgtttatcctcaccacagaatgcgcctccctcaccgtcacgctcgtcgtgaccctacgcaaatttgtgagcctcatcttttccatcttgtacttccagaaccccttcaccctgtggcactggctgggcaccttgtttgtcttcattgggaccttaatgtacacagaggtgtggaacaacctagggaccacaaaaagtgagcctcagaaggacagcaagaagaactgaggcctgtctggagtacgtagaccagtgtcgtcgtgagggtgggaccctgtgaaggtctgaccaccgtttcgcttttgttaatgccgagctacccgcagtgctgagccagccgtgcaaaaggaaatcttcaggaggggacttctcacgttgctcagactgacacatgtagactaaatagaaacccctcagccctaaaatagaaaaaagaacagttctggactattgaacagcccattcatttatttctgttttgtttaccgacatattcagtattattcttgttttctgaattctgagtctcctgaacaaaaggcttactatccatggtcttggaaaagattgtcccttctcttgctgttgtaatgcatctctgctacagcagtcattgtcatcctgtgaccttatcccttttgtctcccatcaccttttccttcttcagcagcacctcacagtcagtcagacgctgcaggcaccactatcaccaggagtggccaagtaaaccgagacaccagtaacagcagggctggacttcctccagcgttttgggaaggaaagagatgttcccctgagctgattcccagtgacagtgcagcaagactagtgggactcctctttcccacattttgcttttttttttttctatgcaaaagtcagatgcttctatccattgctttctgtgattagggcggccctgcagcatatctcacagcagacacagtgttcataacaaagaaaggttgtgccgggcacggtggctcacacctgtaatcccagccctttgggaggctgaggtgggtgtatcacttgaggtcaggagttcaagaccaatctggccaacatggtgaaaccccatctctactaaaaatacgaaaattagctgggtgtgatggcgcatgcctgtaatcccagctacttgggaggctgaggcaggagaatcacttgaacccgggagatgaaggttgcagtgagctgaggtcgtgctactgcactcccgcctgggtgacagagtgagactctatctcaaaaaaaaaaaaaaaaaagaaaggttgttatggactggacacccctgaagcccattgcctaggccacagtggtgacggcaggatggccctgctcagcaccgcaagagccatggctgtccctgttggcccagccgggcactcacagggcagaagggtgggtctcaagtgggaggataaggcttcaccaccaggagattcccctctgcccgatgactctgttaagagtcacgacccatcaagggaatgcatagatggagatatatagtgtgtgatgtgtaaatcaggtcaaacctcaacgacaattgaaagttgttattgtcctatgaggtatcttagcattctcgatgggtattgaggatggttggatgtgctttattgtgtgtggaaacatgcctctctttgctaatcatttcagaggtccagttttcctttcactggacaatcttgaataggaggaacgctgttgctgtaatatgcgtagcttctgtgtgctcttgtgtagtctgtgtgtgatcaaagggcacggaagtggctgcactttcacatcccttttctttacttagctggaaccttacataccagtacatgctcctctgtaagcagctgaactcaccggccacttctctgtttgcctatagacaaagactgtgtgtgtgtgtgtgtatgt

SEQ ID NO: 3469 - DNA, 584 bp, Homo sapiens
gtgaagcgaaagcccgccgtgcgaagaaagagatggttgaagcgaacttacgtctggttatttctatcgctaagaaatacaccaaccgtggcttgcagttccttgacctgattcaggaaggcaacatcggtctgatgaaagcggttgataaattcgaataccgccgtggttacaagttctccacctacgcaacctggtggatccgtcaggcgatcacccgctctatcgcggatcaggcgcgcaccatccgtattccggtgcatatgattgagaccatcaacaagctcaaccgtatttctcgccagatgctgcaagagatgggccgtgaaccgacgccggaagaactggctgaacgtatgctgatgccggaagacagatccgcaagtgctgaagatcgccaagagccatctccatggaaacgccgatcggtgatgatgaagattcgcatctgggggatttcatcgaggataccaccctcgagctgccgctggattctgcgaccaccgaaagcctgcgtgcggcaacgcacgacgtgctggctggcctgaccgcgcgtgaagcaaaagttctgcgtatgcgtttcg

SEQ ID NO: 3470 - DNA, 10514 bp, Homo sapiens
ttctgaattatttccaagagccctcttctccagtccctgtctcttatttctcaatccaaacctcaccctctgacactagacccaaggctgctggaatttgggaatggacctgaatgcccttgaatttcagcagcctggtgcagtgggactgtgggactcgtgggacatgggactgtgtgttaaagcagcccagaggagcctggccctctctcatccccctgcacttttcccccttccctgaatcttcagttagggaattagcaaatttaccatctgcttctcttgtttccaggaggaaattccccgccagctccagtatatttgcctgtacctggtgcatatagctggagcatacctcttaaagtgagtgagaccatggagccagccagatttccttgcccttttatgtccatgcatctgtccacacactcatataattatcaggcatttgttgacatcctctgtgtgcctagcactatgctaagacttggcaatacaaagatggtaatggaagattctttatcttcagtggttcattctcattctgaagagacagttatagacataagtaaggacagttgagagtgatgaacaccataacacagtatgtatcatctgctctgcaacccagaagaagaccctcaacagagacagccaggaagacttccagtggatgtcggcctttgaaccatggctttgcagcttgaaggcctcccaaagctgggctcttacctcacagtgtccaatgcaaacactgctagagctcgtagccctggaattcccttccctttggtttataatgacatggagagtaggtctctcttggttgttctagaggcagaaagaattgctataatattagttctcgaagagcctcttttatgaaaagaatccttttgatgttaataagctgtgtcattgataatttgggcttttgctgagtgttatccatgcagtaaaagcaccccacactttctctaggctggcacttacagagctcactgtgtgtaactttctgccgaggtgcctggaaatcccgaggtgcgttggactaggtccttgcagcaggcatcctgtgtgaatgactgacttggattagtaagactgaggcagggaaggagctctcaaactctgtctcctgtctctggtggcctgtagcagcgtcagttcccggatgggtctttgagggctgaaggctgtggggtgatgccagctctgcccttgtgttggatggtcatgtgtcacatgcataacgggtctaagaagccagtctgcactgtcaccgtagcagtggcgaggaccggggaagaacgtataagcagggccacacagaaggagcacttgctgcttctgcatgtacctcggagctgtgaagacttggataatggaaagtcagacaacaggaacatttcatattcctatactcagagctcagcaaatgtgttctgagtaccttttatgtacttggttccagcctaggtgatgagtgcaaggtgctaagtactgtgaagggcctatgcgaggtttgctgtgggagcaggcaagggcatctgactgagacaggacagctgaacggccagcgggtcggtattaggaaaaatgtcttaaaggtgtgagagctaaactgaatccaaaggatggagcagagccagccagggaaagtgggagtggaaagcagagcccagccaggcacaggggacagcctgagccaagatgcaatggcttctgctccacgcagcatcttggagggaatgtaagtctagtcttccccacccccagcctgagccgcctgggcctgatcttgctgctgctgcagtactcaactgagttcctcttccacacggctagactcttctactttgcagatgaaaacaacgagaaactgtaagtgggtctgctgcaggctggcccgcttagaggcctgggcaggggttcccccgaggcccggatggttggagggtccctccctggttgcacactgcccgcttacctgcaggtggtgccctcccgttatttttttctggaacatctgattttagatatctcgtccctcaagcactttccccagccacccttgaatcctcttcccactcggggtctcttctggagaagtgggtgaagattccttcaagggcgctaaagactgacatccctcttctgcctctgtgagcaggttcagtgcctgggctgctgtttttggggttacccgcctcttcatcctcacccttgccgtgctggccattggctttggactggctcgcatggaaaaccaggcatttgatcccgagaaagggaacttcaacactttgttttgcaggtgagtcgagcagaagtccaaggtgataagccagggagcctcctgaacttggcacagcccttgcagaaggtctggaggcagcagaccctttagtctcccacatattgttattttttggaaatctctggatatcaggcctgaggggagaagagatagcagcctctggttccatccaaaccatcttcatcccctagtcctggtttgctcagactgtagtccaaataggaatcccttacatttgtctggcactttgtggtgcacagaggcatcacacccagtctctcagttgatatcattctcctcttcttgtgtgtgggtgctttaaaaccatgtgcttaatggcttggccagtggcctcctgtggcagtgaggaagccactattttccggagcccctaggcccaggagagtgatttgtccagggttgctccacttttaagtgacatgttaaatgagaagccactcttccagaaattcagttcatttgaatgctaccaatatttgtggagcttacattagtcttgttctgtgcaatgggcgcaaaacagacacagccatggacccctccctcgtcataggagtagcgtgattgtagagctggccgtacgtctgtcgccacttccttcccgtctccctggcacatgtgatgtatgctggagcagagactgactgaagcacacattcttcctggtgatagtggtggtatcgaagagggccagtggtgaaggcggacgtgataagccatgggaactgcagggcccctggcccttgttctcccctgcacaacccagcccaaggctgtgagcccaagccccagcctaagcccctaaccccctgctctgcaggctctgcgtgctgctgctggtgtgtgccgcccaggcctggctcatgtggcgcttcatccactcccagctgcggcactggcgggaatactggaatgagcagagtgcaaagcggagagtcccagccacacccagactaccagccaggctcatcaagagggaatctggtgagtgccagggcccttggcagagagtggagccagggaagtctgtctgggatgggtgggaggagccaaggcacctggcttcttgggcgctgcccagaccaatcctgccagcttctccttcctgactcttacctcagggctggggctcctagctccctgattggcacgtggctgggtgtgggccagggacaggctgtgggtggggctggccctaactaggctgggagccctggccaccacggggcagggcagtggctgggtggggaactctggcaggaagcgtgtcctcagggtggcttctggaccccagccaagtgctgctactgccgccgccgcccattctcagtgccggacggcggcctctgtcctcacctgcccttttgctccacatcttagcctgcccctgcctcccagcttgctggctcctcctctgtctccaagaatgactcacagtgacatagtgctaggtggggggtaggggtgggacacttatcctttggcccgtgcacgcactccagtcatcacccaccttcagcaggtcctcaggccctgccagccctgcacgttctgcccagcctgggggcctgtctgcactgggcgctgctttctgactcacctgcttttctctaggtggccacctgcttggcaaaggcttatgtgtgtttgaaccagacacgcgcgcagctgggtgtgtcacagagtcaggcctggctggcgggggaggtatggggcataagactgcagccagtacctctgaatttgagcaagcgcacggaggtattttgaacaatagagcacaatttttctgccagaggagtgtcaggcatcctgcttgaggccttgttcctacagcctcttgtccccctcccttctgtggccactgctcctgggagttcttgctgaactggaagtgggctgatgccttgcaggggcctgagaagaactgaggacagtgagcagtgacagcatctaagtgatttcggcgagtatctagccccagcctcaggcttgggcaggctggcctctgttgttgctgagttactgtgtgtcatcccaggcccctcctgctaaagtgcagtcagagaccaagcctctcaaacagggccactagtccagggccctggggaagacaggaccctcctgggagccgtctgctggcttgcatttgctgtgcaaggctgcagcctggcgcccctttggtgcatccatgtatagcagctgggctgcccgggccccttccttggcctggccccaccctcccctcttctgccttagctccagcagaaacaccatgtatgcttgtctctctccacttcccaggttaccatgaaaatggagtggtgaaggcagagaacggaacctccccacggactaagaaactcaagtctccctaaggccaaagtgctaagaacaggaatcctcttggtgggggccgagcagggggcaaggagcccaggccccctccctgcctcctccttcctgcctgtgatgctccgtctcaaacagccgaaacctgtcttgcaatggggggagggggcgtttcgctttccttcttcttggcttcctcttattcttccacaaaccattctcaataaagccaaaaatctttctctttctccccctcaggccacctcctgtcctcactcctgtcctgtgctggcttttctggaacgccaggcgcccatggctggcacctttctgcttgctctgtctcttgccttatggctgctgcttttcctttttacttcctattttcaccttatcttgcaatttttctgtctgatttttacaatgggaggggagctaagattgcagtcctgtccttcggtcccccagggcctgccggtcagaagcctggggctggtaggcccttggtggtcctcatgtggatgggcaagaagagagcggccatctcggatcataatctccttggtgctgattaactgacgagatatatgattccagttctgcatgtaccatcttgaggcacagcagccactgctcgttgtaaatgccaaggcatttggctttgggacgtgacaactcaatccagaaggatggtgtgaactcggttgggtcccgtgactcgagctcctaccagtggctggccgcggattggaagccagcctgctgtcgctctgtggggggggacacgtcttcccactgcttagagcgagagcagagcaaactgcgcagcaggcacctccagaaaggtaatggtggcagaacccacagtggagtcgacctaggcctttctccagcagtcccagtcgccattgctttttcagccattcacaagcattcaaaaccaaaccaaacagcagttcatatacctgcctgagataggctggtcctcacctccagagccagccagccccgtcaggggccaaacttactaccttgacttcatctctagctgcagaaacactaagtctcaagggcttcagccccatgctggtcccttggtgttcagggagggtcacttggaccgctgttcatctggccgcccttgttgagtgttctttggaattgtcgttttttgagcacaactacagcattttagactgcatgaaaccatgactgactgagagtcactctctgggtagatgataggcgcctttctggccccttccctcacagattctttcccctcccctccacctgaagagaaggcctccaagtccttttggtgccttgtgaggacttttagaaggggcgttcagctttaaaaagccggtcctaattacggccggacgcagtagcttacgcctgttatcccagcactttgggaggtcgaggtgggcagatcacctgaggttaggagttcaagaccagcctggccaacatggtgaaaccccatctctactaaaaatacaaaaaattaggtgtagtggcaggcacctgtaatcccagctactcgggaggctgaggcaggagaatcgcttgaacctagaaggcggaggttgcagtgagcggagattgtaccatggcactccagcctggacaacaagagcgaaattctgtctaaaaaaacaaaagtcccaattaagaacctccgaactctgttttgaggcaaaggggagtagttcttggtaggtgcaggaatagtagtgtcatttggaatactggtcatctttctgacatcacagtagaaaccaaaccttggatttagattcaaaaggggggaaatgggtcttttcatcaaggcaactccccttctccaagtcacttacatcatagataaattttagcttcccagtaactgagggatttgtttcctaacgccattggaggccttcatccctctctacgataaggttgcagaaatgggaagagctacccgtggttgcttttgattacccttaggaagtgagacagtgtttttgaaaatatgtatttcccccatttctccctctccttccctgacacttctctgggctgcacagcagaaacgttggtaaaagggcagtttggtttcaacacagcagacctgatatgggatcccttagccactttagtcaaacagccctgacagagtctataattgagttcaggccccccaccttgcctaataactgcaaatcgcatgttcagccagcagcctcctaagcccaccttcctcccccattagagaacacccatcctaggtgctctccaggctgtgtcattggcagggcttcacatgcaggaggcctctctcaggtgagtccaggttaaactgttgagttgtggcttcaacagatatgtatggcatgctgggatgtgccaggtgcctgcgttgtgccagttgctggagaggtagtgtgagcagagcagctgaaatcttgccatcaagcaaccctcattctcatgcctgtaggtttccattgctctgtcccaggacacttgcgtgccagagacgccacaacttcatgtccctgtctcttgcaagctccccgtgctgccagtacttcatgccttggatgtggtcccaccagcccagtggccggggtcagcttaggctctgcttcccagtggacgggtgtgctaagggtttattttatgtaaaaaaaaaaaaaaaaacaaaaaaaaaccctgagaccatgagtggggctggcatcttgccagcctgggcttcagggatgtttggggggggtggttagagggtagttgtagggtactttgtcacccccctccccctgccaccctccctggcacgtttatttcacagcagagccaagtctgtggcaggttgacacagactgtgttgccagagctgaaataattccacttcatcctatgagcgtgttgggctagcttgttctaattttggccactttggctgttttcttcagttttatgcattctctcctgccccaaagtgccaagccatttgtgaaggctctgccagacacctccaagcttgagagctcagcaccatgcaccaagagcaggagaaaagacgtaaacctaccccagcaactgtggcctctcgacagccctggctaactaacttacatttgtggggaagccaacagacacagcaggaggagagggaggtggcgctggtggaccaaggatctgtgctacccgctcccctccttggaggtgcagtgatgatgggagttatttttaccatccgggcgctgatagctgcactattaataaattgcatgtgttccttttgaaggtaggggatggttctgggtgagaggggagcaggctgagccggcgggggatctgctgtcctcccttttgagtcagttctaatcccatgtgtgtctgggccaccagaccgaaatggttgctgagaaacttgtctgttcatgtcccaaggcataacttcccaacatttaagaaaccccaatagacacctctgccctggccacgttcacagatccttctcttgaccggaaaccctgggaccctaagaacccctgaagcttggggtgggtgtgtgcttctggggtctcttttgggacctcctttgtcagtaccccttcttttttctaagcagctaataagaggttgggtgaaagagtgcatctcctcccaggattccacaacaaaattcttatcttccatggatgctttaattggaagtgggttgccgacccccttgtgcctagaaaaggccttcgcttgggtttcctttgtatgcttcagccttcctagttggtttttctaggcctggtgtgagaggtagggaagtctgcacataactaattcttttgcttaagggcctatggcacaagtgcacaaacttcaattcttgatgttctaagctctctcctctaacagagggagtgctgaaagcttttgagtcaagacaatggagtgctcttcctccctcactctgccttccgagcttatggttccttttctcaggagaggattttcaggattattggaggattaggtcattgtcagatgactggaaaacctaaataggatctctctccagctcaaggttgtcccagtgaggaagactttaccaacttctcactctaccccactactcacatgagtgttagctccaccttgcaaaggctgaagaccagttctccccagtgaaagctgcctcattcttttatggagttccctggagtggcagagctataaagacgagcattgggatttgcagtctccatgtagcctttcgtgcttggcaacccctgtagactttttgtcccaagcagattgcgtgcgtgcgcctgtgtgtgagaataagtgccttactttgctgtgtggttttcaacttgtactccgtggccagcccccagttgccagggctcgacggcagccaaggacaccatacctcagtatagttatatataaaagggacacggattgtgacagtttcaccccatttgtttctaaccccgctgcccaggattagggtctgtggtgtgttctgttttgtttttggtttctcccttgtgtcagttctcttctggcccagctgggtggctgtggaagtctgtgaggtggcccaaccacaagcatacctattaagagaagcccagagcttccagcccccacttcgaaaactctcctctggccccacatagcaaactccttctccgttattttccccacccccagattttttttaaaaggcccacttgccgtaacctcttttggtctattttgcttcccattcagcccaaagtttatatgataaaggtgtttacttttacttcccagtctccaagtgctaacacataaacacatacatgtctgactgttgcagaactgttcgagctcctaattcagtgttaccttgttttagtcgcagcaaccctctcccctaccccttgcccgcccacgtttttctcactcttccgggttgtgcaataactctcccagccagtggtcctttccacagcctttctgtcccttaaaacacctgcaactgggggagaaatgggacccatgggagggggagtcgtcatcccttacacaagaaatagccactttccttttgttgtcattcttgtgatcctgggtgggtttctgtggcactcttttagaacatgtagcatcatcttagaggtctatttttaaaaaatgtgttgaagaggaaaaaaccattctcacgatggggcttaagtcattgtccaggaataagattggcgtggtgcccatgacatcaccgtcactctgcctaaaagcactctagagctacttgttcacgtggagaggaaggatattttgcgaagcaacagccgcaggtggagagccctgttcacctgatagggtctagctgtgacagtaaatataataccgctgtttccttgggtacagatttgagtgttcatgtgatgagactgtaaacctcatttttcggttcctctgtttaaaaaaacatctgaaggatgaactaaggctgctggtgccctgagcaactgataatgcaaatgtggacaaagtgtctgttttctactctagcctgttcatatggaccaaatttcaacaaggaactcaaggaaaatttgtacctgccgtatttatgctttcatgtaaaaaagggttggggggaggggtgtctttttgcttttggtgaactttttttcaaaatcatttttccactgtttctgtctggttttaaaacaaattacagttttgtatggattttttaaatgtacattttggaacaaatgatcaaatattttctgaaataacaataaaaggcagaaaattatcagaa

SEQ ID NO: 3471 - DNA, 617 bp, Homo sapiens
ggctgtagctgcttgctgtgtttaccagaaccatctttctttggaaaaagatctcaaaagatgagtgcagttacaggtggcagttagtcaaggacacccatggggtgtgagaaagaggaaatgtttgcttgaggtgaaggtgagtggttctgatgcatggcaagcttcattgtagagttgggtcctgctctgccatgagaagctaggtgaactcaagcagttaacccttccgagtctttttgtgcatctgtgtcaaaagggtttcatgttttgtggggagtcatggtgagagatttagagatactgaatgctaagttcatggtacatataaagcactcatattggctttttaaaatgaacttatgtgccagcaggatactcaggagtcacttaaccaagtggattctctggacaacatttagagacgtcttctctacctatgtgtcccaaataccctcaaagcctatagatatggatttgatacaccttaattggatggtattttcaaggccccctgatggtgcagacaaggtacaggcccaggtttctgagtagtggctaactcacagcccatctttacccgcaaggcagatttttattagtcccaaagccgtaag

SEQ ID NO: 3472 - DNA, 654 bp, Homo sapiens
tgccctctgggtttctaccttcttggcgaccccctgacatccacagagtgtcttcccttctggcctgccatggctggtggtctgtcagagccagtgtcctctgcctcatatagtgctgccaagagggcagtgtaccccaagggcaatacctggggccatctccctcaggaggccaccctttgcctttcccgagatctttgttttttgtcttttttctgagatggagatttgctcttgttgcccagggtggagtgcaatggcatgatttcagctcactgcaacctccacctcctgggtttaagcgattctcctgcctcagcctcccaagtagcttggattacagacatgtgccaccacgcccagctaatttttgtatttttagtagagatgggatttcaccatgttggccaggctggtctcaaactcctgacttcaggtgatccacctgcctcagcctcccaaagtgctggggttacaggcgtgagccaccacgcctggctgcctttcccgagatctttaagagcaataatagcaaaggatgtagggctgagttagaaccttcccttgctacttagagctgtttgttgtctcagtgtatctgttggtccctatctccaacagtgctctgtaatcagctccctcctcaaggctgaa

SEQ ID NO: 3473 - DNA, 860 bp, Homo sapiens
taattttttatttttattttttattatactttaagttttagggtacatgtgcacaatgtgcaggtttgttacatatgtatgggcaaggacttcatgtctaaaacaccaaaagcaatggcaacaaaagccaaaattgacaaaagtagtatcattctattatagctgcatggaaaaagttaatttattaatacaatggatgcctaaggacagaagtactcaaacttttggtctcagtactcctttacattcttaaaaatcattaaggaccccaaagaatgtttgtttacaagggttacttacattgataattaccacatttgaaatgaaaactgagaaacttagtattaattcatttaaaagtaagaaaacaattacttatctacataaatgaaaaagctattttccaaaacaaaaaatgaaaatttagtaagatgaatagccttgctttatgtttatacatctcttaatgtttggcttaatagaagactgctggattcttacatatgcttctgcattcattctgttgcaatatgttgttctgactgaagtgtatgaagaaaatgggcattcacacagacacgtattggaaaaggaagacttaaatggctttttcaaataactgtggacatttttctttgatactacaccaaaacttgacaagtggtagttttttaaaggttaactataacatagactcaagccatactaatgaactttttgtggcattatattaacattcactggtttatcatgcatgtagaatggactttcagccatgcataattttgtaatatcacatataagtcatttgaaaaatgccagttcactgagttatgcagaacttctaaacattggcacgt

SEQ ID NO: 3474 - DNA, 19172 bp, Homo sapiens
tggtatggcatgagaaaagtactttattcgtgcataatttttcagttccattcaaaattacagtacaaaaaaattcccttgcttgcagagtttttgttactttttacttaaatatttagagttaagaaaaaaatcaaatttaaaatcactattgatggaagcttatattccttatgaatatatacatgtatgcatatatacatctctgtatgaatcactcaaagcaattttaaacatcattcttttttgtatttaaaattgcccttttaaacatttagaagttccagaggtggaggctttaatggaatttttcccagagtaaatttcttggattgaaattgttccagttcttctactgttagtttatctctgggtgtgaataacacattatctgttgcaatgatgctgcttgaggctgacagagaagtggatatgctgctatttccaaaagtgtcactggatggcttagaaaaagcagtgtgagaatgtgagcccggactaccaaaaccagccacagaactgccacctccaaaggctggggccactggagctctgacaggacctgttgccaaggaagctggaagtcctgaaaatccaggtgatccaaaactggaagctgcagggcttttgaatgaaaatgatgcagccgatgtgacttcaggcttcccaaatccaaaagctggagcagaagtagagatacctgaactggtagaggctgcagctccaaatgctggggaactcccaaaaccagcagggcttccagaagaggcagcagcaaatccagagtttgttttaaaactaaagttctgagcattatcactgctgctgttattgactggaaagcctacaaacaacaacaacaacaaaaaaaacaacaaaaatctattacggtcagaaaaatgtcacaattatttcctccccctatctttttttcttatttatgtcatgtttcagtgttgagaagcttactggacggacgagatgaggaaagtaaaaatgagaggctagaactacccactaaagcctgctgcctgtcttttctgctaacaatcccattttcaccttgatcgaccttcacccaaggagaaaccacagggactagggaatagactttcactttggtttctacttacctcaccagagctgctacctgaggacaatgctatgctgttatacacagtgacaagaaagttctcaaaggtgctgctatcatagctatgtacttctacgaaactcctgaaaactcattcctaaaatgtacttctaaagcttaagtgtctttcaaagaacatgcccaatctggcctccctttcacaaatgtctaatgagtcaaatgctttgaggctctatgatggaaggttgtagaatttacgaaggtaatttaaaatggcgattcaggcttgtaatttgaaacctataaaatctaatttttctaaatcagtgaagtcctgcattactttatcacttacctggcgacataaatgttgctgcttgactgctgccaaatccaaatgcaggtgctgcttgatttactccatcctttacatcagagagctgaaaaaaaaaagtgtgcaaataataaagtgcttgatgaatagtgctccagtatcttttctatacactttatggacaaattcaagtttttaaaatgtgcattaaaggctgggtgtggtggctcacacctgtaatcctagcactttgggaggctgaggagggtgaagggcttgagcctatgagtctgggaccagcctcagcaacacagcgagacccccatctctataaaaaattagccagtggtcccagctatttgggagcctgaggtgggaggatcacttgagcctgggaaagcctggatgacaaagtaagactctgactcaaaaaaagaaaagagaagaaaaaagtgcattaaaaaaggcaaagttaaatgcttaacatggaaaatgcccataatatgatgttgaaaaggataagacataatactgtataaacagtataatcacaactagtaatatgaatatgcataaaaaatgtacattagtaagttaacagtgattatctctggctgataaattacaggtgatttaaattttatttatgcttttttatactttctaaatttctacaatgagcagatattataatcagaaaaatatttttaaatttttttcagtgtctataagggtagatctgcatttatcaagaaatctagatattaggtaaaaaggacctttatagaatacccagtctaatactcgaagtagatccactattatataattaaaagcttatgactaaaaatccattaaacatttcccattccctgaaagtactttatgttcttgctgttctgtgctctagaaatgtctttcatctctgcttactgaaatcttaatcctactttcaaggaactttgtatttgctccttcctttcaagaagactttcttaatcatccaaagcaaacataagcgatttctttcatttggaagcctcaaaagcattctttggccggtgtggtggctcacgcctgtaatcccagcactttgggaggctgaggcgggcggatcatgaggtcagaagatcgagaccatcctggctaacatggtgaaatcccgtctctactaaaaatacaaaaaagctgggcgtggtggtgggtgcctgtagtcccagctattcgggagactgaggcaggagaatggcgtgaacccgggaggcggagcttgcagtgagctgagatggcaccactgcactccagcctgggtgacagagtgagactctgcctcaaaaaaaaaaaaaaaaaaaaaaaaagaatgcttttgtttttgagactgcaacctctcctgggttcaagtgattctcctgcctcagcctcctgagtagttaggattacaggcgtgtgccaccatgcctggctaatttttgtatttttagtagagaccgggtttcaccatgttggtcaggctggtcttaaactcctgaccttgtgatccgcctgcctcagcctcccgaagtgctgggattacaggcgtgagccactgcacccagccctcaaaagcattcttgctcctggtccctggcaaccactctgtctgctttctatcactacaaatgagacttgtcttttccagagtttcatacaaatggaatcacatggtctacactatttttttttttttggtctggtttctctccctcagtgtaatattcattaacaggcagatgataaacaaattatatccatacaatgggttaccattcagtataaagaaggcatgaactcctgatacatgttaagtcagctatgggtgggttgtcccacattctaacctatggaaggggccctgggcagttagcaaggagcagggaccttccagccctgagggaagttccacagttctttggactcagttatcctttctccatcagctctcatccatggtgatggtgggccacctctcacacaaggacagactacttccaagaggtcccactaaattcaaatagcattacaagaactaaaagatgaaagaaattagcttgcacaagagtctagttattcaggaagcacatatttaagaaaggggtggggtgttgggactgtcaaccattcactaagtgtagggagacattactctcatatccttatacagagtagaaaccatctgagaaattggaaatattaaaattataaatgtgaatatcttattttaaaataaaattcttaagaactttttaatgggtgtagaaacatcataactttatttacaaagataatgaacttgccacagtcgggaccatagatctttggagacaggtgggtatatatcttccaaaggcatttctgtttaagacaaggaacatactgtgttcttcagtcgcaaaacgatacattacattctaaatgtgcattcatataactgttcaaagtaatttctttttacatacagataaccttaaatacttaaacttatgtaatagtttgccattttcaaaactagcactaccaaagttaaaaactttaccctaaaaagcttttaaaaagcataactatttctgcttttctgaccaaggaacacagagaaaactatttcaagaccctgactcttaagtgatgctattttgggaatgtgtgtatcataattcttgatagaaaatttttgttttgctttccaaatctaaagtaaaatatcctctgcaaaaaagcaataggtaagacacttccctcaagaaaactctcccatactcaccaaagctactttagttgatatatttagacttttcagttcatttaccctgttcctccattgatttattaaacgttggacagaatttagctgaaaacggaagacagaaaaataacagttcaatattgtatgtttaagttagtttcttcaataaaaacttcacatacttctttgccaaaatcacaaaaggtttatgtaacagttttatggcccatgacttgcaaaatttgcattgacttggcctatttgtcaaagatatgccagctccagttccctctcccgttcaactccttgtatcatctggttagtatcacaagtacctggcagcacgtagttagttatatttggatgggcggtgaatacatgtactagttgaaatgcatgatcatgactgtagaaacagaaaaatacagcatttaaactgcttccttcaggtactcaacttattctagtcaagatttttaattttttttgatatttgatatatgaggatgttaatctgtattacagactgtatcttatttaactttgtttttctagcattcatcactggattggtacctaacagatgttcaataaatatctgtcaaatgataaaagggtttcatttctgggattgactgttgggtaatttataataaaaatagtaatattcctaattattaaagtaaaaatatattatcattttaataaccaaccaaattcaatgaaaataatatagaaaagaaaaatagcctactcctgaaaaaagatcatagacctcatcggttttgccaaaacacaagccacgataaagaaagcagtaattaagagctcatctgttattgcagtagattaataggaaacaaacttacataactctgtaagttattgctggttaagaagttatggtattcaagcctcaattcctctggtgaaatgtctgtaaaacctgaagtgaggaatcaatcggaatctttaaaataaatgccaataattttgatagtaaagctagaggtgctaaacaagaaaatatctaatgttgattagaaaattttcataaccatgaggaagaaacttaaagcctacactctacttaatgtttaataaagtgtaaaattacagtaaaatatagttggttattctgatctttaaatggggaagattttctaaagataagtggcgtagaatgaacaacaaacacaggagaaagatttgactacatttatattcaaacttttattttaaaaattctgccagaaactatactaagcaaaattacaaggcaaatggtacactaggaaaattgcaattttaacatatatgacaagagaagaactaatgccctaatgtacaaatagctcttacaaataaatgagaaaagtaaatgaatttgggcaaagataatgaacaggcaattcacacacaaaaaaaatcaaatagtaaataaatgaaataaagttaaatgcaacttaaaatagagataaaatgctttacttatcagactggcagaaattttaaaagctggtatttactgttgttccaaatgtggtgaaatgtatcatttcctaaattaccgttaagggaattaaaatggtacaagttttctgggagggataattgttaataagcatcacaagcctgaaaaacattcatatcctgtgacttataatacaatttataggatttaaccttgggaaatagttatatatgtaaacaaaggttgctatgtataagggtgttcattctaatatttttagtaccagagacaaactgaaagcaaaaattagaatataaaactagggccgggcacggtggctcacgcctgtagttgcagcactttgggaggctgaggcggatggatcacgaggtcaggaaattgagaccatcctggctaacatggtgaaaccccctctctactaaaaatacaaaaaattagccgggtgtggtggcatgagcctgtaatcccagctactcgggaggctgaggcaggagaattgcttgaacttgggaggcagaggttgcagtgagccaagactgcgccactgcactccagcctgggcaacaaagcgagactccgtctcaaaacaaaaacaaaaacaaaagcaaaaacaaaaaaaactggattacagccgggcgcggtggctcacgcctgtagtcccagcactttgggagaccaaggccggtggatcacctgaggccagaagttcaagaccagccgggccaacacggcgaaaccctgtttctactaaaaataccaaaattagctcggcgtggtggcatatgcctataatccgagctactcgggagactgagactggagaatcgcttgaacccggaaggccagccgaggctgtagtgagctgagatggcgccactgcactccagcctgggcaacaaagagcgaaactctgtctcaaaaaaacaaaacaaaacaaaaaacaaagaaaaactagattatgatcctaatcatatatatgtatacgtatatatgtataggtgagaggtgacagcttgctggcagccctcacattcctcactcgctctgggtacctcctctacctgggctcccactttggtggcacttgaggagaccttcagcccaccgctgcactgtgggagcccctttctgggctggccaaggcctgagctggctccctcagcttgcagggaggtgtggagggagaggcgcgagtggcaaccagagctacccagggcccttgctggccagctggagttccgagtgggcgtgggcttggtgggccccacactcagagctgccggctggccctgccgggcaatgagaagcttagcacccgggccagcggctgcggagggtgtgctgggtcctcagcagtgccggcccaccggcgctgcgctggatttcttgccgggtcttagctgcctccctgcggggcagggctcgggacctgcagcccgccatgcctgagcctccccctcacctccgtgcgctcctgagcagcctgagcctccacgaggagcgccaccccctgctccaccggcacccagtcccatcgaccacccaagggctgaggagtgtgggcacacaccgcgggactggcgggtagctccacctgtggccctggtgtggaatccactgggtgaggccagctgggctcctgagtctggtggggacttggagaacctttatgtctagctaggggattgtaaatacaccaatcagcactctgtgtctagctcaaggtttgtaaacacaccaatcagcaccctgtgtgtaggtcagggtttgtaaatacaccaatcaacactgtatctagctactctggttgggacttggagaacctttgtgtccacactctgtatctagctaatctagtggggacttggagaacctttgtgtctagctcagggattgtaaacgcaccaatcagcaccctgtcaaaacagaccacttggctctctgtaaaatgaaccaatcagcacgatgtgggtggggccagataagagaataaaagcaggctgccccagccagcagtggcaacccgctcagctcctcttccacactgtggaagcttcgttcttttgctgtttgcaataaatcttgctgttgctcactctttgggtccacattgcctttatgagctgtaacactcaccgcgaaggtcttcagcctcactcctgaagccagcgagaccacgaacccactgggaggaacaaacaactccagacgggccgccttaagagccgtaacactcaccgcgaaggtccacagcttcactcctgagccagcgagaccacggaccccaccagaaggaataaactccgaacacatctgaacatcagaaggaacaaactccggacacgatgtctttaagaactgtaacactcaccgcgagggtccgtggcttcattcttgaagtcagtgagaccaagaacccaccaattccggacacataggtatacatatatacacacatagaacaacttatacatccctgtacaagtggacccttgcagttctgttcaaaggtcaactgtacacacagctgtacagggtccacttgtacaggggccacttgtacagggattttcttccgcctctgccactcctgagacagcaagaccacacccacctatccctctgctactcaacataaagacaataaggatgaagacttttatgatgatccacttccactatgtgaatggtcaatatattttcttatccttatgattttctttttctttttttttttttttttgagatgaagtcttgctctgttgcccaggctggagtgcagtggcatcatctcggcttactgcaacctcggcctcctgggttcaggcaattctcctgcctcagcctccacagtagttgggattacaggcatgcaccaccaagcccggctaattttttttgtatttttagtagagatggggtttcaccacattggccaggttggtctcgaactcctgaccttgtgatccacccgcctcagcctcccaaagtgccgagattacaggcgtgagccaccgcgcctgatccgttatgattttcttaacattttcttttctcttacagtacgttattagtagttaagcttttggggagtcaaagcttatacgtggatttttgactgcacagaggatcagtgccgctaaactttatgttgttcaagggtcaattgtatacataaacaagaaatatgtttgtgtgtgtatatgtttcgaaagaaatatactaaaatgtagtagttacctctgtgatatcaggttatttttattttatttatatatttctgtactttccaagttttctaaagcaaaagctgtaacttgttttttatttttgagacacagtctcattcctgtcacccaggctggagtgcagtggctcactgccgccttgacttcctaggctccagtgatcctcccatctcaacctcctgagtagctgggactataggaatgtgccaccacaccctggtagagacagggtttcgccaagttgcccaggttggtctcaaattcttgggctcaagtgatccacctgcctcagcctcccaaagtgctaggattacaagcatgagccaccacatctggcccaaaagctgtaacttttataattgggcaaacttactaagaaaggcaaaaaatgttcaagatattttctacaaagaattccttgtaatccagttattattaactccaaggacacctgcttcagagtaaaggaaagactaaatgtttccctggattccttctaatgacttgtcttccccatctttactgacctctcaggccaaaaaaccctaggaatcaccttggatttctctttccctatatctagttaatcagcatcctgccagttcaagctccaacagagaacccaaatatgaccaattctgtcttcactgctatgaactctagtcacaagcagcaatgtcttctaacttgtctccctatctctacttttgccacggctcccaacagacctttctcccccctcacacagcatgctgagttagctttttctaatcagatcacgtccctcttttgcttaaagttcttcatggctgcctgcccagtgcaattaggcccaacatgatctggcccctggctatctctctggccttactgtcatattactttcccttgtttactctcctccagtaattcaggccccactagtctgtaaacactgccaaccttgttcttacctcagggcctttgcaatagctagtcctactgccaggaatgttttccccaaatcttcccataactgataccctctctttattcaggactcatttccaatactgtctcccaggaatagataaccactctatctaaagaaatattgttcccctaattgcctattccttccagctgtgctcaaccagaattcctcatccaaaccacagaacacagaaaatgatttgagtgataattttctcaagtcttgcaaaatggggcaaaagtagtatcattctttttttaattttttatttttattttttattatactttaagttttagggtacatgtgcacaatgtgcaggtttgttacatatgtatgggcaaggacttcatgtctaaaacaccaaaagcaatggcaacaaaagccaaaattgacaaaagtagtatcattctattatagctgcatggaaaaagttaatttattaatacaatggatgcctaaggacagaagtactcaaacttttggtctcagtactcctttacattcttaaaaatcattaaggaccccaaagaatgtttgtttacaagggttacttacattgataattaccacatttgaaatgaaaactgagaaacttagtattaattcatttaaaagtaagaaaacaattacttatctacataaatgaaaaagctattttccaaaacaaaaaatgaaaatttagtaagatgaatagccttgctttatgtttatacatctcttaatgtttggcttaatagaagactgctggattcttacatatgcttctgcattcattctgttgcaatatgttgttctgactgaagtgtatgaagaaaatgggcattcacacagacacgtattggaaaaggaagacttaaatggctttttcaaataactgtggacatttttctttgatactacaccaaaacttaacaagtggtagttttttaaaggttaactataacatagactcaagccatactaatgaactttttgtggcattatattaacattcactggtttatcatgcatgtagaatggactttcagccatgcataattttgtaatatcacatataagtcatttgaaaaatgccagttcactgagttatgcagaacttctaaacattggcacgttattatacaacatcaaaaaaatttttttttttttttttgagacagagtctcactctgtcacccaggctggagtgcagtggcacaatcttggctcactgcaagctccgcctcccaggttcatgccattctcctgcctcagcctcccaagtagctaggactacgggcgcataccaccatgtctggctaattttttgtattttttagtagagatggggtttcatcgtgttagccaggatggtctccatctcctgacctcatgatccacccacctcggcctcccaaagtgctgggattacaggtgtgagccaccgtgcacagccaaaaaaattttttaaagagacagggtctcgctctgtcacccaggctggagtgtggtggcaccatcagagctcaccataactttgaactcttgaactcaagtgatccccccacctcagcctccagagtagctaagagtcttggcatatgccatcatactcaggctaatttttgtattttttgtagagacaaggtcttgctatattgtccaggtggtctcaaacccctggcttcaagccattctcccaccgcagcctcccaaagcactgggatgacaggcatgagctgctgcgtgtggccctcacatttgtgaatgttgccatccatttaatcagaagagattttaagtactgagaagccatcatgctcacgatgacaaagttttccgtaatttcaatttttgcttgaaagttttaatttttttcattggcaataaacactatcaactgttttcttctaaataaccatagttgtcattcctttcaaataaatattgtctttgaaaaaagtggctagctcagtccaacttgaacaattacacaagattgttcatcacacttgggcatggggcagacacactttttgtgtgcttcccattttgtcacacagaatactaaaaaggtgcgtactcagggtcaagggttaacaaaattaataatttttatctcttcataaaggaagttcttaagttcaaatggcattaaacatttttttattgtgacatctactagtaatttattgcctctgccttgattcttgctaagatacaagtagttctactcctcaatgctgctgcaccaacagtgcaaatgtcaacacagtgaaaaatggcaattaatcacttagtattatcagaaaatatttttgaactcaggcaactcctaaaagggcctcagggataaagttgccagacttagcaaataaaaatacaggatgcccagttaaatttgaatttcagatatacaataaatactttttttagtataaatgtgccccaaatattacatggcatgtacacatactaaaaacactgtttatctgaaatttaaatttaaccggatgtcccatattttatctgacaactatattcaggaatccacattttaagaaccactgctttagggcaacaggcattaggttcaatttggaatggattaatactcaagtactaatacttaagctgattaagggcttaatactttgtggtttctttatagaaaatatcattatctgaaattatcttagtttatttgcatcacttattgttttcctccctcaagaatgtaagattcataaggaagggatcttgtctgtcttgctcatcactatattcctagcacttagcacaaaagaaattcagtaaatatttgttaaatggacaagtgaataaataagaagcgttgtaatgcaaatgctcacagaaaatgagcaactagaactgagacagaggaaagatcccaaggttctgcgatattgattgcaagagctcccatttgcaaggtacccactgtttcctcaaaaggacggaggcccaggaacacccagagtgggcttgggaaagcccggtggtctaggtttcagcccagaaagggcttagggactatggacaaaaaaaaaaataaaaataaaaaataaaaaaagagagagagaatattctaaagcaaatgctattccaggccagagagagagagagagacagagaatattctaaagcaaatgctattccaggccaggtgtggtggctcacgcctataatcccagcactttaggagcctgtggcgggcggatcacctgaggtcaggagttctagactagactggccaacatggtaaaaccccgtctctagaaaaatacaaaaattagccaggtgtggtagcgggcaactgtaatcccagctactcgggaggctgaggcaggagaatcacttgaacctgggaggcagaggtcacagtgagccgagatcgcgtcactgcactccagcctggaggacaagagtgaaactccgtctcaaaaaaaaaaaaaaaaaaaaaaaagttgctatccctgtagcccagctaagcctcctcacatttaaacattatctccagaacaggtctcaacacaactattcttagaaggaaagacagggaagaaagaacagaaccaggcagccaaggccttaatgacaggcaggatgactcttctattcacaacaggaagctaagaggttccaaagttgtacatacagggaatcaagaacgtagagtctcttcctgggctttatttaaatgttttctcccaagaactatatgtcttaaaagactatattctccaaccttaatctctaaattatgaagtttggctagaatactcgaatactttaaacaatgcccaaactctcctagttgtagctaagttggtagttgatttctttatttggcattcttttggttttagaaaataatagttttagaacatactttaaaaatgcacaatttttcagttacctgaaatattaggtttctttttcactggtgaataaacagaaaacatccactgccctgatgattcccaaacctccatatcttttacaattccttccctgcaaaaaagaaaaaaaaaaaaagagtaaaggatcttcttagctgcttggtaaaatttattgttaatggttttccacaactgaaaatttaaattctagtaaatacttttccattatattttctgaagagtgttctttaaagcacaagtttatagaagtgtgaactatatttcatggttacaaatagtattataatgtcagagaagttaatgagtttggctttccaatacactgacccattaaccaatgttaatacataacattggttatgatatgtaaccatatcatatggtatcattggtatgatatgtaacattggttatgatagtaattacataaatactatcatagataccatactttttttaggaattaaaatctaaaatactaactttaatctttgttaattatcacaaacatcaataatcatttaactgggaagaacaaagtaccacttacgtgatacagaatcataatattttaaaagtgggttataggacttcagagatcattttatctaattctcacattttgcaacaggggaaacagacccacatccatacaactaatctgtggtaatgccgtgggtagattcggctctaaattaaagtttctccctacttagactatgtcaataaaaggagaattatcacagagaaaactgtattaaatttagaattgcaacaaatgcagaaaggaaggttttgtttgctcatttacttaaaaaaaaatcggttgtatatggtatatgactcaacatgtctacaactggttctgatttaattaggataagtaaaagactaaccaattacatttaaattccatcctagtcaccatgagttgagagaacattacagatagccaagcattgttttgacaccagccataaattttaccataaatattctcaagaaatgtcatgtatctactccataataaatgtaggaaatcaaatgagatcagtttgaataggataatccaagtaaaagttttagaaagaaataagatatgtggctgggtatggtggcttatgcctataatcccagcactttgggaggctgaggcaggcagatcacttgaggtcaagagttcaagaccagcctggccaacatggtaaaaccctatctctactaaaaacacaaaaaattagctggcttggtggcaggagcctgtaatcccagctacttgggaggctgaggcagaagaatggcttgagcccagaaggcggaggctgcagcgagccgagattgtaccactgcactctagcctgggcaacagagcaagactccgtctcaaaataaataaataaataaataaatgagatggtaaaatgacctccaagttcacaagttgttctaaattacatcatactttgtaaaggacttgtaagttagaatgaacttaagcaggactaatcttagaaagatattcacaatatagtgttatcaacacaaagtggaaaaagcgtaattacccctaggaaggcactctactattatagaaagatgatatatttttaagtgaaataaaatctagggtaatacacagcaaaagagtggctatctatgagtgatagaattgtgggtgatttttcttctttttgctactctgatttaaaaataatgcattatttctttttttaaagaaaatattgtattgtgaaaagatgttacaaaaaaagagaaacaacaaagattgtaggtgaaaaaacataagcaaatggatagtaattttcctgaaaactttcacttacagaagtttcttttcatctttctgctcatcaggactaagtgaagcaaatgggttctcagacaatccaaagccttccttcctgttagttgaagctccagaatcaaaagaactgaaatatggcttttcttgatctctgctgcccccccatggtgtggatttggagaaactggatggctggatgacattggaatatctctggctagttgtattccatccacgtctattattacctaaaataaacaataaaacaaaataattttactagcaacttttctttctattttctttttaattgagatagggtctcactcttttgcccagggtggagtacagtggcatgatcttggctcactgtaacctcaacctcctaagctcaatcgatcctcccacctcagcctcctgagtagctgggaccacaggcgcaaaccaccatgtctggctaatttttgtactttttgtagagataaggtcttgccatattgcccggggttggtctcaaactcctgggctcaagagatccacctgcctcagcctcccaaagtgctggaattataggcatgagctactgtgcccagcaactgttctttaaaatctcaaaaatcttcattatatcttagtatgtctagacaatatagaaagattcaacaagcactacatttaaactcattttaaatgacaatctcttcattttttatttatatacagtagttaggttgtaatatcaacaaatcacatagtggccaattgcatttttgtttgagattgagaagaaaataatatagaaaaatagtgatatattactaaattcagctgacaaagcttattaaatgaacaactgcttgatagttaaaagttgacagaaggcatgcatcataaatcataaactccttcaggataaaaacttgggtttttatcattctttgctcccccaccaggccctatactgtagtaaaggctgaaaaatggacattgaattaaagtttctcgaatatgaaagattacattctaccctctgtttttgtacagatgcttaagtctatttgacgcagtcttttctctgggcaaacacctacacacctattttcacagagagattatacatggtatttacatgtgtacagaatgcatgtagttcctctaccagctttccaatatttcataaatatcaaaatgagccaaaaagattctctcctctctttatatattggttttgttttgttttttaaaatcattttagcaatctcatttactcatcacttcctagttggggccaagattaaggtaattcatcttgtttctgactgaataaagagataagccattaattatattaaaagttagaatgacacacatgcccagttgtgaaagttcatcctgcaactctaaactaccctaaaaaaaaaaaaaaaaaaagtggagattgctagaccagatccctcaagtagaagttaatggtatcttcttcttctaaagttccaaattcactgggggatgatacaactgaagaaactcacttcctccttttttttttttttttttttttttacattgcttttggtcttcatacttataattccagaaacattcatttgtttctgggagctaaatacaatttgtctgccaaattttgtttacactcacattcatcagacatgagtcctaattttcggtctgaaatatttcactagattaattgtggaggaaataaaaggactgtcttccctgaagtgggatcagacgtgaaaccatcacgcaatacaaggtttaaaggttagatgaggcccgccgcggtcgctcacgcctgtaatcccagcactttgaaagacggaagcgggagtatcaccttaggtcacgagttcgagaccggtatggccaaaatggcaaaaccctgtctctactaaaaatacaaaaattatcaagggcatggtggcgggcacccgtaatcccagctactcgggagactgaggcataagaatcgcttgagcctgggaggcggaggtcgcagtgagccgcctgactgagagagcaagactccgtctcaaaataaaataaaaaaataaaggtcagatgaatagccctaaaggaggggaaggaagggagacagcaccgaattattaacccgatctttaaaaatcttgtgttgttctaaggtttcatgtctaatctctcctttccttgaagataaaaagctttgacaatgatctaggcccagggactagatcaacgtggcccccgcatctcctttcctcacctcccggatagcccttaactgggcgtcccacattcccaatttcaccccaaatttatgagcaggtgcatttttgcggtatggctctataggttttattagattttctttttttcttttctttctttctttttttttttttgatagtctcgctctgtcgcccaggctggagtgcagtggcacgatctcggcccactgcaacctccacctcccgggttcaagcgattctcctgtctcagcctcatgagtagctgggattacaggcgcgcgccaccacgcccggctatttttttttttttttttttttttggtatttttagtaaagacggtgtttcactatgttggtcaggctggtctcaaactcctgacctcgtgatccgcccgcctcggcctcccaaagtgctgggattacaggcgtgagccaccgcccggccggttttattagattttttcaaagaagtccacgacttctccaaaatgaagtcctgattctgacccaagctgctagcctcaccctcgaaaaaacaacttagtaaaaattatattcaattccggcatttacctacaaggtagtttcgataggtacttccgatttaaaaactcagtttcgcacaagcatccaggcccaaacccaggtcctcagaagctcaataaaaacggaccacatgaataatatgtagataaaaccctcggtttaaaaacgttgtgcagggcccagtagggccggcaaggccgcgacgcgggcacgttggggtcaccagcagcgggaaacacgcgggacgcccggtccccgccggcggacccttcccggctcggttaccgcggaggattcagaggagagtcacctgaaggctgctgctgcggttgctgccgtcctcctcctgcacccctagcaccgggatgttcgttccagcaccgatctccaaagcggcaccggccttgaaggaagaattgacaaatggccattgcgacggcgtcgctgacggagggcgtcttcagtctgcaccgttcgatgcctgttactgggcagagagccctaaggcaacctcggcgcccggccgggctactgtgacgtcatcttctcgcgcctgggaaggcctttttccgcctctcacccggcagtgccatgagacgcatggacttgagccaataggacttgagaagagcggaccgctctgacgctttgagtgtgtcctgggaaggagggatgct

SEQ ID NO: 3475 - DNA, 1701 bp, Homo sapiens
tttttttttttttttttgagacagagtctcgctctgtcacccaggctggagtgcagtggcacaatcttggctcactgcaagctccgcctcccaggttcatgccattctcctgcctcagcctcccaagtagctaggactacgggcgcataccaccatgtctggctaattttttgtattttttagtagagatggggtttcatcgtgttagccaggatggtctccatctcctgacctcatgatccacccacctcggcctcccaaagtgctgggattacaggtgtgagccaccgtgcacagccaaaaaaattttttaaagagacagggtctcgctctgtcacccaggctggagtgtggtggcaccatcagagctcaccataactttgaactcttgaactcaagtgatccccccacctcagcctccagagtagctaagagtcttggcatatgccatcatactcaggctaatttttgtattttttgtagagacaaggtcttgctatattgtccagggtggtctcaaacccctggcttcaagccattctcccaccgcagcctcccaaagcactgggatgacaggcatgagctgctgcgtgtggccctcacatttgtgaatgttgccatccatttaatcagaagagattttaagtactgagaagccatcatgctcacgatgacaaagttttccgtaatttcaatttttgcttgaaagttttaatttttttcattggcaataaacactatcaactgttttcttctaaataaccatagttgtcattcctttcaaataaatattgtctttgaaaaaagtggctagctcagtccaacttgaacaattacacaagattgttcatcacacttgggcatggggcagacacactttgtgtgtgcttcccattttgtcacacagaatactaaaaaggtgcgtactcagggtcaagggttaacaaaattaataatttttatctcttcataaaggaagttcttaagttcaaatggcattaaacatttttttattgtgacatctactagtaatttattgcctctgccttgattcttgctaagatacaagtagttctactcctcaatgctgctcaccaacagtgcaaatgtcaacacagtgaaaaatggcaattaatcacttagtattaccagaaaatatttttgaactcaggcaactcctaaaagggcctcagggataaagttgccagacttagcaaataaaaatacaggatgcccagttaaatttgaatttcagatatacaataaatactttttttagtataaatgtgccccaaatattacatggcatgtacacatactaaaaacactgtttatctgaaatttaaatttaaccggatgtcccatattttatctgacaactatattcaggaatccacattttaagaaccactgctttagggcaacaggcattaggttcaatttggaatggattaatactcaagtactaatacttaagctgattaagggcttaatactttgtggtttctttatagaaaatatcattatctgaaattatcttagtttatttgcatcacttattgttttcctcaagaatgtaagattcataaggaagggatcttgtctgtcttgctcatcactatattcctagcacttagcacaaaagaaattcagtaaatatttgttaaatggacaagtgaataaataagaagcgttgtaatg

SEQ ID NO: 3476 - DNA, 182 bp, Homo sapiens
tttttattttatttatatatttctgtactttccaagttttctaaagcaaaagctgtaacttgttttttatttttgagacacagtctcattcctgtcacccaggctggagtgcagtggctcactgccgccttgacttcctaggctccagtgatcctcccatctcaacctcctgagtagctggg

SEQ ID NO: 3477 - DNA, 232 bp, Homo sapiens
gatcatgaggtcaggagatcaagaccatcctggctaacatggtgaaaccccgtctctactaaaaatacaaaaaaattagccgggcgtggtggtgggcgcctgtggtcccagctactcaggaggctgaggcaggagaatggcgtgaacccaggaggcggagcttgcagtgagccgagatcgcgccactgcactccagcctgggcgacagagtgagactccgtctcaacaacaa

SEQ ID NO: 3478 - DNA, 417 bp, Homo sapiens
taacgcgccaatgcggcggacgaagcggctgttaaagatggtcatcacgaacagaaaaacaatgtttagcgcaaagtaataaccaaagttttccggcgcgacgtggttaatttcaatataaacaaacggtccggcgcttaagaatgagaacatcccggcaaagctgaaaccactggcaagcatgtagctcaggacacgtttatggcggaacagcgccgcaaagttaccaatagtggtacgaatgtgaaatggctgacgacgctccggtggtaaggtttctttaatcaggaagaaaatcattgccgaagccagaatcgccgctaatgccaggatccagaagatgtaatgccagctcagccacaccagcacccagccgccaactatcggtgccatcagcggtgcaatggttgtcaccag

SEQ ID NO: 3479 - DNA, 390 bp, Homo sapiens
tgctgaccatctggctgggttacgcgctgttttacttcacgcggaaaagttttaacgccgccgtaccagaaatccttgctaacggcgtgctcagccgtagcgatatcggcctgttagcgaccctgttttacattacctatggcgtgtcgaagtttgtctccggcattgtcagcgatcgctcaaatgcccgttattttatggggatagggcttatcgccacgggcattatcaacattctgtttggcttctcgacgtcgctatgggcgtttgccgtgctctgggtgctgaacgcctttttccagggctggggttcaccggtgtgtgcgcgtctgttaacggcctggtattcacgtaccgagcgcggcggttggtgggcattatggaacacgg

SEQ ID NO: 3480 - DNA, 900 bp, Homo sapiens
tgctgaccatctggctgggttacgcgctgttttacttcacgcggaaaagttttaacgccgccgtaccagaaatccttgctaacggcgtgctcagccgtagcgatatcggcctgttagcgaccctgttttacattacctatggcgtgtcgaagttgtctccggcattgtcagcgatcgctcaaatgcccgttattttatggggatagggcttatcgccacgggcattatcaacattctgtttggcttctcgacgtcgctatgggcgtttgccgtgctctgggtgctgaacgcctttttccagggctggggttcaccggtgtgtgcgcgtctgttaacggcctggtattcacgtaccgagcgcggcggttggtgggcattatggaacacggcgcataacgtgcggcggcgcactcattcccattgtgatggcagcggctgcgctgcattacggctggcgtgccgggatgatgattgctggttgtatggcgatagtcgtggggatttttctctgctggcggctacgcgatcgcccgcaggcgttaggttaccggcggtcggtgaatggcgacacgacgcgctggaaattgctcaacaacaagaaggggcagggttgacgcgtaaagagatcctcaccaaatatgtgttgctgaatccgtatatctggctgctttcgttttgctatgtgctggtctatgtggtccgggcggcgatcaacgactggggcaatttgtatatgtccgagacactgggcgtcgatctggtcacggcgaatacggcagtgacgatgtttgaactgggcggattatcggtgcgctggtagccggttggggctcggacaaattgtttaacggcaaccgagggccgatgaatttgattttcgccgccggaattttgctttca

SEQ ID NO: 3481 - DNA, 580 bp, Homo sapiens
gcatgtccccattttcccctcccagccactaaactgttttctgtcaatatggatatgtctatacttctatatggatattctggacacttcatggacttttctgtctagtttctttcacttagcataaagttttcagagttcatctgtgttctagcatgtgtactacatgccatttttggttgaataatattccattgtgtggatataccacatttggtttaaacattcatcagttggtggacatttgggttgtttccactttttgactattaataataatactgctggccaggcgtggtggctcatgcctgtaatcccagcactttgggaggcccaggcgggcagatcacgaggtcaggagatcgagaccatcctggttaacatggtgaaaccccgtctctactaaaaatacaaaaaattagccaggcatggtggcgggcgcctgcagtcccagctgctcgggaggctgaggcaggagaatggcgtgaacccgggaggcggagcttgcagtgaaccgagatcgagccactatactccagcctgggcgacagagcaagactctgtctcaaaaaaaaaaaaa

SEQ ID NO: 3482 - DNA, 345 bp, Homo sapiens
gcagtatctcgttgtggttttgagttgaatttccctagtgactaatgatattgagcacattctcatatgtttattggccatttgtattctttggagaaatatctattcaaagtcctttgtccattttaaattggaatgtcttttttgttgttgagttgtaagagttatttatatattttggatactagacctttatcacatacactatttgcaaatatttttttcattctgcagttgtctttttaattccttaatagtgtcctttaatatattaatacaaaaatgtttaagtttgatgaagtccagtttatctgtttttttcttttgtggctcatgcttttagtg

SEQ ID NO: 3483 - DNA, 309 bp, Homo sapiens
ggccgggcatggtggctcacgcctgtaatcccagcactttgggaggccgaagtgggcggatcacaaggtcaggagatcgagaccatcctggctaacacagtgaaaccccatctctactaaaaatacaaaaaattagccgggtgtggtggcgggcgcctatagtcccagctattcgggaggctgaggcaggagaatggcgtgaacccgggaggcagagcttgcagtgagccgagatggcgccactgcactccagcctgggtgacgagtgaggctccgtctcaaaaaaaaaaaaaaaaaaaaaaaaaccaa

SEQ ID NO: 3484 - DNA, 413 bp, Homo sapiens
gtttgaggctgtagttagctatgattggaccactgcaccccagccttggtgacagagcaagaccctgtctgtaaaaataaaataatgaaaaaaaaatttttttttaatttgcagactggatgtggagagtaagagtaagaggggagtcaaggattactaaggtttttggcctgatcaactgaaagaatggagttgctctaactgagatagggaggacctgggaggagcagggttgagaggaattaggagtttggctttgagtatgttacgtttgagaggtatagttccaggaagaagtcgtggctggataaaatccccaagggagtgggagagagacaaggactgaggcctgggacattgaaatgttagggatcagggaggtaggagcagctggcacaggagtccctggagga

SEQ ID NO: 3485 - DNA, 502 bp, Homo sapiens
aaacaagtatttttaatatcatacatttgggaaataggcacatcagttttaaatatcagtgtattcaaattgataatgtcactgctgaacagttcccattacttttgtgtgtccattatttatagtagctgtttttaagtagcttaagtgagagctattaactgaaatgaaattatactttacatcaagggttttatcacttgttttaaacccatcttctttttaaaattaatatgtcttattcttgatcaggaagaaaaattagaaggagacaatcgctatttttgcgagaactgtcaaagcaaacagaatgcaacaagaaagattcgacttcttagccttccttgcactctgaacttgcagctaatgcgttttgtctttgacaggtaaatgtgtgcaaatattagtgtttgttgttcattgtggtctactatgtacagactttaccatagatgagatgataaaatggttgtaatttgaaactctagatttgaggatgaaa

SEQ ID NO: 3486 - DNA, 9566 bp, Homo sapiens
atggcttcccttccgttttcgcgtggttcttttgcaaggtgggttgaactcatttcagtatataacaggcacagagtactcgcagggagggctctgggcaatcaagttacgttggagcccaacctaaaccagccggggtggtggaggaagccctttaaccgtggaagcctctagtgtggacggccagttgttatcggaatctcaggcccgtgggtgcatgaacagcagaggagggtatttgagtgcgcacgtgagagaatgttgtatatgtcagatggggaatgtttgagagtgtgtgacagagaaactgcgtgtgagaggctgggatgtgcctccttgacggtgggtgcggttgtgaggctgtgacaggtgagtgagtggctgtgcttgcgtgacggggatatgaggtgcttgtccttttcatgtacgttgattgcggtggcactgcggtgtcactttgagtcttggctgtaggttcccggctgctgcttctctcctccctcctcacagctgcttgcggctgacacacacaaaaaatgtctgcaagagggaagttggatactgaactctacatcaagttttccagcaagaaggcattgacttgctgtgagattggaaacgcctgggaggttatttctttgtgagctctgagagcgagctacctgtctcagaacctcgtctttcccagagctctgaccccaggaacctgctgtgaactcatacccagattccagcctctctcctacctccatgtgttaaagtgtgtgaacagggaaggcgtggagggtattgtgtaaggaggcattccgtgcttcaaggaaaggcctgataactcatgatttttttctccctccctggtcctgctattcctcaaaaggactctaatgaggaggaaaaaaattctttcacatctaaaactcaatgtttaggctagttggcttttttctttcctaaggttactggttttagagtatgttttacttcatctgaaatgtgtctgaatgtcctaataccaatctgctttctttccagtagatgttgggagccattgagctgaatctcattaacgttctcatatttggccgggtgtggtggctcacgcctgtaatcgcaccattttaggaggccaaggcggacggatcacttgaggtcaggagttcgagaccagcctggccaacatgacgaaaccccatcactactaaaaatacaaaaattagtctggcgtgatggtgcatgcttgtaatcccaccatcttggccaggctggtctcgaactcctgacctcatgatccacccgcctcggcctcccaaagtgctgggattacaggcgtgagccaccgcacccagccttatgtggattattttacttcatcttcagactattttatatgctaaatgacattttctcccaatttaccaatgagactttaagacacattttattaagtatcagagcttaaatctgaaagtcatatcctaaaagactaacaacagaatttgtattagttacttcaagagaccacctcttaaatattactttttttttttttttttttttgagacagagtctcgctctgtcgcccaggctggagtgcagtggtgcgatctcggctcacttgcaagctctgcctcccgggttcaggccattctcctgcctcagcctctccgagtagctgggactacaggcgcccgccaccacgcccggctaattttttgtatttttattagagactgggtttcaccgtggtctcagtctcctgacctcgtgatctgcccgcctcggcctcccaaagtgctgggattacaagcatgagccaccacgaccggcttttttttttttttttatgacaaaggcttgctctatggccaggctggagtgcagtggcgcagtctcggttcactgcaacctctgcctcctgagttcaagcaattcccctgcctcagcctcctgagatccattatatcattattatgtctttgcatcctcatagcttagcttccactcataaatgagaacatgtaatgtttggttttccattcctgagttacttcacttagaataatggtctccaactccattcaggttgcatccaatgctgttatttcattcctttttatggctgagtagtattccatagtgtatatatatgtgtacgtacaccaaattttctttatccacttgttgatgggcatttaggctgttgccatatttttgcaattgtgctgctataaacgtgtgtgcaagtgtctttttcatataattacttctgtctgggtgcagtggctcacacctgtaatcccagcattttgggaggctgaggccagcagatcacttaaggccaggagttcgagaccagcctggccaacatggtgagactcctgtctctatcactgaaaaaaaaataaaataattttatataatgacttcttttcctctgggtagatacccattagtgggattgctggatcaaatggtagttctacttttagttttttaaggaatcttcatactgtttgtcatagtggttgtactagtttttgttcccaccagtagtgtagaagtgttctctcttcaccacaccatggcaacatctattatcttttgattttttaaaattatggtcattcttagggagcaattggtatcacttgtgatttttattggcattttcctgatcattagtgatgttgagcttttttcatatgtttgttgaccatttgtatatcttcttttgagaattgtctattcatatccttagcctactttttgatgggattatttgtttttttcttgctgatttgtttgagttccttgtagattctggatgtcagtcctctgttggatgtacagtttgtgaatactttttcctatcctgtgggttgtctgtttactctgctgattatttcttttgctgtgcagaagctttttagtttaattaagtcccatctatttatctttacttgtgttgcatttgcttttgggttcttggtcatgaactctttgcctaagccaatgtgtagaagagtttttccaatgttatcttctagaatttttatggtttcaggtcttagatttaagtctttgatccatcttgagttgatttttctctaaggtgagagatgaagctccagtttcattcttctacacgtggcttgccaattatcccagtaccattttttgaatagtgtgtcttttccccactttatgtttttgtttactttgtcgaagatcagttggctgtaagtatttggctttattctgggttctctattctcttccattggtctacatgcctgtttttataccagtcccatgctgttttggtaacgattgtcttgtagtatagtttgaagtcagggaatgttatgtctccagatttgttctttttgcttagtcttgctttgaccatgcgggctctttttttgttccatatgcattttaggattgttttttctaattctgtgaagaatggtgatggtattttgatggaaattgcattgaatttatagatcgcttttggcagtatggtcattttcgccatactgattctacctatccatgagcgggggatgtgcttccatctgtttgtgtcatctatgatttccttcagcagtgttttgtagttttccttgtagagatctttcacctccttgattaggtatattcctaagtttgtttgtttttgttttgttttgttttgtttttgttttcttttgtggttttttttttttttttgcagctgttgtaaaagaggttgagttcttgatttgattctcagcttagccgatgttggtatatagcaatgctactgatttgtgtacattaattttgtatcttgaaactttactgaatttatttgtcagatctaggggctttttgggtaagtctttagggttttctaggtatatgattatatcatcggcgaacagcaagtttgacttcctcttaatcaatttggatgcctttttttctttctcttgtctggttgctgtggctaggactagtcactactttaaaatgccaataattcagcaagggccataagttgtaaataggaacgggtaagtcagtgtatagtgaagaccactagagagattcaggtgatgtgccttgggaattcatgtggacgtggcattgattagattctggtcatcattgtaactaagctcatggaatctatatggaagttagtgaatatattctgtaagcttttactgtctaattttttcttcaagtgatgttagataaaaagtgaaactaggccaggcgtggtagctcatgcctgtaatcccaacactttgggaggcctaggagggaggatctcttgagcccaggagtttgagaccagcctaggtaacatagtaagaccctgtctctaaaaaaatttttttaaattagccaggcatggtggtgcacacctttagtcccagccactcaggaggctgaggcagtaggattacttgaacccagaagcctgagtttgcagtgagctatgatcacaccactgtactccagcctgggtgacagagcaagaccccctgccccttaaaaaaaaaaaaaaaaaagagagagagtttagcagtagactggatgacactgtggctaagtggccaaaataaacccaccttttaatatacaaatttgtgtgtgagtgtatgtgtgtgtgtacacatgtattttttaagttaatgtatgaacagtgttaaaatgattatgaaatatattcaaaaaagaaaatcaagatagcaactaaaagaaaagtaatggtaacatatgatcatgttgtaatgtaacagaataaataaactaccagactttctcaatgtattgatgtcctatagcctgtgcctcaatgcttgtctgtctttttaacgatccaatgatattgtacattctgttttctcatcttaattttccgttgacagtatatctgaaatttttaaattttattaaatacgtttccctacttagcatctgatagcttcttggtattctattacatgtatattttgtatttagcaaggcagtttgtgctcaacacagaaccaggcctaaacatttcctcctgtgatgtgttctctctcatgttttgaccaatttcaactgattctgatgccatagaagaggttctagtttgaggccaggcgcggtagcacatgcctgtaatctgactagtttgggaggccaaggcgggtgaatcacctgaggccaggagttcaagaccagccccgccaacatagtgaaaccccgtctctactaaaaatacaaaaaaaattagctaggtgtggtggtacgcacctgtagtcccagctacttgggtggctgagacaggagaatcgcttgaacctgggtggcagaggttgcagcgagccaagatctcaccactgcactccagcctgggcaacagagcgagtctccatctcagaaaaaaaaaaaaaaaaaaaaaaaaaaagaagcttctagtttgaacgataagtcctctctcagccttggaaggtgggaatgaaggcaagtgaatcttctcatggagaaactgagcagcctaatctcaagtctagatcagccttcccaaattggagccttgtccagaaaacctcttgctatcttgtctggatctggctttagtgagccattgacttactctaaaactacctttgtatagctgggtttcctggggtgtgagggagtgcttagattcattgtctgtttttccctaagttatatgttcagttgtgagggattaatttggaaggagaaatagaggagcagaaagattttattaaattaagtcatattgggaacactaacatctcttttcttctctcagctctggattctctggagtttgaatgtttccagtattggaaccccaccaagtaggactgatcaggtcttacaattctaaaaccatgacctgtgtaagttgattaattctgtttccttgcaatatcatgatcataggttatgtggatgttttcattaacctaaggcttcctatttaagaaggcctccttcagttatctgtccccactttcttctaatattgtgaatagtgatagcaaataactcagttttctccctatgagtattttctgtccacttttatatttattgtcaaatgtatttagtactcatgtgcttattgttcaaccaaagtctatgatagagcagtaaaggagtgaagtctcaacagggaactatttgagcttcctttataggtccttagtttggtgaattagagatgttggtcctatttggataccataggtaggctctgacattctccgcagacctgagttttctaggcaaataagatgggatttggttatcaattggtctgtcttagtatgtgatgagatctcatattctttgagaattttagaattgttggagatataccatggatcttgtcaaagaattactgagagacaagtttttattttgtggttgaatgtgttctgctgaacttgggtgacatttttttattatgagtcatcctatatcagtatccattctggaacaagaaaagtattaagtgatggaaaatggcgatgaatgagaatattatcctaaggagtaaatatgttgatttccagaactggggaagacctttgaagttctgtccaacaaagtatatgaaggtaggctagctacggtggctcatacctgtaatcccagcactgtgggaggccaaggcgggaggatcacttgaggccaggagtttgagaccccttgcaaaaaaagtgagacacccatctctacaaaaaaagtacaaaaatcatctgggcatggtgacttgcccctgtagtcccagttactcgggaggctatggcaggaggattgcttgagcgtgggaggtcaaggctgcagtgagcagtgattgtgtcactgcactccagcctgggcacagagtgagcctgtctcaaaaaaaaaaaaaagatttaaaaaatgtacacgaggtaaaagatggatcaacgacggagtaagtctgaaatattcattataaaattgttgcacagtcaataaaaaatatatttgtcaaaattaagaaaaatgcttatgtgctctgacataatgatgtaacttgagacttgtggaaatgtctaaatgttctggcaaaagcttttttttttaaatatggagattggccaggtgcagtggctcacgcctgtaatcccagcactttgggaggctgaggcaggcggattgcttgagcccaggagtttgaaaccagcctgggcaacatggtgaaaccctgtctctacaaaaaatacaaaaattagctgggcaggtcctgcacacctgtagtaccaactacttgaaaggctgagatgggaaaatcacctgggcctgggaggtcaaggatacaatgagccatgtttgagtcactgcactccagcctgggcaggagtgagaccccgtccccaaaaaaataaataaatagcacaaaacaattaaatattggagattattaaatttggcaaggacatctcatttttctaacttacaggaaaaatagtttagaaactcatgtttattgggaatttatgcatcacatgactagcagactatgtagttgtgtctttaatactttattgaattttattttatccattcctcagcaggtctgaattattgtggtaaccttcaacatgcagaaacatttgtctgtggcaataggatcctttaggaataggatcctttaggaataggatcctgtggcaataggatcctttaggaatatgtagacacgttgctttagtctgctaccagtcattagccacatatactatatcactccttttctctaatgtgctcttgtaatctcctatctttccttctttaaaatgtttttaaaattttgtaatgcatgggtttgcagtttcaggaattagtgacattcagggatgtggccatagacttctctcggcaggagtgggaatacctggaccctaatcagagggacttatacagggatgtgatgttggagaactatagaaacctggtatcactgggtaagtttatttgcctcaagtaatttaaaatgtgatctgtgatatgttacctttcaacacaatgaatttcaaggccatatttcaagacatagttgaatttctccttcctgttcttagaggaatatttcagctctgcctgtttgacaatggctgtgccactaagcaccatcattttcttcatcctttagagatagtcacatattctcctgccccttatgattgcctcctttccttaatatccaggggctgggttaaaattatatattattattattaaattatatattattagtccatgaataaccatgcccaggaatcctggtttcccattgtgcatatttccagaattcctatagatatgctgtgtcatcatctgatccacctgcagggacaaaagacgcagattcatgatttactctgagtataagaagaacccctgtgacatatagtgctggattagatgaacaatatttattggaaactgaagagtccacatttcatttcctgtagccaatttgtatgatttattgttgaaagttataattcatgagcttgcattgagtttgaatgaagattttatatatcagtcgggatgctttttttctctcatacagaaataataaaataattataattggtacagttgtgctcattatgtccccagccactctttggaagggagggggaatatatatatatatatatatatatatatatatatatatataaaataacttaatcctgaaagaactgtgtgatagtgttattgttattatcttatttatttatttatttttttcgagactggatcttgctctgttgcttaggctggagtgcaatcatagctcactgtagcctcaacctcctgggctcaagtgatcctcctgcctcagcctccttagtagttgggactgtagatgcaccaccatgcctaattttttttttttttttttttttttgtagagatgaggtctcgctctgttgcccgggttggtctcaaactcctggtctcaagtgatcctcccacctcggccttccaaaatgctgggattataggcgtgagccaccatgcctagccaatagtagtattattatgtccagtttatttgccaaattggaataatgagttgaagtcacatggccaaagtcacaaggttggtagatttaagaggaataatttgtgccccagccttctggctccagagaacttcacagctactttggggtggtaatatttggaaagagacattttataaggtcacaggttaaactttctcctaagagaccacgcgtgtatgagtttacattaaaataaggttttactgtgcctgtttcatttcttcaatcatctcacccctcttttatttgaagtccttagttcattgtaaatttaatcaaagctcaaaggtttctgttacttttgtttttatttttataccatgtggcatttcttttcttataaggaggacattccatttctaaaccagttgtggttgatttactggagcgaggaaaagagccctggatgattttgagggaagaaacacagtt

SEQ ID NO: 3487 - DNA, 32248 bp, Homo sapiens
ttgaatttgaatttttgggaataagaaggattagaaccaatgatgtaattgttttcaaggcatttttaaaaacattagacagattcagagaacaacatataacacatgagtagcttactgagtcttacaagttaaacaatcatgtcaccacagccgtgtcaggagttaaaacttaaaaatttttttttattttaatataattttagagttacagaaaggttataataatgacatacaagattattttataccctccaagcagtatttctaaacaaggagagagtttctagttgattctgaagtcctccacatgtctgcaaccagtcacaatctccttcctcctgctaagtgtaaccactattctgattttaatggtaataagttccttccttttattttttctccaatttcaagtctttttaagttttcgcaagtctctaagttttgtcttcatctttctttgtgttcttaaccccttatttgctgaagaaacatcttccattctattttttgctgatgccatccctgagatttgcttaaatatgttctctgacccctctatatcctctaaataagtagaggggtcaagaggcttatgtatctgagtccagagcttatactgctcactgcacaacagccagtaagtcaagaggtaaggtgttagggcaaggaactttatttcagagagccagcaaagcgagaagatggcaggctaatgtcctaaagaaccatcttaaaaggcatgaatctctgccgggcatggtggctcacgcctgtaatcccagcactttgggaggccgaggcgggcagatcacaaagtcagcagatcgagaccatcctggctaaaacggcgaaaccccgtctctactaaaaaaaaaatacaaaaaattaggtgggcgtggtggcgggcgcctgtagtcccagctactcaggaggctgaggcaggagaagagcgtgaacccgagaggcggagcttgcagtttgccgagatcgcgccactgcactccagcctgggtgacagagcgagactccgtctcaaaaaaaaaaaaaaggaatgaatctcatgccgttttttatgttggcgaagggggaactaggaggaggttgaggtcaggaggtgactggcgactacagatatctgggtgtcagcaggggtccgagaaggttgcacaacgttgtcctcggtcaggtcacaatgctcctataaatctttaacataacgttgttacttgtatgtacaccctccctatctccttgagaattattaatagttttggaaagggattattatccttgctttaaagttatagtataaattaaatactcccatagttaacttggccagcgtgcagttatgagcaaacgccattagcttgtgaggttagaagtaagatggagtcagctatgctagatttatttcactgttacacttaatcgattttgattcagtttattttatttattttattgcaagacaacttcctgggcagtattgtatgcatcatatgttggcacttttcctgctcccctcataccagacagagctgggcttatggtttactgtgttaaaggaaaacaccacctctgaagagctttatatagtatctcagaggcagaagggcaaggatggcttttactgagaattaaaagtttggtttaaggctggtcttcatgcggggacttgattaggattaggtaaagatgaagacaccacagtggagaattagtggaaacagctaggttagaattttgaggttaggaattgaaaattttctagagtacaaactgttgatgtttgccatttaagagttgatggatctttcaggaacttccagtaatgaacaatgaagccatttgcctttgcaagaaacttccagaacagtaaaattgtgctgaggaaaacagtgggatgtgtttatggagagagtaagctacctgtagggggattggtaggtccacttctctgtttcaaggctgagtgtgggagtgaatggtttaggttctcagcataaaccttctggttgtctctctgtgatttttagcagtcatttatgctcaatgcctggatgtattaattcatcagacattccaaaatggtcatattctaattctaacatttatttttcatttattatgtacaaatataaacaattttttacatcacctactatttggtaactactgataccatttggaaaataaaggctgatcaatatttggtcttttctattttcttttttttttgagatggagttttgctcttgtcgcccaggctgaaatgcaatggtgtgatcttggctcattgcaacctccacctcccaggttcaagccattctcctgcctcagcctcccaagtagctgggattacaggcatgcaccaccatgctcggctaatttttatatttttagtagagaggagggttttgccatgtcggccaggctggtctcaaactcctgacctcagatgatctaccggactcggcttcccaaaatgttaggattacagacatgagccaccgtgcctggcccctaggatccttcataggtaactagacagtttttgtttttgtttttgagacggagttttgctcttgttgcccaggctggagtgcaatggcacaatctcagctcactgcaacctccgtctcccaggttcaagcgattctcctgcttcagcctcccgagtagctgggattacaggcacgtgccaccacacccagctaattttgtgcttttagtagagatggggtttctccatgttggtcaggctggtctcgaactcccgacctcccgtgatccgcctgccttggcctcccaaagtgctgggattacagtcatgagccaccactcccagatttagacggttattttattgccagccttctcccatctgatatgacaaagtgttgcaggcttatcttgtacgtttcctgtaccaagcctttagtcagccataagtttgtgaactattgggttcttttagtgggaaatggtattttaaggccacagtctagcctctagaagtgcccatttttcttggttgaagattgttataggctttttaccagttaaagatagaaaaatctgtaagtgactgggtgtggtggctcacgcctgtaatcccagcactttgggaggccagcctgaggtcaggagttcaagaccagcctggccaacatggtgaaacgccatctctactaaaaatacaaaaattagccaggcattgtggcggctacctgtaattccagctactggggaggctgatgcaggagaatcacttgaatccaggaggcagaggttgcagtgaacagagatcatgccactgcactccagcctaggcgacaagagtgaaactccgtctcaaaaaaaaaaaaaaaaaaaggccgggcacagtggctcatgcctgtaatctgagcactttcggaggccaaggcagacggatcacgaggtcaggagatcgagaccatcctggctaacacagtgaaaccccgtctctacaaaaaatacaaaaagtttgtcgggcgtggtggcgggcacctgtagtcccagctactcgggaggctgaggcaggagaatggtgtgaacccgggaggtggagcttgcagtgagccaagatagcaccactgcagtccagcctgggtgaaagagcgagacaccgtctcaaaaaaaaaaaaaagtgactcatgcctgtaatgccagcactttgggaggccaaggcgggcagatcacgaggtcaagagatcgagaccattctggccaacatggtgaaaccccgtctctattaaaagtacaaaaattagctgggcgtggtggcactggtctgtagtcccagctactagggaggctgagacaggagaattgcttgaatccgggagatggaggttgcagtgagccgagatcgggccactgcactccagcctggtgacagagcgacactccgtcttaagaaaaaaaaacaacaaaaaaaaaaaaacaaaaaaaaactctaagtatacatatatgtatgtgtttacatatttacataaaaataaattacctaatgagtttatatggcaacttcctggccaaacttagaactaaatggtgtttaattgaaattttctgtctttgatctgtatctcttattccttagtaccaattctccaatactccagtgatgataaaattaaaataccatgcaagtattcatttcctttattctattttttttttttttttttgaggcagagtttcgctcttgtcgccctggctggagtgaaaaggtgcgatcttggctcatcgcaacctctgcctcctgggttcaagcgagtctcctgcctcagcctccagagtatctgagattacaggcatgcggtaccatgcccggctaattttgtatttttagtagagatggggtttctccatgttggtcaggcttgtcttgaactcccaaactcaggtgacctgcccaccttggcctcccaaagtgttgggattacaggcatgagccaccatgcccagtcatttcctttattctttatgacacataaaacattcttagaacattagtaacagctttactacctaaatgattactgaaaacagttttttagtatgcccagtctcctcccaatttttagtttcactgtaatcatattatgaaatatatagtcattgcatcatatgctttctcccttatgactgatatttactctgttttttttgttttgttttgtttttttgagacagtctcactctgtcgcccaggctggagtacagtgatggatcttggctcactgcaacctctgccttctggtttcaagcgatcttcctgcctcagcctcccaagtagctgggattacaagtgtgtgccaccatgcctggctaatttttgtatttttacaaaatacaaagggtggtctcgaactcctgacctcaagtgatctgcccaccacggcctcccaaagtgctgggattacactcttgagccccggtaactggccctgatatttactcttaacctaagtatatatttataatatatatatatataactatagttgttcttgggtatttggtgctcagcaccctgtggcatggctgcagtgattcatgcatatgagacagccttccaggagctctcttttccacaggtgctagagctcaagtgctaggaaatgagatccacacggcaggagtgtgggcctcccctgacttaagaagactggtttggctgggcgcggtggctcatgcctgtaatcccagcactttgggaggccaaggcaggtggatcgcttgaggtcaggagttcgagaccagcctgttcaacatggtgaaaccctgtctctaccaaaaacataaaaaattagccgggtgtggtggtgcatgcctgtaatcccagctactcaggaggctgaggcaggagaatcacttgaaccagggagtcggaggttgcagtgagccgagatcgcaccactgcactccagccttggtgacagaatgagactccttctcaaaaaaaaaaaaaaagactggctccaaaggttggtacaatatctggtgtgaggattctttagtcatcgtttccagggtctttcaaggatatgctcttttaaaaagaaatgtagtcaaagaaaccctaaatatggtgttctcttcatctagcccctagtccacagtccgaggtgcaacttgccaatcagggtcattgttaccataaataatgaaacttattaacatagttgacacattctgtttttagggaagcagcattggagagttagcctaagagtacatcctcatgcagaatgggattcccattctgtttaatgtttaattacagaacattagaaaatgttttgttaaccctttgcccacattacccaagtgatttcacaattctctaagaatattatcaaatatacagtccacatccaaatttctcccaattatcccagtaatgtccttttataaattttaaaatctaggatcaactgaaggaacatctgtcatacttactcaccaaatctatttaatatcctttaattcagagcatcttccttcatgaaattgacatctttgcaaagtccagtccacttgatttctttttagaatgtctacaatctgcaatgtattatcacttccttatgattaaattcaagcccaacatattttgaaaaattgcccccaggtgatgttctattcttcccattgtatcacatgaggagacaataatagtttgttccactggcaatgctaatattataatttggtgaaataagaatttgtgccttaggcaatgctaatatgatataacttgtttgagatgcttttcataattgtatctgtccgggccaaggaaaaacttctttttcaccctctgaagtttcactgaaaatcactgacaaaaggcagattgagaagaaaaggcatacaaattgatctaatcatactttttcatgacacaggagcctttagaaagaagatccaaaggtacaggggaaattacctatttttatgcttaggtttaacaaagtatggacagctatgtagaaacaggattgggcaaaaagggtgtgatctaatgctaatagcctgagtagggaaacccagcaaggcctgtctgtctaggttcttcttggcctctcagaacacgtattccttccttccggaatgggggactctctctggaatgggggtcttatgaccaacagtcaaacaaagtaggccagggaattttttatggccagtttttacccaaaaaggcaggggaaagttagagtaatatttttaggttttatgagtagctctggggacaaggggttctggtttccatgacttgccttggggaagagggcttctagtctttatggttagcctagggggagaatgggactgagagacaggagggcaagagaaggtccgagaaaaaacttttgcttctgaggatgctttgcggacttcattttgtggtattattttgtgagtcccaggaaaacaatacagatatcctatttctcctccaacttttacaccccctgatccccaccacagattttagcttccaacagtagattttgcttataccagttctttttttttcctttttgagacagagcctcactttgtcacccaggctagagtgcaggtgcagtggtgctgtcttggctcactgccacctccgcctcccaggctcaggctgggattacaggcgctgtagctgggattacaggcttgtgccaccacccccagctaatttttgtagtttttgtagagatgggttttcaccatgttgaccaggctggtcttgagcccctgacctcaggtcatctacctgcctcagcctcccaaagtgctgggattacaggcgtgagccactgcgcccggcctgcttgtacacatctttaatgcaacatttgcctactgatgattttgcattaacctcctacatttattagctggaaacatttttttttttttcttcagacagactcttactctgttgcccaggctggagtgcaatggcgcgatctcagctcactacaacctccgcctcccaggttcaagtgattcttctgcctcagcctcctgagtagctggaattataggcatgcaccaccatgcctggctaatttttgtatttttagtagagacggggtttcaccatgttggtcaggctggtctcgaactcctgaccttgtgatctgcccgccgcggcctcccaaagtgctgggattacaggcttgagccaccgcacctggcccattagctggaattcttctgtaagaaggaatactccctttttcctctatttattcaattatttatatcaatatggactcatagatgtttattttattccatgagttataatcctatactatccttagttatttgtcttctgctttggccattgggaactctttcaagttggcatctgtgccttttcaacctgctcacctttggtgagcatttcttattttctggtactacaagttgttaatctaggattatcttatattttctttgccatagccctggaatcagccacttctgtaaggagcaccagttccttttattgggaacgccatttagaaatccagatctaggcttaggtatgctaattgctcgtggaccctcttcgtgctaggccctcttaactcattgaactggcagctatgtacgtatgtgtggcaatgtggccaatcactctggagtattttcctgttcttttgaagctgcaacaccagaacatgctttatacaaatcttaaaactccaaatcatgtgtgtgaacaatgtcagtctttatcgtttgcatttcttattgctgaagctgagaaaaataatcttctccatttcatcttgtccaaattttacatatactaaaggaattgccacactggcagtaatatctaatcatttatccagttgcagtgaaaatgaacaaagacgagtgaaggttgatacgccattattaaattagggtaaagaaaccaacaacgtaagttctacactctaacttaaactataatttttattttcatttttatttatttatttatttatttattttttgagacagagtctcgctgtgttgcccaggctggagtgcagtggcgcgatcttggctcactgcaagctccgcctcccgggttcacgccattttcctgcctcagcctcccgagtagctgggactacaggtgcccaccatcacgcctggctaatttttttgtatttttagtagaaacagggtttcactgtattagctaggatggtctcaatctcctgacctcgtgatccacctgcctcggcctcccaaagttctgggattacaggcgtgagccaccgcgcctggtctaaactataatttttaaaaagaaatttgaaaaatgatagtttttaaaaacccttaaaactaaatctatgtttgtattttattaaatgtttataaacttttgagttacagttaaacttcaggtcaattaaaatagagttcttttacttgatgtaaaagaaattgttctctgatattgctataaatttctaatggtgctatgttcttgtcagagattaagaacttgtataacacataattctataatatgtaattatatacttctatattgtgtgattcgttattttgtttgtttgtttgtttattagagatgggggtctcactgggttgctcagctggtctctaactcctgggctcaagcagtcctcctgcattggcttcccaaagtgctgaaaatacaggtgtgagcctataattagttattattgatatattagatatattgatatatcagcctataattagttattattgatatattagaaagcaactgatttttgtctgaaaatagcagccttcctgatatatcttcattattctggtactttgtattattttgagttggacttacttgttatatgtttatgatatttcaaaatatttatttttctatatttaacgatatttttcatatacttcctagggtgtctatatactgttgacttccaagaattaccagacatttctgttcatctagcaaagctaagcttattagatttattgcaaaaaagggagaacaacctcttgaaagagtaacagtagtatcttaaaataagaaaccaggaaacttacttatcaggttttagaaccagactgggtaattttttttttcctttttttttttttttagatggagtcttgctctgtcgcacaggctggagtgcagtggcccgatctcagctcactgcaacctccgcctcccaggttcaagcaattctcctgccacagcctccaagtagctgggattacaggtgtgtgccaccaagcctggctaatttttgtatttttaatagagacggggtttcaccatgttggccaggctggtctggaacacctgacctcaggtgatccacccacccctgcctcccaaagtgctgggattacaggcgtgagccaccgcgtccagcctctttttttttttaaaaaacgtgctccacagaaaagtagcaactgggtaattttatatatatatatatatatatatatatatatatattttattatactttaagttctagggtacatgtgcacaacatggaggtttgttacatatgtatacatgtgccatgttggtgtgctgcacccattaactcatcctttacattagatatatctcctaatgctatccctccccccacccccaccccacaacaggccccggtgtgtggtgtgtgatgttccccttcctgtgtccaagtgttctcattgtttaattcccacctatgagtgagaatatgcagtgtttggtttttttgtccttgcgatagtttgctgagaatgatggtttccagcttcatccatgtccctacaacggacatgaactcatcattttttatgactgcatagtattccatggtatatatgtgccacattttcttaatccagtctatcattgttggacatttgggttggttccaagtctttgctattgtgagtagtgccgcaataaacatacatgtgcatgtgtctttatagcagcatgatttatattcctttgggtatatacccagtaatgggatggctgggtcaaatggtatttctagttttagatccctgaggaatcgccacactgtcttccacagtagttgaactagtttacagtcccaccaacagtgtaaaagtaatttttaaggcaggttttgcaaaacagagcgaactaattgggatggggctgagtctatgacatcataattttagtgtgggccgggcgcggtagctcacgcctgtaatcccagcactttgggagtctgaggcaggcagatcacgaggtcgggagatcgagaccatcatggctaacacggtgaaaccccgtctctacaaaaaaatacaaaaaattagccgggcgcggtggcgggcgcctgtagtctcagctactcgggaagctgaggcaggagaattgcttgaacccaggaggtggaggtcgcagtgagccaagatcatgcgactgtactctagcctgggcgacagagtgagactctgtctcaaaaataataataataataataacaacaataataattttagtgtgggtaggcagtgagaggtgagatacttggagccttgatgagtaagcaattggccttaagaggggattgtgttggtttcacttttcagtaacccccatttttccatttttggtcatccttctgcttgagatggaagataaacttatgtgggaacactagttcagatgtacagtgctgtttgaggttatcattgtgtttttaaaagttttccctcatggttattctaatctccatacatttcatatttttgtattccttttgttggaagataatttgttggctcattcgatggaacatatatagtagcattgctatatatatgactgtatagtagcattttattattttatcataatatgagattatatattgtatatatataaaatgatatagtagcattttattattctggagatcacacttttgaacaaacgtatttagggaagaattgcaatcacagtttatagtctcctaaatcaggagccaacagaggccaaattaaaacaaaagaacagattccttaccgaatgcaaagagccattataactaggtaagtgggagcattctgcaagtttcctaatgttattgcgactctgttttctgagtcattaatattagtaatattaaagattccacagagacctctagtgatataacattcttcccataagacagcacataagcctgcccccttagaccagcattgcatctaaagcagctctcttttgagtgaccatgcctgcaattttatgcacctccgttgaggagttctgtgctttaatcccatgatcttaatctactatttctgaaaccgtatgtacaattcttaacatttttcagccctcataaagcataacatgaagaggtttgggggaagaaggagatggcagaatttcccttcaacagtaaagttctttaagtggcatcaggcccacgaaatctccttgaattaagtgatctaaagatctcttattctgagaaaggaagttggtaggccgacattgatcctaggtaaaataaggatcagtttactgagatataacaactctgtgcccacttcgcagataggagccaacagccttttcacagtatcagtcattaggagacagccagacatctgttttccctgcaggcttccctgaagggtcagtggtgggataatacaggttagcgtgttaacctaagcgaaagagcacagggttgagcccaagtagtgggcttttcttacaaggtttataaaagtgattaatttcctcatgttattctttatttcatgtattaggaaatttgccttttattcttactgcattgcctcatttaactttttttttttttttgcgaagaaccattttgcagttgttttatatttttctaaatacagtaaatcatttttgctctgattttaccaatgcctcttctgttgcatcaatttattttctttctgattttgaaatttgtgagtcataattactcacttattttcattcttttttgatctcttcagtatttaaggccatagattttgctttgagcacagattttgctgttctatctagttatataatgtttacacagttataattttagtttattttggccccttgcttcagttcaattaaaatagagttattttacttcatgtaatagaaattgctctctgatactgctataaatttccaatggtactatgttcttgttagagattaaagtctgtgttcctaattcttcaagaacttgttgaaatgtcaactcaacaaattgttggcgctctatgtggttagatttccatgaatgctctgaggtcaatgttttaagtattctttgtccacttgaaataaagtttattatcagagataagcattgtaattagatttcatcagtgcttatttagatttattccattgggccaggtgcggtggctcacgcctgtaatcccagcactttgggaggccgaggcgggcggatcacgaggtaaggagatcgagaccatcctggctaacacagtgaaaccctgtctctactaaaaatacaaaaattatccgggcgtggtggcaggggcctgtagtcccagctactcaggaggctgaggcaggagaatggcgtgaacccgggaggcggagcttgcagtgagctgagatggagccactgcactccagcctgggagacagagcgagactctgtctcaaaaaaaataaataaaatagatttattctattaatttgagactgttattctttacctctaattagttactttttatttttagaaatcttttaattctttttctttgaaaattgatttgatagtaggtgttatgttgtgtggctgttcctaacttttaaattcattgttatttcattgtttaatattatggagtgccatttggtctattttgtaatttgttcccttaattcaaaattttttgatatcaagattaagatacctttttttaaactttgccttctgtaccctttctcatcattctattttagagtctttttttttttaaatgaaatctagaaatggattttttttctggaatgcaagcaaaagccatttaatagagactttcacatttttacatttattgtatgacaatttttggttctttttgtattatgctttctggtttcttttttttttttttttttgaggtggagtctcactttatcacccaggctggagtgcagtgacatgatcttggctcactgcaacctctgccccccgggttcaagcgattctcctgcctcagcctccgtagtagctgggattataggcacctgccactgcacccggctaatttttgtatttttagtagagacagagttttaccatcttggccaggctggtcttaaattcctgacctcgtgatccacccacctcggcctcccaaagtgctgggattacaggcgtgagccaccgtgcccggccattcttttcaattatttgatatgctagctttaaatgacagtcttttccatggaatattatacaaattgaccacacaacattcatggatgtttgtccccaaatcagcatttttacatgaattacttctttagacattctcccaacttttctaggaacatgacttttatcttttactcccttttatgtatctgacattgtagtcgctgtatgttcccagttctccatttcccggctgttgataatgaccaaagagcctgccaagatgagatcaggagaaatatattgtgagagttcttgtatatttaaactattggctatttttgtagttgaaagatactttggatatcaaattcttaattcatcttacttttcttgagaacttcgtacctattgctcctttactttctgagtttaagtaacactaagtgtaactctaatgcccactggatatttcctcccttcaaagtgacttgatctttttgcctggcaactataaaaatttttttgttttttgaagtcatagaactctaatagtatgtgctttaaatggaccattctagttagttttccttggtatacatagtggctttttaatatataattcatgtgctgataatgtccagaaacttttctggagtaatatcttaaaatgttaataatctccagttctttctgtttttattttgaataccatatatttccatttacaaatatacttcttctgcctgtcttttatagctactgttttctctttaaaaaaaaatttactgtgataaataagatctagtatttgatagcgcaacaaagtgactatagtcaataataatttaattgtatattttaaaataactaaaagaatataattggattttttgtagcacaaaggataaatacttgaggtgatggatgttccatttaccctgaagtgattattacacattgtatgcctgtatcaaaatatctcatataccccataaatatatacacctacattgtacccacaaaaattaaaataataataaaattttactgtgaaatataacaattttgcatgaatagatgtacactaatatataactaaaatatatactacagatgtgtgccacaccccctgccccaaccccggctgattttttaaaaatttttttgtagagacggggtcttgctttttggcacaagctgatcttgaactcctgggctcaagcaatcctcccacctcagtgtcccaaagtgttaggattacagacatgagttaccacacccagcctgaaataatgttagacaaaagtttacaaaaattatacagttcaaatgccatggctcatacttgtaatcccagcattttggaatgctgagacaggagaattgcttgagcccaggggtttgagaccagcttgggcaacatagtaggatcctgtctctacaaaaagtacaaaaattagccaggcacggtggcatgtgcctgttgtcccagctgctcaagaggctgagatgggaggatggcttgagccctgaaggttgaggctgcagtgagccatgatcatgccactgtactccagcctagggaacagagcaaaatcctcatctctgaaaaaaagagaaaagaaagctcatacacattgccagtcattccctatcctctcactctcagcctctggcaaccattaatctcctttgatatcgatagatttgcttattctgcatataaaaaaggaatcaagcaacatgtggccttttgcgaatgactttctttcacttagcataatgtttttgagtttcatccatataataggaggtatcaatactcattctttttttatggctgaataatattctattccatcctattatttcttttgttgctgtgcttttgatattattgtctaggaaacttttgtaatccaagttcatgacgatttacttctatgttatcctctaagttagtagttttagctcttacatttaggtctttgatccacattgagttaattttcatatgtgatacaaagggtagatagatgcccagcttcattcttttgcatgtgaatatccagttgtgctagcactattgctaaagagactcctttgaattttgttggcaccctttttgataatgaattaatcataaatttgagatatatgtaagtgtatgtgtatatatatacacacatagtctttctgtctatatactgtactatatactatatacagtatatatacggtactatgtactatatacagtatatatacggtactatgtactatatacagtatatatacggtactatgtactatatacagtatatatacgatactatgtactatatacagtatatatacggtactatgtactatatacagtatatatacggtactatgtactatatacagtatatatacggtactatgtactatatacagtatatatacggtactatgtactatatacagtatatatacggtactatgtactatatacagtatatatacggtactatgtactatatacagtatatacggtactatgtactatatacagtatatatacggtactatgtactatatacagtatatatacggtactatgtactatatacagtatatatacggtactatgtactatatacagtatatatgctgtctatactgtatacacagtatgctgtctatactgtatatatacacagtatatatgctgtctatactgtatacacagtatatatgctgtctatactgtatatatacacagtatatatgctgtctatactgtatatatacacagtatatatgctgtctatactgtatatatacacagtatatatgctgtctatactgtatatatacacagtatatatgctgtctatactgtatatatacacagtatatatgctgtctatactgtatatatacacagtatatatgctgtctatactgtatatatacacagtatatatgctgtctatactgtatatatacacagtatatatgctgtctatactgtatatatacacagtatatatgctgtctatactgtatatatacacagtatatatgctgtctatactgtatatatacacagtatatatgctgtctatactgtatatatacacagtatatatgctgtctatactgtatatatacacagtatatatgctgtctatactgtatatatacacagtatatatgctgtctatactgtatatatacacagtatatatgctgtctatactgtatatatacacagtatatataccatactatactactatagacagtatatatactgtctatatacagtactatatactgcttgatttactgtagcattataaaaagttttgaagtcacaaagtatgagtactgatacttgaattcttgtctttcaagattgttttggctattctgagtcttctatattcacatatgaattttagttcagcttgtcattttccacaagaaaaaggcagttgactttttttttttttttttgagactgggtcttgctctgtcatctggggttggagtacagtagtgtgatctcggctcactgctgtaattctcctgcctcagagtcccaaagtgctgggattacaggtgtgagcctccgtgtctggctaaggtatgttttttaacaatttatataaatactctttcacatggaggaggtttgcttttttatacaattgctaaaatttttcttaggaatcattctttctgcatgtattaacaaaattcatacgatttttttcctccattattctgtactatgttgaattctagtacttgactaaccttgcatgctggactccaatttggtcatcatgtgttgatattttatctcttatcaattatatctgaacttttaatgttttctttaggtttcatgagtgggattggattgcaattttgtttttcattatccttcctaacgttggatggctgggcacagtggctcatgcctgtaatcccagcactttgggaggcctaggccggcagatcacttgcggtcaggagtttgtgacccagtctggctaacatggtgaaaccctgtctctactaaaagtagaaaaattagtgaggcatggtggcgcaggcctgtagcctcagctactcaggagattgaggcaggagaattgcttgaacccaggaggcggaggttgtggtgagccgagatcgtgccactgcaccccagcctgggcaacaaagggagactccatctcaaaaaaaaaaaaaattaaaaaaaaataatgttggatgtgtttcattagcttcatacatgtgttgagggaatgtacccttttaccccctcttagaatgtctgaagaaacactccagaaaaaaaaatctgaaacttcagtttccattgtgctttttaaaaacttatgcaaattacataatgcttatagaattgtccaagttttctgtgtgttgattttgcagtggctactttttagagttttatgcatttcaagcaagttagtaacatgtttttatcctaatgccatcttactgtgtttgtgcagtgtggagagctatagctgaggtacctggtagcactcctaggttggatattgtagcatttacttttttcttcatcagtgttgagagaattgcatcagtaacattagtttgaaataaaatatctgccgttttggctcttctgtggtatttgtgaactccattttttaaaattactggacttttatatcttatttttgtttatttgttgcattttccagcttcttgtgatgaatatataggtcaccaattttcaagttttctccttttctcatatgtatttacatctgctttataaattgttttttcttctttcatgctatcaaatataaatggatataaacctactattatttggttaaaaataattttatatgggaatttaggtaatatctccttaaattctgggttgctgtttcctttccccagctttttattttaaaaatcatcaagccaagggagaatattttaaaaatatatatttgtgtatatatgtatgtgtgtgtatgtgtataatgtataatatataatatatatacagttaattacctttcacatagattcatctttggttattaacattttgccttactttttctctgtatatatgcacctttcttcttggctcacttgatggtaagtagcagttgtcattaaatttcacctcttaactatgtacatctcctaagaataaagacattctccttcaaagtcacaatattattataatagtaatgtagtcttatctactatagagtctatacttacatttgttatgctgtttctaaaaatgtcatttataaaatgtttccaggatccattgtgtattcatacattgcatttaggtcttaggcttttttttttttttttttttttgagaccaagtcttgctctgtcgcccaggctggaatgcagtggtgctatctcggctcactgcaacctctgcctcctgggttcaagcgattctcctgcctcagcctctgagttagctgggactacaggcgcccgccaccacgcctggctaatttttgtgtttttagtagagatggggtttcaccatattggccaggctggtctcgaattcctgaacttgtgatccgcctgccttggcctcccaaagtgctggggttaaggcatgagccaccatgcccagccaggtcttaggctttttatcttggtgttaccttactacattttcccctttgggtttggcttttttgaagtgtctactccagttttcttgtggaatgtcagatttataggtttgatggtttcccctcatgattagagtaagattaaacattttttgccaagaatattgcagaagtagtgatattgcaaaaacgtaatgatcgtttttgtttgttttcttttctccaccaaccaaacaaagaccactggtaattaactttttttaaaataactttttaactttagaataattttagatttacaaaatttacagatttacaaagataatacagagatttcctgtatacatctctcccactttccaccattgttaacatcttacataaagtatgtttgtcaaaactaggaaactgacatgagactctccattgggatttcaccagtttttccatatagctcatatttctgttccaagatgcatccagttaggggtaccacattgtatacatttgtcttatcttccagtctcttctgttctgtgacagttttttctgcttttctttgtttttcatgactttgactgtcttgacagaccatgccagtagtgttctcccaatccaagtctgttgtttttttgtaattaggctggaagtagtagtttttagaaagactgtaacagccgggcgcggtggctcatgcctgtaatcccagcactttgggaggccgaggcaggtggatcacgaggtcaggagatcgagaccatcctggataacacggtgaaaccccgtctctactaaaaatacaaaaaaatagccgggcatggtgtcaggcgcctgtagtcccagctacttggaggctgaggcaggagaatggcgtgaatctgggaggcagagtttgcagtgagccgaccagcttgggccacagagtgagactccatctcaaaaaaaaaaagaaagactgtaagagaggtgaagtatgcttttcatcacattacatcaggggtacatgacatcactggtgatattaacctttatcatttggctaaagtagtgtctgccaggtttcttcactccaaatgtactattttttccttttccattctctactctttagaaacaacttgttaagtctagcccaccctgggagcaggtacatagaagtggaaattaagctttacattccatagagtttaatatctagaattcttctataagacatatttgtttcttctcatatcagtgtagactcatttatatttgttttatacttcaaggtagaatcaaatattacattacttcttttgccacccataccgtttcaacttcagacattgatagctcttttagcttggttcctatgttcatttaataccctgatccttctgttttttgaggacttctttcctggtactaccttcaggttcattttgttttctccctcccgtggtcctggaatcagctgtttctcccaggagtgtgattccttttagtggagaatgggatttaaaaaccaaggtcagctgggcacggtggctcacgcctgtaatcccagcactttgggaggccaaggcgggcagatcacgaggtcaggagtttttaagaccagcctggccaacatggtgaaaccccgtctctactaaaaatacaaaaattagctgggcgtggaggcgcgggtctgtacataatgccagttacttgggaggctgaggcaggataatcgcttgaactcgggaggcagaggttgcagtgagccaagatcgcaccactgcactccagcctgggcgacagagcaagactccgtcccaaaaaaaaaacaaggtctgggtaatggatatatgcacattcgccgatgtatgcttacatatattaataattgtctttttgtctatccatttgtatgcatatgaagctaaacatgagttcatactaatgtctctgagtctcatctactactacaaaatgtattctaatcttcctgtcttgtttatatgtaactttttaccctgacagcaggaaaactggctctccccgtccaccatttatttctgtatctattcaactccagtgtatgtgtaacacatttctgagttgttaacctgtacccccatgagcatcaagtttactcacttgagtagtgtttgtatatacttcctttagtgtatggccttataattttcagtcaaaacatcattttccaaagtttgttattttatcatatcacagtgcactgtttgttcagtatattgattacctacaagcagtatataattaccaaatatatgttgtctagttatctttgcagtattgatttctagcataaaatttttcttgtggtcagactacatactctatacaatcttgatcctttgaaatacatgaaacttgctttatagcccagtatatggtcagtttttaggaacaatctgtgtgtgactggaaggtaactgagctctgcagtatttgaattgtatctatgaagttctggatctttattgattaaatgttccactcagactttggattgtctttggttaatcagactttggataatttgctttctttatttcataccatgttaatagagaaatacagaattatttataacccttataaagaaatatttataacattaagaaatcctctatgtacattatagttcattagaaaatagagatggttaaaactgctttcaaaacattacaatcttgccaagtgtggtggctcacgcctgtaatcccagcactttgggaggctgaagcgggcagatcatttgagttcaggagtttcagataagcctgtccaacatggtgaaaccctgtctctactaaaaatacaaaaattagctgggcgtagtggcaagcacctataatcccagctactccagaggctgaggcagtagaatccgttgaacccgggaggcagaggttgcagagctgagatcgtgtcactgcactccagcctgggcaacagagccagactccatcctaccacccccaccccccaaaaaaattaaagtcttggctgaatgcagtggctcacgtctgtaatcctaacactttgggaggctgaggcagacagaagcaaatcacttggcgccaggagttcgagaccagcctggccaacatggcgaaacctcatctctaccaaaaatacaaaaaaattagccaagcatagtggtgggtgcctgtggccccagctactcgggaagctgaggcacaagaattgcttgaacctgagaggcaaaggttgcagtgagccagtatcacaccactgcactccagcctgagtgacagagcattttttttctttaagtatttcctggccgggcacggtggctcacgcctgtaatcccagcactttgggaggccaaagtgggcacatcacgaggtcaggagatcaagaccatcctggctaacatggtgaaaccctgtctctactaaaaatacaaaaaaattagcggggcgtggtggcgggtgcctgtagtcccagctactcgggaggctgaggcaggagaatggcatgaacctgggaggcagagcttggagtgagccgagatcgcaccactgcactccaacctaggagacagagcgagatgccatctcaaaaaaaaaagtgttttctttttcttttttcttttttttttttttttttgagatagggtcttgctctgttgcctgggctggagtgcagtggcgtgaacacagctcactgcagctttggccgcctaggctctagaaattctcccaccttgccctcccgaatatctgggaccacaagtgcatgccaccatgcccagccaagtttttaatttttttttgtaaagaagaggtcttattgtgttgcccaggctggtcttgaactcctgggcttgagtgatcctcctgcttcggcttcccaaagtgctgggattataggcgtgagccaccactccagtccctgactctgtttttgatgtttaactgctgatgactcctctttttttttccccttctgtctacttctgggccagctggtaaaaaacctaggtgctccctccttctcattcaaaccatgtgaaccccatgccatgagcaggaacactcagcccagcaccacaccctaaccaccatgcaaactccaagccagcctccttttcctaatctctcaagttgttttatgacctgcttgggagctgctctgctctctagaaagcctcatgatgagagttataaaccctttcatacctttttggtgtatctgtgtgacatcagtagtcttttttttttcctttcttctaaaaaaaaaacaggatacatggatacatgtgcagaacatgcaggtttgttacataggtatacgtgtgccgtggtggtttgctgcatcttttgacctgtcctctaagttccctcccctcacctcccagcccccaacaggccctggtgtgttattcccttctctgtgtccatgagttctcattgttcaactcccacttatgagtgagaacatgtggtatttggttttctgttcctgtgttagtttgctgagaatgatggcctccagcttcatgcatgtccctgcaaaggacaagatctcatttctttttatggctgcatagtattccatggtgtatatgtaccacattttctttatccagtctatcattgatgggcatttgggttggctccaagtctttgctattgtaaatagtgctgcagtaaacgtacatgcacatgtgtctttctagtagaatgatttatatttctttgggtatatacccagtagtgggattgctgggtcaaatgtatttctggttctagatccttgaggaattgccatactgtcttccacagtggttgaactaatttacattcccaccaacagtataaaagtattcctatttctccacagcctcaccagcatctattgtttcctgactttttaataatcgccattctaactggtgtgagatggtatctcattgtggttttgatttgcatttctctgatgatctctgatgatgatgttgagcttttcttcatatgtttgttggcctcataaatgtcttcttcttcttcttttttttttttttttttgagatggattctcactctgtcacccaggctggagtgcagtggcttgatctcggctcactgcaacctctacctcccgcgttcaagtgattctcctgcctcagcctcccgagtagctgggattacaggcacctgccaccatgcctggctaattttttttgtgcttttagtagagatggggtttcaccatgttggccaggctggtcttgaattcctgacctcgtgatccacccgccttggcctcccaaagtgctgggattacaggcatgagccaccgcagccaaatgtcttcttttgagaagtgtctgttcatatcccttgcccactttttgatgtgttgtttggtttttacttgtaaatttgtttaagttccttgtaaattctggatgttagacctttgtcagatgggtaggtttctcccattctgtaggttgcctgttcactctgatgatagtttcttttcctgtgcagaaggtctttggtttaattagatcccatttgtcaattttggcttttgctgcaatggtttttgtcatttttgtcatgaaatctttgcccatgcctatgtcctgaatggcattgcctaggttttcttctagggtttttatggttttgggttttacagttaagtctttaatccatcttgagttgattgttacataaggtgtaaggaaggggtctagttttagttttctgcatatggctactcagttttcccagcaccatttactgagtaggagatcctttccccattgcttgtttgtggcaggtttgttgaagatcagatggttgtagatgtgtggtgttatttctgaggtctcttttctgctccattggtttatatgtctgttttggtaccagtaccatgctgttttggttactgtagccttgtagtatagtttgaagtcaggtagcatgatgcctccagctttgttctttttgcttaggattgtcttggctgtacggggtcttctttgattccatataaaatttaaaacagtttttttctaattctgtgaagaatttcaatggtaatttgatgggaatagcattgaatctataatttactttgggtagtatggccattttcatgatattgattcttcctatccattaggatggaatctttttccatttatttgtgtcctctcttatttccttgagcagtggtttatagttctccttgaagaggtccttcacatcccttgttagctgtattcctacgtatttcattctctttgtagcgattatgaatgggagttcattcatgatttggctctctgcttgtctattgttggtgtaaaggaatgcttgtgattttttcacattgattttgtaccctgagacttggctgaagttgcttatcagtttaaggagtttttggcctgagatgatggggttttctaaatataaaatcatgtcatctgcaaacagagacaacttgacttcctctcttcctgtttgaatacttttatttctttctcttgcctgattgccctggccagaacttccagtactgtgttgaataagagtggtgagagagggcatccttgtcttgtactggttttcaaagggaatgcttccagcttttgcccattcaatatgatatcagctgtgggtttgtcataaatagctattattgagatatgttccatcaatacctagtttattgagagtttttgacatgaagggatgttgaattttatcaaaggccttttctgtatctattgagataatcatgtggtttttgtctttggtccggtttatgtgatagattatgtttatcgatttgcgtatgttgaaccagccttgcatcccagggatgaagccaacttgatcacggtggataagcaacacagtgagaccctgtctctacacataattttaaaattagccaggtgtggtgttgtgcatctgtagtcccagttacttgagaggctgaggtgggaaaatcgcttgagctggaagagtacaaggctgcagtgaactatgattgggctattgtacttcagcctgagtgacagagcaagactctgtcttgatgattgattgatagctagatggatggatagataaacagacagataaagatagagagacagacagagttagcaggtactgcctttctaaagaaagaacatttactctgaaacataaaggatgagaaggattcagcctacaaaatgtctaagtccaaggactcttgagcagttaaacggtctgtggaaagcattaagtgttgggggaagttgtacagttggccctttgtatctatgggttctgcactcatggattcaaccatcttcagatcaaacatatatttttaaattgtgagggtactgaccacatacaggcttttttcttgccattattttcgaagcaacagtagaacagctattcacatagcatttacattgtattgggtattgtaagtaatccagagatgatttaaagtatacaggaagatgtttataggttatgtgcaaatactatgccattttatatcagggacttaaggcgtcggtatctgggttgggttttggtatctgcaggaggtcctggaactgatcctccacagataccaaggggcaattgtactatattccaggtgttgaaaagagggactatgatagagaataggaagcaaagagctgatgttttgacatgagacctcctaggtaagcagcagtccttggaaagggatttgtattttattttaagaacagtgaaaaatcactcgagaaacttaaaggatgtattcttaaacactgacctgcatctaaatcagtgataggttcaaaataaagatgtcaaggtttctctcctctcagttttaattcacttggtctttgacggtgccaatatagcagatttggaacaagcttgtcaaagattctggccccacctaaatgttacctatgtcctcaatcagtaatttcactatcttacgtaaactctcatacgtctctgaactctttttggcctttttcaaatttcgtaaccatatttttgaattctatatgccattcacttattatgaatgttggtttttctttgttgcataaagtttcttgttctctggtatagaaatacaaattttttttgttgtcctcttttgtttcagatttggatttacagtgtgagataatcagctacatagaagtacccacttatgaaacagatatatcctctacacaacttcagagcatatataagagagagaaactctatgaatgtaagaaatgtcagaagaaatttagtagtggttatcaacttattctacatcacaggtttcatgtcattgagagaccctatgaatgcaaagagtgtgggaagaactttcgtagtggctatcaacttactctacatcaaagatttcatactggtgagaaaccctatgaatgtacagaatgtgggaagaactttagaagtggttatcagctgactgtgcatcagagatttcatactggtgagaaaacctatgaatgtaggcagtgtgggaaggcctttatatatgcctcacacattgttcaacatgagagaattcacactggtgggaagccgtatgaatgtcaggagtgtgggagggcctttagtcaaggtggacatcttagaattcatcagagagttcatactggcgaaaaaccatataaatgtaaggaatgtgggaagacttttagtaggcgctcaaatcttgttgaacatgggcagtttcatactgatgagaagccatacatatgtgagaaatgtggaaaggcctttagaagaggtcaccagcttactgtacatcagagagttcacactggtaaaaagccatatgagtgtaaagaatgtgggaagggctataccactgcctcatactttcttctacatcagagaattcataaaggtggaaaaccctatgaatgtaaggagtgtaagaaaacctttactttgtatagaaatcttactcggcatcagaatattcatactggtgagaaactttttgaatgcaagcaatgtgggaagacctatactactggttcaaaactctttcaacatcagaaaactcatactggcgagaaaccctatgaatgcaaggaatgcggaaaggcctttagcttgtatggctaccttaaacaacatcagaaaattcatactggcatgaaacactttgaatgtaaggagtgtaaaaaaacctttactttgtatagaaatcttactcgacatcagaatattcacactggtaagaaactttttgaatgtcaggaatgtgggaaggcctatagtactggctcaaaccttattcaacatcggaaaactcatactggtgagaaaccctataaatgtaaggaatgtggcaagacctttagcttgcatggatatcttaatcaacatcagaaaattcatactggtgtgaaaccctatgaatgtaaggtatgtagaaaaacctttactttctatagaaatcttactctacatcaaagtattcatactgatgagaaaccttttgaatgtaaggaatgtgggaagacctttagacgtagttcacaccttactgcacatcagagcattcatgctgataaaaaaccctatgaatgtaaagaatgtggaaaggcctttaaaatgtatggctaccttacccaacatcagaaaattcatactggtggaaaaccttatgaatgtaaagaatgtgggaaggccttcagtcgtgcttcaaaccttgttcaacatgagagaattcatactggtgagaaaccctatgtgtgtaagcagtgtgggaaaaccttcagatatggttcagcccttaaagcccatcagagaattcataggagcataaaagtgtaagaccgtaaagagtacgagcgcgccattcatcatcagacagcccacactggtgagaaatgatggaatgttagtcttataggtatggctttagcaattgagagagttcaaaatgcagatcttgccacattagaaagcattcaatgtcagtcctgttttaatggaatatctgactattcaatggtaaattaagaaaaaaaaaaaaaaaaacaggaatcccagtttcttcatgcctacaacatccatggcatggatttttttttaaaaaaacttaataattaaggctgggcgcggtggtttgcctgtaatcccagcactttgagaggccaaggtgggcggatcacgaggtcaggagatagagaccatcctggctaacacgatgaaaccccgtctctactaaaaatacaaaaaattagctgggcgtggtggcaggcgcctgcaatcccagctactcgggaggctgaggcaggagaatagcgtgaacccgggaggcagagcttgcagtgagcagagatcgcgccactgcactccagcctgggcaacagagtgagactccgtctcaaaagaaaaaaaaaaaaaacttattaattaaaaggatgaccaaaagcctttcatactagatttcaatggctgtattacaaattaccccaagccttaatgtcttaccacaacaataaacatcactcataggttctgagggtcagaaattcggaagaggcttaactgagtgcttttgaattggtctttccatgagcttgcagtcttctgaaggctccttggggcggaaggatctgttttccaggtggcttgctcacactggcaggctggcttagacagtgagagtgccaggagaaagctgtgactttggagccgttttttgtttgtttgtttgtctgtttttgtttttgtctttgttttttgagacagggtcttgctctatcacccaggctggagtgcagaggcatgctcatagctcactgcagctttcaacttctgggctcaagcaatttgggtggcttcttgagcatattttgcatgacgtagaaatataagcaatttgtactcagaatgccagtcgtggtgttttaaaaatatgtcctcaaattcttgaaactctacccttcaaacttgaagtctggccaggcacggtgactcacgcctgtaatcccagcactttgggagaccgaggcctagccaggcgtgatggcacacgcctgtagtcccagctactagggaggctgaggcaggagaatcgcttgaacttgggaggcggaggctgcagtgagctgagatcgtgcctctgcactccagcctgggcaacagcatgagactccgtctcaaaaacacaaacagcaaataaaaaaacctgaagtccaattcccttccctttgcatgtgagctgaacctagatgaacagaatcttcaggatcacctttccctggtgctcatgctcacttgttcattcactctcgtgcaaatccggcctcctctacctagggcttctgcagaggctgctgacagagccatttatagaagtttcattgaatggtgattctcataattgtcacattagatattgctggagtcttaaccaagggtttttaacagtcatactctatctgttctttggagaacagataacctgcctgtgaagtgcccactctgctccctctctgaaataatcattgtgttaatgttgaggccatgcttcctatgggctgcccccagctccttttctgagcataacataagtattcatgctagtcaattcttacgaaacccagacccttcagctggggaactgtgaatcagccaggctgaaactgttttcatactgccccgcgttttcatagtttttctaccaatcttgcttcatccctctccttcagagtcatccatcttgtaccatggcctgaaggctttcactgcctttcctggacctctttttcattcatagccccctccttccttctgatctgatcttgctttttgcttttcagaggatcaaaatgaacacataccctaaggttacctacatactatgtttccctaacagcactctggattttatctttgtccagagactatttctgaagtttagcatcatttgctttctggagaggctgggagtttccaaaagcaagtcctggttcacttctgtttaacagtctttttctagcttatctcacttctagcacttaagcaacaagaagcaagacaccttcaacattctgcttgggagtttcctaagctaaattacccactttttttgttgctgttgtttgtttgtttttgtttcttaaagacacaatcttgctttgccacccaagttggagtgcagtggtgtgatcatagctcactacaaccttgaactcccgggctcaagtgatccgcccatctcagcctcaggagtagctaggactacaggtgtatgcacaactacatctagctaattcttttttttttttttttttttggtagagatgaagtctccctatgttgcctgagctggtctcaaactcttgatcctcctaccttgacctcccaaagtgctgggattatagcacgagcctgggccagttacacagttctgtaggtattattttgtacttttcacagtaaccacgtgcagccatgttgctttctgctgttgcataacaagaatcccttcccc

SEQ ID NO: 3488 - DNA, 271 bp, Homo sapiens
ctcgccctcgcggccacactttgaaagccctcccctaccggctctacactcaaacagcccgaggcttcgggcagcctcgagttcggattccacttctcagccttctggggtcactgaaaccctcagaactccgaggacaagtcggacacgccttcgcctcagccatcttcgccagcgcaataagtctctgtgtcttcacactcctggtagagggaaaactaaaacctccgggagccagcgtccggcggtgcctgcaatctaaccgggattt

SEQ ID NO: 3489 - DNA, 685 bp, Homo sapiens
gtgcttatctaaaggcttgactatagctgtaggatatgctttcaaatggcttagttctgtggctgataagtttatactggcaagtcgtttcttctcccaaggggccttgtccataagctgcttgagtgtgcttgtgacgtgacagatgtgatcctttttataatctctctttggaagttagttctgccacgttctgtttgttcccagaaaatcactaagtctggcctacattcagtaagagaggaattaagtttcaccttttttttttgaaggcaggatctttcactgtcgtccagtggagtgcatatggctaacttcagcctcaacctcctgggcttcagtgatcctcctgcttcagcttcccgagtagctgggactacaggtgtgcgtcaccatgcccagctaatttttaaattttttgtagagatgggggtctcaccaacttgcccaggcttgtctcaaactcctaagctcaagcagtcttcccacagtgttcccaaagtgctgagattataggcgtgaaccactgtgcccagcccactttcactttttaaagagagaaatgtcaaaacatttgcagacatatttttatttttaaatcgccacacctgacaccactcaatcattgttgaagtctcaaaaattagtactaataaactaacttgttaatgtcacatatgcaata

SEQ ID NO: 3490 - DNA, 271 bp, Homo sapiens; identical to SEQ ID NO: 3488

SEQ ID NO: 3491 - DNA, 2128 bp, Homo sapiens
cttctatatccattttagggtctttcttatccagcaaaatactttgtttccatctgctaaggtgaaataaatacgtggaggtaaaccacaggaaaagtgatttgtttttaatctaggagaaaaactagtattctagataagcatacaagatctgtgtactaagaatacattgtctctggatttatattctggtcataatataggtttgggattaaaggtgctgcttatctaaaaaataaagatggtttagtcatctcatgtggcccagatagctgttctgaatggaaaccaggatcccttcaacgatttcaaaacaaaattacctctactacaacagatggggaatctgttacgttccatttgtttgaccatgtaaccgtaagtctgtgtttctattaagtattattaatattttaaatgtaaggaataaataatgtgatttagtaatatgtattttcttctctatgctaggtaagaatatccatacaggcctcacgttgccattctgatacaatcagacttgaaataattagtaacaaaccatacaagataccaaatacagaacttattcatcagagttcccccttgctgaagagtgagttagtgaaagaagtaactaaatctgtggaagaagctcagcttgcccaagaagtcaaagtaaacatcattcaggaggaatatcaagaatatcgccaaacaaagggaaggagcctatacacacttctagaggagatacgggacctagctctcctggatgtttcaaacaattatggaatatgagaggctcttacttcactaagagctgtcatatgtgaatgttttacagtcttttcaaacttaacatttaatgtgtgtcactcagtgctctagtcgatcaggactgggtagctatttcgcatatatgtaaaatgttctcagccgggcacggtggctcacgcctgtaaccccagcactttgggaggctgaggcgggcggatcacgaggtcaggagattgagaccatcctggctaacacggtgaaacccagtctctactaaaaatacaaaaattagcccggcgtggtggcatgcgcctgtagtcccagctacttgggaggctgaagcaggagaattgcctgaacccaggaagaggaggttgcagtgagccgagatcgcaccactgcattccagcctgggcaacagagcgagactccatctcaaaaaaaaaaaaaaaaaaaaaaaaagttctctcattcattaaagttgcattaaataaagtataattaggtcactatggaaacagagttttcagtaatgagtggacagtaagtggtggctctgcagatggcccctttctaataagtttaataaacccgaaattactggttatctcgtctccaatcagttctttcaaatgttttatttttccagtaattacgtttgggtcataggcccctctgacatttgtcaggtaattttcagtcactttcagataataagacttagtcctgagtccacttctccacttaaaaattcctatttcatatttgactcaacccttacctgctgtctccagtactagctgggattaggacacagggcgggtggtaggatgcacaggtaaagttctgtcacaggccttccttcccactctcccattttgatgaggtgcattggccttccccttgttggaaacttgttactttgccagcaaacaccccactagaaaaattaactctaggccgagcgcagtggctcacgcctataatcccagcactttgggagtccgaggcgggtggatcacaaggtcaggagttcaagaccagcctggccaagatgattaaaccccatctctactaaaaatacaaaaattggccagggacagtagctcatgcctgtaatcccagcactttgggaggctgaggggggtggatcacaaagtcaagagatcaagaccatcctggccaacatggtgaaaccccatctctactaacaatacaaaaattagccttgtgtggtggcaggtgcctgtaatcccagctacttgggaggctgaggcagagaactgcttgaacccaggaggcagaggttgcagtgagctgagattgcgccacagctctccagcctgggcaacagagcgagtctccatct

SEQ ID NO: 3492 - DNA, 13824 bp, Homo sapiens
ttttaagtaatcttattacagtgatagaaatacaagataagacttgtcctttctctataaatgttgtgatgtgctattcagtcactttttttttgaaatgcagatttgaaatcgttggctatggatgttcaatttgtgtgggaaatacagcacccttatcagacgcagttttaaatgcagtaaaacaggtaaaatgtgtggattggcaagacatctaaatgattttcttaactatgttttgttactaaattatagaaaatatatattgatgtgtttatatttctgtaaactctgcacctcttggcaatagtaacctgtgaatctttaaatgattcaatgaatcatttgtagatccttgaaataattccttcataatacaaggaattgatttagtttatttgcaagatgcatagttctatatttaaaaattagtaatatgttttttggttaatctcgccctcagactttaagattgcttatatatgattatccagatttgtaccatctctagaattgaatttatttgtttgtgtgtttgtgtttttttcagggtgatttggttacctgtggaattttatctggaaacaaaaattttgaaggtcgtctttgtgattgtgttcgtgccaattatcttgcctctccacccttagtggtagcttatgccatagcaggcacagtgaatatagatttccagacagaacctttaggtatcttttcctttatgtatatgtatacctacacatacttttcccaatggaagtcgttatatttttgaaatgtttcttagaccatctattctttgaattatttcaggaagacgtatgataatgtatagttattaatttctgtgtttatgtgaagaaaataaaatgtacaggtaattagttcttccagccgcttaagcctgaagcaccctgttgaatcatttacttgatttccatgatatgtctttgaaaaggtatgaacattttcagagttatttttttactgagtatcatgttcaaaaattttaaccaggtactgaccccaccggcaagaacatttacctgcatgatatttggcctagtcgagaagaagttcatcgagtagaggaagaacatgttatactatccatgtttaaagcattaaaagataaaatagaagtaagagtcttatgtgtttcttaaatagtttaatcaatttgcagtgttcttttatttcatatatcttctgaatagaataaaaattaaaattacattattttgaatacagtttttaatgtgtaatagtaagtttgtatctggaatctgtagttaaaaagaaaatggcggctgggcacagtggctcacgcctgtaatcccgacactttgggaggctgaagcaggttgatcacgtgaggtccggagctcaagaccagcctgaccaacatggagaaaccgcatctctactaaaaatacaaaacaattagccaggcttggtggcgcatgcctgtaatcccagctactcaggaggctgaggcaggagaatcacttgaacctgggaggcggaggttgcggtgatccgagatcgcgccactgcactccagcctgggcaacaagagtgcaactctgtctcaaaaaaaaaaaaaaaagaaagaaaatgtcttagaggatcagaattcattagtgttgattggatgatctgtgcagcaaaccaccatggcacacatttacctatgtaacaaacctgcacatcccgcatatgtaccccagaagttaaaataacagttgaggggggaaaagaaagaattgattaggtgttcagaatacatcattgaacaaaacacaaaattctcctggggagaggcaaataagctgtaaagagaataattagctaaattatgcaatatttattattttttattatttattttttggtgttttttgggagatggcaccccactctgtcacccaggctggagtgcagtggcctgaagcagctcactgcagccttaacctcctggactcaagcaatcctgctcctcagcctcctgagtagctggggccacaggcgctcaccatcaggcccagctaattttttattttttgtaaaataaaaaataaaaaatgctcaggctggtctcaaactcctggactcaagtgatccgcccacctcagcctcccaaagtgttgggtttacaggcgtgagccactgtgcctggcctaagaaatggtgagatttttggctgtagtttgaaggcgttgatgtggaacaaatacattgaaaaagcagaggtttttctccattataacattcttagacattaacagcatacctcatacatgcttaatctctctgtagcaacatatagaaatctttctaaattctttaacttttttggactctgtgaagtctttatgttctgtttatattgaaacttgccccttggagtgttcctgaacatctggtatgctagaatttgaggagcaaatttttaatcattctgtccaaaaacatcatgattttttagaacacactgttttggctgggcatggtggctaatgcctataatcccaaccctcagggaggccaaggcccacgtatcgcttgagctcaggagtttaagaccagcctgggcaaaaataaaaatttaaaattttttaaaaaaaagaaaagaatacactcttaattttctttccaaatggataaggcctatttttgttgttgttgttgtgacctaagtactattttattcccttgatcattttcatgcgcctctttttctgagtccttttatctttgctttggttcatcaacgaaaactgtattcacagatggggaataaacggtggaattccttagaagcaccggattcagttttgtttccatgggacttaaagtctacttatatcagatgcccttcattttttgataaacttgtaagtactgttttactatttgatcttttaaagattgttataaactaagaagtcttgtaaagagttaaatgccttgaacttttaccttctagaccaaagagccaattgcactccaggctattgaaaatgcccatgtcttattatatttgggagactctgtcacaacagatcatatatcacctgcaggaagtatcgctaggaatagtgctgccgctaagtatttgacaaacagagggtatgtgtacatggctttagagtgtttttgttttttcttgtttcttactgattaagaggcttctattggtcttgttccttttttccagtaaatacatgctatcgtaggtaatctgactgccaatgtgtttgtcttaagcaagaatggagagtggcggggtggggaggcggggggtaccttctgtacttgtctttgcttgtgactttagaaaatgaaattgcaattttaaattgagcccttatagtctaaataaacagctgattggaaataagatttttctttttcagtgctactttattgaaaagtcagcttggttttacctaccaaatgaagcctgctcatttggttaaaaccagcttcccattattggagtaaggaatttaaatgtgtattttatgggctataacatgtacgtgtgtgaggctgggaatgatatgtacaaatcaaaagacaatgaatttctgcttcatgagcctaaaattttataggaacaataaacgtaaaggccatttatattggagatataaatttaaaactggtaagatttcatttctacatgattaatcatgtagagttgccctgttatcaaaggactgttttgacaatagagacaaagttttgttaaaagcaggatttgtagtactgctacctgattagcttattggatgcttgtttgatgcttgagtaattaaaatgacaagctttttcattgaaatttatttatttatgtatgtatttatttatgtatttatttttgagacagactcactctgtcacccaggctggagtgcagtggtgtgatctcagctcactgccacctctgcatcccgggttcaagcaattctcctacctcagcctcccaactagctgggattacaggcacgcgccaccatgcccagcaagtttttatatttttagtagagacagggtttcaccatgttggtcaggctggtatcaaactcctgaccaagtgatccgcccacctcggccccccaaattgctgggattacaggcatgagcaaccgtgcccagccaaaatgtcaatgtagcttgtgttgacatgtgataatattgcacagcttttattataaagtggtgagaaataagtttcctttcctgtaaatatttttttggttgtgatttccatcttcatcataattgtgacatacctccaaaaaagaaaaacagtcaacacttctctcaaatgtacaatttttgtaattattatgcctcctgatatgtatttcttagcacatttaatccagtagtgctcatcaattagaattttctaaaaataaagacactcaaacctcctaccactcccatcctgaagtaaaaatttaaatgcacaaatttagaatattgttgcctctgcataaaagaccaaatcagaggctgataaaagtcagttgttgattgttgagatacttatgttcagttatttttccctaaaaagttatatatggtcactaatccagtagcaataccccccgcacccagattatgatttctaaatactgtttcccactatagtgaaccagtgcttcatggagaaattattgattccagatctgggactggaaaatgtacacaattttaccaaaaattaccaagattaccaaaaataaaattacaaagattacctgatggtcacagaccatcaggcttctgtctaaaggtctcagggtcaggaccagctcattagcttgaaaactggtaaataatcaattctttaaccagcctttcatgtatggaatgtatttcagcataaccaaatcattgatgaaggaaagtttgtcatttgtttgtttgtttgtttttagagacagggtctcactcttgcctgggctgaaaggcagtggcacttggccctctgctgcttggaactcgtgggctcaagcactcctcctgtctcaccctcctgagtagcttgggactacaggctcgcaccgtcatgcctggataatttttaattttttgtagagatgagatctccctttgttgcacaggctggtctccaacacatgggctcgagcattcctcccactttggcctcccagagtgctggtattgcaggcaagagccaacatacctgctggaaagtttttctttatagaacttttgtacctaaaaaatgaagaaggaatgggtgaattatagtatcactattttacggtctctaataagcaatctagaccacaatgagcaatcactggtaacattccaggaaaagacagttggctatcttgtgcctcctaatagaagtacatatgacctatgaagcattgttgccaaaaattaaaaacccaaatcttatcaaaccactggatctgacatgtgatttacaagaacagaaggcagaagaacatgttaaatgattcatggagatgcagtcaacacaatgtgggtacagaaaactatacaagtaactttattgcatcagatagagcacaagcaggaggaaggagagggaacatatactgtcattcttcagtatagatgtgggactggttccaggaccacccatgtatacccaaatccacacatactgaattcctacagtcagccttgcagaagccacatatatgaaaagtcgtatttgcagttttctgcatcctgtgaataatatattttctgtcagtgtttggttgaaaaaaaatcgatgtataagtggacccacacaactcaaattcatgtttaaaggtcaactgtagattaaaacacttgagatcaactgaacacatttatgaactgcatttggatcctgatttgaacaaaccaacttagtttggaaataatcagtgacaatattgactatctgatgttaagaaattattgtgattttttttttttggtgtaaagatttttttttaagagtctacatcttttagtgaaatgtactgaaaagtatgctgttaaaattatctcagttttgcttcaaaataatctaatggggttgactgtagaagaaacggagcatctgttaagttatagcttggtgataggcgcatggacattcatggttttgttttcttttgtgtttgaaattttctgtgataaaaaaatttttcaataggtcttacagctcaatagtatgtgattattttccacatgtaatgaaaactgactttcattactttcttgtagccttacccctcgtgaattcaactcttacggagctcgaagaggtaatgatgctgtaatgacaagaggcacttttgcaaatatcaagctttttaataagtttattggaaaaccagctcctaaaacaattcattttccatcaggacagacggtgagaatgcaaacaaagtatttagacaatttataactggatcaaaatttgtattaaaaaattttgtgtttgttttaatctacagctagatgtatttgaggctgcagagctgtaccagaaagaaggtatcccactgattattttagcaggaaagaaatatggttcaggaaactccagagactgggctgccaaaggaccgtatttactggtattgaatcttaaaatttatcatcttaagcttcaaagagttttaactgttcccttttgtcagtaacatcctgtcaaagtttatctggattttttatagttatttgaaccttataggtatagagggttttgtttgtttgtttatttcagtgatctttggtaatattttgtactcatctagttagtatcattttaatactctgagtttggtaaaacctacatcagtcttatgtgaagaagtcagtataatagagggaaaggaaattctgttttaaactattgttttataattatttatacctattgatcattttttttggttttttagttttgagaccatgtccttgtcacccagactggagtgcagtggcgcaatcactgcttgctgcagccatgacctcccaggtgcaatcagttctcctgcctcagcctcccaagtagctgggactacgccatgagttaccacacctggccaatttttgtattgtttgtagagatcggatctctctattttgctcaggctgatcttgaactcctgggctcaagtgatcctcccgctgtggcctcccagggtgctgggattacaggcttgagccatgtgcccggcccccactgttaattttacttgcctccttttgatttaattttctccgatttgccccatcagtgggtaaaagactcagaagtagtaggccaagttgcaccttttttccccctaaataggagattgtggtgcctggctgtctgccaggaggacatttctcctgagactgtttccttgttgcagagcaaataggccatctgctgggggggaatagtcatgtgacatgtgctttttgccatttcatactcacagatgcttctctttacaattgtagctgtaaaaaggctggctgaaacacagataccatgcaggcctcattcttattttaatctttaatatctcctttaaaatgtaaatactctgaggggctgtgggaataaaacaaaatctcatccttctaagatactaattataagtattattatgagtattaatgataggtataggttatttttatcctggaaattgttttagtgtttgtttttgatgttggaagctttccttatatggcaggtgatgcttggccctccatttgttagacattaaaaaactgattacaagccatggatgggggctgggttgtgtcagttactgggccttactataggtgactgggtgataagctacctttttcattaagcgattctatatgtcattatctgtattttctctgaggccattcagtttcttgaaggaaagagactcgttcagtatgtagacatctacttagtcccctgttttcaatctggtattctcaagcccctgtgcccagtgtttgtcagtttagagaatgtattctcttccttatttctgctataacaaaaaatgagtaaaaatttgtaaaaaatgagtaaaaaagaacaaaaattggtcctcaggtggtaaaaaaaattctactttttgcacataaagtacagataagagtacattaaaagatacacagcatctttgtggtactaaaattttggagagaagggaggtgaacaggaagacacaatttgggggaaaaaagtcttaaaagactccttaggtagacagtggagaaaaaagttgaaaaacacaagtctagagcctttggctcattttttccagagaataaacctctactcttgtggagtggggattgagctggatcttactgctttgtatggccttgtaacctgtgtccacgagtattctgagaacctcatgcctctgaatctcaatccttttcctgggtcttgtgttgcacattaactcagaccttactggtatcactctctaatttcattttatcattctgcggtttcagcattgtcttctaaatcacttacctatctctgttttctaaatattcatagaattctctcatcctattccctttgttgctgtgggcttataccctcttcattattgttgttacttatttgtattttttggagacagggtctcactctgtcgtccaggctggaatgcagtggcatgatctcagctccctgcaacctccacttacaacctcaagtgactctcctgcctcagcctccatagtagctgagattacaggtgtgcaccaccatgtccagctaatttttctgtttttagatagagatggagtttcaccatgttggccaggctggtctcaaactcctggcttcaagtgatctgcccacctcggcctcccatagtgctggcattacaggtgtgagccactgcatccagcctattcttgttactttttattgtattttttatttttatgttttgtagagacagggtctcactatattgcccaggctggtctcaaactcccggcctcaaataatccttctgcctcagcctccaaagtactgggattataagcatataagccactgcgcctggccctatataccttctttattcctttattttagtggcatttcaagagtgttgaaaacatatgttagatctggcatgtttaaatagaaatccttctgagccctactttggggtcaagggagccggcccatttatagagctcttatgatgtggtaggcagcggcagtacttaaccctagagcagcagaaagggatccgaataatttagagagctccataaaaattcagaaaaataatctgtaagaaggttctgtaaatactttgataaaatattgattcagtatgagatattagactaaaagtatttagagaaaggccaaagtagatttttgccccctttaaatgctcaataaataactttcagaagtgattagagggaataaaatgcacatttattacagggtgtgaaagctgttttggccgaaagttatgaaaaaatacacaaagatcatttgattggaattggcatagctccacttcagttccttccaggagaaaatgcagattccttgggcctctccggtagagaaacattttctttaacatttcctgaagaactgtctcctggaattacattgaatatacaggtatctctaaatttttcaaatatatgattatgcactcaaatgtttatgaattattgaataagaatcaattgctgtaaattatatactaatgtcacttaatgaatgttaagttgccatttaagatgactctctcttccatacttagatctagctatgttaatagttcatgttctctgaggaaaagtggaaagaactgggtgcttataccagaaaaaaagaacacatgaaggggaatcttgacttccacttaacaagtgtcagctttcttttcatggtggtcatttttttgctgtcctgatctaattttaaccgaggcatacataccactccaaagagagcaaagttgagcgttcaaagttagagcaaaacagactttacaactaagaaaaaaggggaaagagtaggagttactgattacatgcaatcaatatttggtgtaaaatgaatgtgagtagtgagtataacttccccaattaataagtcaaaatctaaatgcagctatttttctacttaactatgaagcccatggtcaggtatctcaggtgtttttcaagcagcagcaaagtttcaggcaatcagaatataagaaattagaaccaagataaatcagacagaatctgtggcaagtatagtcattaaatatgaagacaaatggtcttaaccatcaagtagcacctggaagatttacttgctcacatgagatgtttttgctcctttcaagacaagcactggaaaagtattcagcgtgattgcttcgtttgaagatgatgtggaaataacattatacaaacatggaggattattaaactttgtggcacgaaaattctcatagtatctacttaccatagatacctttcataactggtaactgcaaagccttttgtgctggacccaggaatccttaccatggagcagcagatagtcccagtatactcacttatctcatccatggatgtaaatgatgatgaatcaacatagtaactgaaatgaaatcttcttgattttaaataatatacgaatggtgctattaatattgctaaaatcaacgtgtgaagtgtgttgtggaagagacctgtaagtatggggggggggcgatattttatcagaccattttgtaaataaaggcagaatttgtgttgaagattcttatatgaataaccttcctggatttgtttagttttgcaccaataaaactgtgtactactgtttgttggtttaagagtagcagattgaaatataagaagccagattagactctaaaattgtggccattggaatctcatttataaatggaccttttaagtatattaattcctcttcagaattgagctggacacatttggcattcttagtttgtcatataaccaggtttatccttagtctaactgcaagggatggaacctgccccaggtcacaatcattctgtccaatccagccaaggttccctccacatatgaagatggaccatggcaggatacaactgattgtgtggcaccatgtattagcagtgggaatatgtatcacatatgatgcagcctttcatatttcagcagtttgccactgtgactgtctggcaagcccccagatggcgttatattaattggattagattattttgctcaccttatgtaatactgtaacttcctataacctaatattttcggtatcattaaccaaaatttcacactcatagttgctaaagagaatgttattcaatcattaaactctgaactgatttcttctatacatttaaattatccaccctcaataatacgggtgctcaaccctatgcattttttaagtgttgctatttcttaattaaattgatttcctgtcattttgaatcatttatcacctgcgatgcatgattctattaattttgttatgttactgttttaaccaaagctgaccgtaaggataaaacacttaagttgttgctgagtactatatatcctcaatatgcatgtctgcccatcacatcaaatgttctgtcaacaagatgtttggtaattttttttaaaaaggttggaaaattaattatagaaggttctatactgtttttttaattaagaaactaagtctagcaggctaaaggttaattgtagtgattttttttcacatagatatctttctatgacctagttagttactgcaattcagaattagttcacattgcataaagaattacttgttgtaagcaaaatgctgaaactaccaaaccagtggatgaagaccactaagaactttgcacataatcatacaatcttttgaaaatattttgcaaatatgtgtttagacaataagatggactagagttcgacaaaatgatttctttatttaaattttgtataagtattttcttcgacactttcaaattatattgtgttcttgatatatgctgtatatttatttgttagtgcatgtgtttttaatttacatgaaaacatgagttaggagaaattacaggttgaaagatgaaatgcctgtatgtgctctgaagaaatggtaattccagattgtgcagggggaaacaaatctattttgttttgttttgttttttgagacggagtcttgccctgtggctgggctggagtgcaatggcgcgatcttggctcactgcaacctccgcctcccgggttcaggggattctcctgcctcagcctcctgagtagctgggactacaagcatgcaccaccacgcccagctaatttttgtagttttagtagagatggggtttcaccatgttggccagatgatctgaatctcttgacctcgtgatccgcccgccttggcctccacaagtgctgggattacaggtgtgagccaccacacccggcctatattgttttgaaagcatactctatatatagttatgggcagaggcacaggcatcctcagcagctgattcaggagatgatggtaaagctagctaactatgaattaaacattcacatatccagtctacctggtccagtaataatacaagcaaatcttgtatttcaggaacaaatcaaggttctcttaattttttggcttatatacaatgaagtaaaaacttgataaacatggtttcaaattgaggaggagagtcttggatgtatgttttaatatgtataccttataattctgcctctagccaaatgctatgtttgcaaaatgtggcatctgttagtttttattgtctgtgtcttctttgtttactataccttgggtaattttgtgttaccaaaaaaaaaaaaaaaaaaaggaagtgtaatgtcagacacacaagaaaagcaaatcagtgttgtaagcttaaagtacaatttcaaaggtcactaccaacagcagggttttttttatactttgaaaacattatgctacatatcattgccattttcatattttggggttttgctactcttatacaatggaatcaatggaaatgtcatccagccactgaattgccattattatatctaaaaagtttctaagatgacagttatcactattttgttttatctccatgctgacatttgaaagaaggtactagtatccctctagccagattgcttagtttttcgttggtaatcaaacaacagttgtactaaaggaaagtaaagctaggacctaaatcagaatcatagttgcctgcatatatggtaacaaggtcgtgtgcatttgctttcacagtgatgagtgagaggatgagaagaaattatttgacatttttctgtggttgaatagaagacacctttcttttgtctttaggtttaggaggagatactaagatactggatgtttatcctatcttagtttggttggagtaataagagagaagaagagggtggactttggcttttcagtgttttttcccctaaagagtgatattgctgacgtttctatcaattttacacataatatgtggctatgaaaccatatatctcacttaagtaacaaagtaatcactttgtctatcactaagtaatagacaaaaatcattgtctattatttaaagccaacaaaacagtgtaacagttttaagttcaataatgttaagtattgtatagaaatatattggaggcaaagttcagttgatgacaattgtgtatatgttactgatgctgtaaattatttttaataaagaaaattgtattatcaca

SEQ ID NO: 3493 - DNA, 125 bp, Homo sapiens
ctcacgcctgtaatcccagcactttgggaggccgaggcaggcggatcacgaggtcaggagatcgagaccatcctggccaacacagtgaaaccctgtctgtactaaaaatacaaaaaaattagccg

SEQ ID NO: 3494 - DNA, 1542 bp, Homo sapiens
aggggcaagcattgatgactttatacagtctgtggagcaccagaacatagctttagaagtggatgcatttggaactagaaatggcacagatgacccatcttataatggagccatcacagtgtgttgtaatgaaaaggtatgcaggtctctaataatctttctgaaaaatgtgaaaagctaacataatatcaatatactcaggcttccaacttaagaaataaaaatgaaaagcaaatactgttttcatttattacttagtgaattgtattcactggcataaacaattcatatatccatcattgtctactggcacaaactattagcaaaatacatactatagaatacctactatcaagactatatataagttcgaacatttcatgtttcccctcaaggattttataacacatgtattccaaaacttctgttttgttcttaaacaataaacactgaacatatgattctggcctcaagcaagacatccggtgtcctaaatatcagatacatgatttagttttactatatacatgttttgatttacttatacagtatttgattttacttacacagtgtttggctttttattgtgattatttaacaccatatgaaaaacataacctcttaatttaacatgtcaaattttgacttttttagagaacaaaatgaagatatttgagaacttatatcctacttgttatattttagaattacagcttttcgttagcatgcaatgccaaaagattgaattgcttcccagttcttatggacattgttagtaatgggctacttggaatggttaaaccatcagtacatatccgaactgaaagaagtacatttttggaggtaaatatatataatcttacaattcctgactctcctctatcaggaatctcccagatcacccttttaagtgctggaatcttgtttttattgagtaaaccactgcataataaattaacatttggactcattctagttctgtgactttggaaaatcaatacgttttcagagcttcaatttgtttaaagtaaaataaaatgaacaaaacatttttcaaagagaataatgagatcacatggacacaggaaagggaatatcacactctggggactgtggtggggtggggggaggggggagggatagcattgggagatatacctaatgctagatgacgagttagtgggtgcagcgcaccagcatggcacatgtatacatatgtaactaacctgcacaatgtgcacatgtaccctaaaacctaaagtataataaaaaaagaaaaggaaaaaaaaaaaaagagaatatgaagcaataaaaatgaaatcttacagcactgtgaccagcacaagaatagtgaacaaatgaaacaaaggagaaaggaaggaaagaatgaaggaaggaaggaaggaatgaacgaatgaatgaaggaaggaaagaacaaaggaaggaacaaatgaaggaaggggctttattattacttttagaaattttacaaaagaaattcaagacaaagttcaggctagaatttcagactatctacattag

SEQ ID NO: 3495 - DNA, 557 bp, Homo sapiens
agttgcaaattaattgccaggctgttttccttaagtaaattcatgtgccgtgtagaaatatgcagatatgcattacacaggcacacacagagagatatttaatatgtggaatatcactctttcatgagctttattccttgattaatttgataaagcctcacagaggattttaagcaatatttaaatgtgttgaggttatgtttggatattcctgctgcctcttttcattcatttcaagtcattcttcagctagctatgggctgccttattgctattcgctcactgcttccatcttctgcccaagtgagaagaatagatgaagaacagaaatttctctgtgaaatgtggatacccgaataatttcataaatcattgattctatgtggtggtttttgtcttcttctgtggtgaatcttcaaaactgtattcaggactcatatttctagagttttaattggggtcctctattgtcaattgtagtagtgaccagagtatcgtggtttttgccatcagataattaaggctctggtgcataatttagactttctaagctcctg

SEQ ID NO: 3496 - DNA, 5996 bp, Homo sapiens
tgtggaaaacagtaggaaagcaatgaaagaagctggtaagggaggcgtcgctgattccagagagctaaagccgatggtaggtggagatgaggaggtggccgccctccaagaatttcactttcacttcctctctctctctgtcttcactgactgcacttcttcaggagaagcttttgttatctgtatcacgcaggacatgctgctctttctgtttgtgtgcttacccatcacttggatggcagaattcttgtcacaactgagaccaccttctataaaagtaagctgaaaggaacagcatcctcgtcagtgctcggcaggggcgggtaggggatgatggttttttccctaaggtaaaactgctgttgctcttgtttcctttttaactgtcagtgtttggctttcatcagactgaacattttggtgtacacttgaactgacggtttgatttttatcattttggaaggtgatcatagcaattcctttcaacttgctaaaattcatactcccccttttaaaagtatggttctgcttacattgctgtccttttcccttggctgactttttcttctgttgcctaggttgtactttctttgtttcttaagctatttttcagtagcaaacaaggctgttttcatcaatacccacattcccactcagtaagacaatctagtcttctcccagtttaattgtgagatggataaattatttctggtagttgatattatatatgtatatgtacacaaatatatctctctactccacttttatttgaaaaaagcagcttaatgagtgtaagagaaccttgagctgcttttcacatggatattgtcactatagcatagaaacagatgcctctatcatatattggtctaattacttcctaatttaaacacgtatttttttaaatagcatgtttattttcaaatattatataattgtctgcatccttaaataattttaaacaatgtgtcccctgactgcatataatgttcaaaagtgtgaggtaaggactttcctttctgtcttctttacactttagtaaatgatttgatttatagcaagtttgtccaacttgctgcctgtgggccgcatatggcttaggaaggctttcaacacaaattcgtaaactttattaaaacatgagattttttgcctttttttttttaagcccatcagctatccttaatgtattttatatgtggcccaagacaattcttcttccaggatggcctggggaagccaaaagattggatacccctgatttgtaggttttcaactttaaaatatatgctataaaataagttcatttaagtaggctaggcatggtggctcatgtctgtaatcctagcactttgggaggccgaggcaggtggattgcctgagctcagcagtttgagaccagcctgggcaaaacggtgaaaccctgtctctactaaaataccaaaaaaaaaaaaaaaaaaaaattagctgggcatggcggcgtgtgcctataatccgagttacttgggaggctgaagcaggagaattgcttgaacctgggaggcagaggttgcagtgagccaagatggcgccattgcattccagcctgggcgacagagcgagactccatctcaaaaaaaaaaaaaaaaaaaaaaatatatatatatatgatataaaataagctcatttaattaagagtaaaggaaataggtttatttttggagggaggcagggaggctatatgtatattcaaactaatcgcatattcaacctaagttaaagcctcaataaaatatttagatataaaacctttcctctgtaaccctttccagtgcctattttggtgttactcttacttaatagcatgaataattataaaatcaaatttaaatgtttagaatcccagagcacagatcactctagtacccacatagctctgaattttaagtttgcatcacctagacatgattgcttgggcagatggaggcacaccagtaatcttcccatcaggttccatgcctgccctccacacctttctgtatccctcttatttcacaaaagctgaggagggcagcagtggagattctgccaaccctatggcaacatggagaaatgaggaaggcttccttccttctactgcttggaggtcctaattgttcagcaaatcgattctaagcccaaaacttaacaagacatatgaaatcttaaaatataaaccaagcttttcccccttttctgtctttctagtgattgaagctttcattacatcattcagtaataagcatttaaagaaagggagaaatatttcgaggttgaagactaggtaatgtggccatgagttggcacagatttctatagtattctttaatgaatggtagatgaattgtagtagatcagaatgcaagtatactttccttacctaaactcctaatttataggtaataatcctgggagaattgcccaggttatgtggcattctaccagatgccaaatattttagaaagagttgtttcctattagtattttcagttttgaaatagtgtcccttacttcaaacaatgcattaaaatctttatttaatttttgctttcattttatgctgttcatcagttcattgcttgcagattaatggcaaaaaccctctgctgcatcccaaaatacatcttctatgtgcattgttctggtgctttggacattgtagcattgggtccctaagaatgatgttttaaatggttaaaaagttcccagaagacaagtgtgaaatgctgctcacagagtagttttattttttcagcaccttagtaccttctttatttctcttccatagtatgcatgattagagttggcccctactaacaccattcctttgcatgtgtttctaaaaaagtatttcagaaatttctactgaaagtttggggattgatagaatttaggattgcttatttgtatttgcttgatataattcacatattgttgctgtagatgaaagttctataaaagagcatcatgcctattttgcattagctctagaaacattgctgctgtttgaattcactatcttcctccctcctcaatgagatattttaatttaggcttcatttttagcctataaaataatgttcagtaaaatgaggttttatattttccttttgacagcagatcattgaactaaacatgagaacttccggttttgttcttgaacttttccctgagagaggctcgctagttaaggaaactttaaagatttatgaatttttttatgattctctgaaagtgattttggaaaaatgtaccaaaagtgatgaagaggtttaggaaagagattttctgactgtctgcttgctatcatataggaaagaacttaaagagaaaagggaggaaaaatcctagacactgtaggaacatgggccagagaagtatgctctgtgtatctcagagatgatcctggataaagtgtgactttcaacattcataagaatttcagctccaggaattcaggggagaaggattctcagtccattttgctgtcttgctgtttgtgaccatgtgtatatttgtaacatcattcatgatctccttttaatggtaattgtctaagattatactctgtatgactttgttttctaggcttcgggagcaagttctgcttgaacctagccgacggttatggaaacccattgacattccaaaacaatatatacacataactatgtatttgtgtgtgtgggtgtgtgtatatatgtatatgtatgtgtgtatatatgtatatgtatatacacacacacacataaatcagccaaaatcagagaaaaggaacagggatttaataccttttttatgcttatttttgtcaaacatgtactcctttcatacgggtggcttttacaaggcaacttccgtcatttaatgttttcaactgtaattgtcttaatggaaatgttaaaattcatatctgattaacatttttaataacttagaggagattttaactttatttaaaaataggtaaaattattgtacctaattatgtctaaagtttattcaggggtaatttccctgatgtctgtataaaatcaagatcttattttactgatgcataagtcctagtgggtcaagactaggcatatgctttcagataaataaggaattactccaatcagttttccccaatcaaagaagccatgtcattttacttttagaaacatacaattgggcccaatatgggaattttcataatagttcatacatttgtcagccaacattaaaaggtaaccaactcctcaggtatttgtagtttaccctaacgcttctttaaaagaaagtaggtaaaaaaagaaaagggtagataatctttcgtatgcaaacttttcccttatattttgtctttctttcctttttgactttagtagcatcctccacacatttgtgtgcctgatttgaaaggaagctggggcacccagcgagtttagcctttaagtttctgtgtattgatttgcagattaagtaatgctgggaggaataaagaagggacagaaacatggaacataaagcattgaaaattccggtgcttgggcttcggcttcagagtaacgtcagtggcttagggttaaacggccattttattcaaatgcttgctatacaatctgaaaacacactggcaggtgctcctctccttggcaattcattgagtatccagagttctacgatgtttaactgaagaattggctaatgttttgatcctccagtgtgactgttgtttttgtttgggggtgggtttggggttttttgcttttttattcctgaagcttaccagatatgaatggctaatactccattgttctgcttgttgtaatggtgaatgctttaagaaaaaaaagtgtaatttgctaagaataattcatgatctgtttatgcgataactcctttttgttacaatttttttaaaaaaagctatttttgttaatgtaaagtaaatatttcagagcaaattttttaaacttattgcactaaatacaggctctgtacaaaaaaaaaaaaaaaaaaaaagcctcagcattttatcattccatggaaggagaatcttttgaaagaaagcattgcctcctaccagaactagacagtgaattagatcggtattatggaaatgcatacaagtaatgtcactagggcttaataagcagccgtttgctaatgtgcttcctttcaaagggttggacctttaaattgctgcaaaaggtaaattgtatttttttttaagtattggtgttctttactctagctaggctaaaatttgctaaatgccttggtttcttttaaaagttcatgtaatatttctgatttttcagaatatttgcaataagagtctggattttaaaaaacacatgcatacacacaattaagagctcatgtcttagcaagatctgggaaaccaacattgcgagagtagctattttgaaagaataattctccagaagttaacatctaatatctagtatcaccaaacagtatcgctgttctcttttattcatttgaaatgaatataattatataactaacaattgtccaaatagatgagagagcaaatcatgtgagaaaattcagaataccatctgtttcatagccgcacagattttggactttcacaaacattgggaactaaatttagaattggcaaaagtctagaagatgggtatcaaaacagaagacattccaggagctagcaattttaagaggtgtccctccaaagtgacctgatggaagtcctgaacttggaaattaggttctactcacttggacatccctgcatcatggactgttgctgctccctgttccatatgctcgcaatctcagctatttggaagctaccaggaatgctttctaattatcatttgcaactagaactgtaatcagaaagaaattttgtatttttgtataacttgattgtgtgccattttatataacaggtcctgttttacaaataaattttgttttactaacattgtgtttagaaattataa

SEQ ID NO: 3497 - DNA, 352 bp, Homo sapiens
atggaagagaaaagttatatttcagtgtaaatccaagagacccatcttctatgagaggcttaccagtgcattagtaataaaacattagcaatttagctagagcactgagattgtataatccttgcatggatgagcagagctcaaagccagttgttcctttaaagcatttaatgcaatggctaatgtttaggattaaagtttttattttatcctataagataattaagtcctaagtcactacaacttaagtagcttaactgtatgttggtacccaaactttttctataatggttaaggaggaggcacttactgagtttattttaaagttatgctagaaatgtttttcttttgt

SEQ ID NO: 3498 - DNA, 643 bp, Homo sapiens
gtttaaattccaagtgtgggatggaaggtttggggtattaggcaattgataagctgtgtgtttttgcatttaagctttaataatggaaagcgcccaaaaccttttctttttcagaacaggaaaagctaagacttagtctcacccctcttctgactttttcaaaacagttttctaattccagagaagagcctgagctctgagaatcattctcctcatcttattttccataactttgtcctggaaaatgcagtctgggggaaagcattttaaatagtaatcatctgagtctagtccagaatttggaatccaagggcaggcggatactttgtcataaacaggagcaataatacgtagataatgcagtcagtggaggaaaagtctggcgctgctgtggctctgactgctcctggattagttactagaccaaatgctgcaaactggtccattgctttgctttgagcaagcaccttattttatttaacccctgcatatacacttaagacattgtatccacatgtttctaattcatttacacttcactcatcagcatctgttgggtaagcaccctgtcacctccaagttttatgagctgtgtttactaggctgcaattcttgaacagggatatcgtatattccacaaaaa

SEQ ID NO: 3499 - DNA, 550 bp, Homo sapiens
tcatgaaacaacaggtgctagagaggatgtggagaaataggaacgcttttacactgttggtgggagtgtaaactagttcaatcattgtggaaaacagtgtggcgattcctcaaggatctagaactagaaataccatttgacccagcgatcccattactgggtacatacccaaaggattataattcatgctactataaagacatatgcacacatatgcttattgcagtgctattcacaatagcaaagacttggaaccaacccaaatgtccatcaatgatagactggattaagaaaatatggcacatatacaccatggaatactatgcagccataaaaaaggatgagttcatgtcctttgcagggacatggatgaagctggaaaccatcattctgagcaaactgtctcaaggacagaaaatcaaacaccgcatgttctcactcataggtgggaattgaacaatgagaacacatggacacagggaggggaacatcacacactggggcctgtcgtggggtggggggatgggggagggatagccttaggagatat

SEQ ID NO: 3500 - DNA, 2390 bp, Homo sapiens
gcaaccatcaccaccatcaattttagaacattttcatcacctcaaagaggaatcccttgtccttttgtagttatggccatccctggaagagtacttttttttttttttcaactgaagcacccagagctcttgggttccctcttaactgctttctgtggaagtatagagggccatgtgagggaagccgttatccagagtacatgactgctagaaaatggagtttggggctccctcttcacttctgctgatagaagcataatggctaggggatgggtagtctcaccagagaatgtggagctttcagactctccttatatatgataaaaaggatttttcattgtagtggggaaaaggtggtttgatcaaatggcattgggaaacttagctcactggaaaaacagatctgtacctttcacactaatgaaatgcctgagatattaaaggtctaaatgtaaaattaaagtacatgaaaaacagaataatatatatgtaccctcggtttgaaatagactttaagcactaatgcataaccccaaagctgacattaggcttttatatggtggaaaacatcatagtcaatagataaatgagagactgacacaaagtgtttgcaacagatataataaaggactgtaattcgtgatattcaaagtactattacaaaccaataataatctgcaacttagaaaaatggactaatgtcccattcacaaaagatgcaataaaagcagttaatgaaaattatccaatatcactagaaatcaagaaatgcaaattaaagtgattatctactttttccccaaaagactgactaatcgagtgataacattcagtattggtgaatgtgtggaaacaagggaattccattgttgattacatatctattgctttatgtatataccctttgaattaatattccttggaaaccaacatatacaaaggtagataaatgtattagtggcaaaaaaattaatggtaaactattaaaacaacaagtgtccatcagggtaataaataaattaattatggtatatatccattcaataggaattatgcagctgttgaaaaaaaatcaatgtgtgtagtcatagaaagatagctgtgctatactaaatgaaaaattgcagacctgtattgtagtataggcccataattgtgatatcaaaaataaaaatcaaaatatatattatagtaggcatttgtttttctctgcccagtttcccttgcctcctccttttggctgcactatctcatcttttccttttgagtaactggccataccctaccatatgtttttgatggacgtggccaataaaattgtctctgaatttcaaaaggcatttggatctgtgtcatccaatggcaactccctaaaagctgatgcagttattcttttgattggtccttggaaccaccctggtttttgtactttccaagtctgtgattcctcaaactacccattgtctttccggtacttgatttttgcctcctgttggtcagttgcttgcaagtaaagaaacaatcatacagaatttggtacgaagattgggtaatgggcattagaatctttggaaaaatcaggtattgggagttgctttttggatgagatggggcgaataagacttatattctagactggaaagcatctcatggtgtgcgatgagcaaacgcctgattattcattatagtcacctgggatgaatagaggtctagggttctggataatgataatttaaggaggatggagaatgctgaatccaaaaggtatatgtaatactggtatctaactgcttggaataacttaaagtttagctcttgaatttctagcattaaggcaaaaaaaattcacctaagggattttgtatgatattgttgaaagatgtcttacattgtttaaagtcatagggttaagatggctcataaccaaatttagagactatttttatgcattgttaaagtggaatgctggttaaattttatactttattcacaagagtcactgtgaattgaattgtgaattcagttctgaattgtgttcccaccagcaccaccaaatgctggcctctaccaccaccaaatttacttgttgaagtcctaaaccccaacatgactgtatttggacataaggcctttaagaaactaaggttaagttaggccataagagtgaggccctaatcccataggactagtgtccttataagaggaagagacaccagaggtttgtctctccacatgtgcacagaggaaatgctgtgtaaggacacaacaagaatgctgccatctgcaagccaggaggagagacctcaccaggaaccagccctgccagcaccttgatcttggacttttaatctccaggactgtgagaaaataaatgttggttgtttaagcca

SEQ ID NO: 3501 - DNA, 589 bp, Homo sapiens
ttgacaagacatgccaaaacataaaaatatgtacactgcaattagtttctgaatgtagatgttacaacttaaacttatttttaaaatatttaaaaataggaaggctagacatgcctctgtatagaaaatctgataaaaatatttctccctaaattgtaaattcattgatattccagtaaaaatttccatatttttttagttgagaagctgattctgatcatctgtagaattttgattttaacgaggaatgtagtttacattaggaatgtagtactaatactaattgaacatttgctaatgtttcacacactattttaggtgctgggggatacagtaaggtacaagatggacaaaaatacgtgctcttacagatctagtagaacagaaaaaattaaatgcatgctatgtgataagtatatgatatgtcccataaagagaaatgatataaaaaagaagctagggagtgctggatcaggcaccttactatccccagaacatgttggtattagaggatgagggaagaactagaggtaactgtgagacacaaaaggcataatgaaaatagtcatgatagtcccaaggcagatat

SEQ ID NO: 3502 - DNA, 481 bp, Homo sapiens
gtcacactttccaattttaaatcaaaactgtagtaaccaagactatgcagtactggcataaggatagttatagagatcaatggaatagaaattaaggtccagaaataaacccatacatttatgctcaattgattttcaacaaggatgtcaaaacaatttaatgtgggataagaagagttgtttcagccgggcgcggtgactcacgcctgtgatcctagaactttgggaggctgaggcaggtggattgcctgagctcaggagtttgagaccagcctggagaatatggtgaaacccagtctctactaaaaatgcaaaaaattagccggctgtggtggcgtgcacctgtaatcccagctactcgggaggctgagacaggagaattgcttgaactcgggaggcagaggttgcagtgagccgagatcgcgccattgcactccagcctgggtgacagagtgagactctgtctcaaaaaaaaaaaaaa

SEQ ID NO: 3503 - DNA, 6558 bp, Homo sapiens
gtgaaaaaccaacccgatactggtggtaggaccatttgcaatcaatagttactgacagtattctgttgcttctagttccggtggtgaggagacctttccaaatataagaggaataaagaagtcacctccccagctgtcatcatcttccagcagattgagcaagaatattttgagcactacaggaaaggtaatgtaaacttagaagaaaaatctgacttagatttattctgggatttttgtttgtttgcttgcttgtttcttgtgtacatgttcacagtgtttattactgcatccctgtttttagacagtccatcaaacccgagatgatgatcagccacgtgattttttcaagaagaggaatagggtgaatgaatctcatcagaaaagcaggtaaatagttttagtataattgctttatcttgcaaaagactcattatctctgttgtccagattgaatatgtggagtggggaaaaaagtatgtctatagataagaaatatacatttataatttttttctagcagaaatgaatagaaaagtggtttaagcataatagtggataaggattccaacggtcataattctggcagttgttagcagaattataattttgagtaagtcctttaatcacttttctatgttagtttccttttatataaaaggatagtgacaataattaatttttatggatgcatactgacaggcaggaacaaaatgttttaacagtgttatgaattctgaataatggagattccttcatttcttcatttattcaacatttattgagcacacgttgtactattggcaatgatttaatgtcctgcatatttattaattaaaatgtagcacgtattcaaatagttgcttaggttgtttgaaaccactgggcaaatgaacctctgaagtttccagaaagcatgtttaccacccatttctattcattctatctgacttatattacagagaagtattattaatcttaaatgccacgttcttggtaaataaattgaaaagaggatattttcaactctgatgtgagattcagcatcagaataaattatgccagagagaattagtttctatactcataatgcacacagtattcattattccctttacctgctattcacaaggtaacactaagaccctgtgttttcattcatatgtgttacagggcaccatatgattttatttctgttctttaaacacaattttcccaaatgtgttttctgtttgaaaacattgtaacaagcttttgatttaaggtacaggtttgtatgtgcaatacttttatatattaaaatttcactcagctcagaatcgccaccaatcagtgattaaactgcaaaacttgcatgtttatttgatatttacacttaatttaaaataggtgtataaaataaaactgtttttacttctgaatgttattaaatgcttttgatggtaacaattccagagttctacgactgattttttccaaactaatgttttttttttaaagtacacacgaaagtatgaaacaagcactttgagaaatgttaatgtttttcctaaatgctaatatttgatataaaatggaaactgtgcattctcttttgtcacatgcattatataatgtatctcaaatagagtattatatgggaaaatgttctgtaaaattacttatgctttaaggagtttggaagctgacattttctaatgcctactaatagctgagacaaaaaaaagtacaactagaagattctttttgtttgtttaattatagccagaccattttttgtcatatgtggtaagaattgcagttttattttctcacagcaatatgaatgctggcccatcttggaataaagtgcaacattcaaagaattcttcaggaaaaaggcagagtaaatcccaagtaccccacgcttcttcccagccgagaagcagcctcacagctgtcacccagcctactgaagaaaaacttaaagaaagcatttccccggaagcaagacgcaaaaggaatccactcggttccaggtgtcagggggcctcagggaataaactgtttcttgattttcagtcaatgaaaattattaaagagaatgctgatgaggacagtgcaagtgatctctctgattcggaaagaattcccattcctccttctcccctcacacctccagatctcaatcttcgagctgaagaaattgatccagtttactttgatcttcaccctggtcagggccatacaaaacctgaatactattatcctaatttccttccatcccctttcagctcctgggacctacgagatatggccctgcttctgaacgcagagaacaaaacggaagccgtgccccgagtgggaggacttcttgggaagtatatcgatagacttattcagcttgagtggctgcaagtccagactgtacagtgtgaaaaagcaaaggggggcaaagcaaggccccccactgcccctgggacctcaggggcactgaaaagccctgggagaagtaagctaattgctagtgctctgtccaagccactacctcaccaggaaggggcttcaaagtcaggcccttcccgaaagaaagcttttcaccatgaagaaatccacccatcacattatgcatttgagacttcccctagacccattgatgtgcttggtggtaccaggttttgttctcagaggcaaacccttgaaatgaggacagaagaaaagaaaaagaaatcaagtaagagtacgaagctgcagcgctgggatctgtccggcagtggaagcagctctaaggtggaaaccagcggtcacattcgagttcccaaacaggcagctgtgattctggactcagcagattcctgtaaggcctccaaaacacaagcacatgcacatcctaggaaaaagggaaaggcagagagctgtggtcatgccactgtatcgagtgagaaaaaactgaaaacaaacggagtaaagcaaaacacatataaactaaaataaatatctaaaatgctgaattgccaagacctgcaggtacctcaatgttagagcgcttccaaaagtcaaaatactgtgaattttaaggaattttacaaatactgacatttaagtagttgactggcatttttgtccacctttatttctaccctgagtggggttattttcaaagggaagtgtctttcaataagcctttctttgtattgtcagtcttaggcaaatgagagccctttagataaaaattatgtaaaatatgtgccatataaaggaataaaatggcacctctccagggaaagtgtcagtgaaacctcagctacagtagccggtctgtgtagagcagctagtggtgttacctccccattttcacatgcacgtaagtatatgaaatagtgcagactgtttcaaatggtgtggaatcctaaatgtttaaaataaggtccttcttgcccactccctcgcttacttttttataaactcctcaagcaaaatttctgttcattttacccttaggagaagctttagttcttcctcaagtcagggagtagtgagtttgtattttgagtagtcatttctcactaagctggttgctttctagagagacagtggaatctagtactttaatacattttctctgacatggttttttttttcttttttgaggggcattttaaacttagaggtggtggtaaaacctacttttgagttctccgaactgaggttaaaataacttgcagaattttccaaagtcaatgggcttagcatgattactgctgtttggtggggctgagaatgaaatatttgacattctggaattgctggcatgtaaagcttctccagagaggcaccccagggaaatcactctttacaatttgtaaaggaagggcctgtaaaaggatcaaaacacatggacctacattcagtgtaatagttacaaagttactgatttgggttccacaccctgtggtccttagtcaaaaataatgatctgtttcagtttgcaagagcaggattttattattttgcttggggtgaggggcgggagagtggaatatgagtaaggttgctgaatgaattctaaactcgcttatctggtcttcaggcttcccaactctctccaagccttcttatttcactgcagttaaataacatcttcttgttcctatagttgtgctgtgagttttctgttcatatttgcgcagtgtattttaatacggcccatgtcattatagttgattttatccctttaaacaattactgtatttgtttttgacgtagaggtttcaattttttcaccttgggggcaaatgaaaaacttggcatttttcatttgggaacatataatagcttgtaaacttttcagacagcagtaaatgtctgaaaaaatatcaaaaacagcataaagacaagattatgtagctctaattatacgtatataattataaaaaacaatgtgcaagggttatattttaaggtcttttaaaatctgattttgatcataccaaatgacataatattttttatggtagccttttactttcaagacttaattttcagacttgtacaagttccttcttacattctttccctctcacaccatcctactggagaaagcatacttttatgctaagatcttactttaagctttttatgtgaacaaaagatgtacatatagtaagtattacttccgtagtcctcaaatttactataacttttgtacttagtatatgttttatatttggaaaacagcactacgcttagttttcctgtagttcctgagtgatgtctgtgtgttccttgcctgcccttttttgtgagcacagattagtctgttatccatggctggcacttcacttatgatcctttctctgctagatttttatgcagctctctatgaagtttcatggcccatagatattcaaaagcaagatattctatacatatgtgtatatgtatatatactccttatgttaatactaaagtgtttatgctgagttgctgcctttccccgtcatgtatccatgtgcatgctcttagagaccttgaatggttgagggtaaagtgatttattagtaattctacttgccttgtgtatgtctgagctgaaaacaatcgtgattaagaaatttagaggtggctgggcgtggtggctcacgcctgtaatcccagcactttgggaggccgaggcaggcggatcacctgaggtcgggagttcaagaccagcctgaccaacatggagaaaccctgtctccactaaaaatacaaaattagccgggtgtggtggtgcatgcctgtaatcccagctactcggaagtttgagacgagaatctcttgaacccgggaggcggaggttgtggtgagccaagatcgtgccattgcactccagcctgggcaacaagagggaaactccgtttcaaaaaaaaaagaaaaagaaagaaattgagaagtaacgcctcataatatttgttcccagctttttaaattgaagctggttgcataatctggggaatagtcataatttcatgtgttatacagtttaaaaagcctgcaaaagtgactttgcttgtttactttctgcctcagattgactattttaaccaatattgtcacgactagatcatagctcctagtgaataacatgaggtgttttaaagttaggtctattacagaattaacataagcacaattttaattttatgatatctgatatgcctatctaatacatcttaatgcattaaatgctgcagataagaatcttgctatttttcaagtagacaacattagaaagttgaatcatgaactcattcaattcatcaagtcaaaagcactgagtgttttgctagtctagtgacatgggttattgtatttccgagaagtgcctctcatttctggggagttgtttacatataccctgcatttaaaccaattaaaacaatccaagtttctttaaaaaaaaaaagaaaaagaaaaagaaaaagaaaaatattttaggcttagaattatctaatggaaaaaatgtaaaaaagtacaaaaatgaactaaaagtatatcagtatttgcagtatttgctgtgattacttaggtttagactttctcaacttcttagatgactaaatgggctgaagacttgtaactaacttgaataggatagacttcataccctgtgacaaaaaggatggggaagagaatatcattggtcttgccatatacctcctagctaaaaggaaaatggtttgtagttgttcttgggcctactgtgttgcttttcagaaggacataagactttctactttatctgatatggatatcgtctacttcctcattcctttatgctcacttatggagtagttacatagaaatataactcttggtggtactgtattttaaggtaattcagaagcagtatgtattatttatgtacatgtacaggacaccattcaaaatggcttgaaaatattcagcatgtttgttatttgctgttatattgtatgtttagttttgtatgtgataaacagaattgatgtaagtttttgtggacttgaatttctccttccttgagatcaattaaacagcagaaaaatattgtctgga

SEQ ID NO: 3504 - DNA, 363 bp, Homo sapiens
ggcgttacttacaaggctgcaacttgaccgggtgcaacttcctagcgagcctccgccccgcccctcgtgacgccgcctgcaggcgggcccccgccggcctcagctcagccagggagctcagcggagctgcgcgcctccgcctccagctcccctgccgcagcgcgccgcagccgggcgtccccgcgcgggcgccggagaggaaggaaggctggcagcctcgtcacgtgtccgctgcagtcgcgaaacaggtctgatcaatttctgtttacgtctgcctggattgcgcgcctatcgatcatagactttgtctgcacaaacggaggacaaggaaaatgcatgctgcgtgtccttagatttctgggt

SEQ ID NO: 3505 - DNA, 6417 bp, Homo sapiens
cattttgagttaatttttgtacattgtgtaaaagtataggtccaacttcattcttttgcttgtggatatctagtttccccaacaccatttgttaaagagattgtccttttccccattgagtggtcctggaacccttgctgaaaattaattacccatagatgtgagtgttagttctggcctctcgattctattccattggtctatattgtctatctctgtgccaagtccatgctatttcaattactatagctatgtagtaaattttaatatcagaaaatgtgatcctacaactttgttcctcttcagattattttggctattttgggttccttgaaattttatatgaattttagaataggtttttccatttctgccaaaagcgctgttgggattttaatagcatgattacattgactctacatatcattttgagtagcgttgtcattttaacaatattaagtcttccaacttatgaacacaggatctctttccatttatttaagtctactttaatttctttccagaatgctttgtagttttcagtgtacaagtcttctgccttcttggttaaattgatttctaaatattttattcttttgggtactactgtaaataaaaaattcttaatttccttttcagatcttttactgctagtgtgtagaaacacgactgatttttgtgtgttgattttgtattctgaagctttgctaaatttgtttattagctttaagaggctatttttggtattctttagggctttctacacttatatcacttgcaaatagagatagttttacttcttcctttctaatttggatttattttatttctttttcttgccttatgggtctggctagaactgccaatactatgttgaatagaagtggcaaacacaggcatccatggcttctgattttagtggaaaagcttgaaatttttccccattgagaatgatgtcagtcgtgagtttttaatacatggtctttatcatgttgagacagttcctttctattcctggtttgttgaacagttctatcataaaggaggaatggattttctcaaatgttcttctatatcaattgagatgatcatgagtttttcactccttcattctattacttggtgtattacatcgactgattttcatatgttaaaccattcttatatttctgggacaaatctcagttggtcatagtgtaaaattcttttaagggctgctgaatttaatttcctagtattttgttggggatttttgtatctataatgcattcataggggacatttggctatagttttcttgtattgtctgtctagctttggtatcagggtaatgttggcttcatagaatgactcagaaagggttctgtttctcaactttttggaggagttcgagaaggattagtgttaattcgtttctaaacgtttggtagaattcaccagcgaagtcatcagttcctgggcgtttctttgttaggagagttttggttgctgattcaaccaaaattgaatatcattactttttatagatctattcagatttattctttcttcttgagtcaactttgttggtttgtgtgtttctaggaatttgtctatttcatctaggttatccaattttttgacatatagctcttatacgaattctcttacaaccctttttattcctataaatcagtagtagtgtttttcatttctgattttagtagttgagtattctttttccttaatctagttaaagctttgtcaactttgttgatctcttcaaagaactaatttgttgtttcattgattctattgtttttctattctctatttcatttatttttgctctaatccttattatttccttcctctttatggcttcaaactcaattgaacataaagtattaagaaatttgatttttttctcaaatgtctaagatgtaagaataaatatatctagagtcatcaaaaagcagcctgtttgtcagatttactgtttaatccatgtaaacagctttcatataattcatgatagaatatcactatgtgctttggaagacactgaggaaagacaaaaggtcattgggcagaaccaccctagattgaatgttaaggccatcttctagtttgcaggacttgtggtagacagacagaataatatcctggacctcttgggtgtatacaggacaaactgaaataaactctcatttttagatcataatgtcatcatgaaacatatcaatttggtctatttctgaagaaaacaagcacaatgataaagtttgaatgtttgtctcctccaaatctcatgttgacatttgatccccaatgttggaggtggggcccactgggaggtgttttggttgtgggggcagatccttcatgaatggcttggtgctgtcttcacgggattaagttctcactcctacttcccatgagatcttattgttaaaaagaatctgataccttcctcccctctcttgctctcttcctccctgatcatgtgacacacgggttcccctttgccttccaccatgatggaggcttcctgaggccctcaacagaagcagatgctggcgccatgcttcttgtacagcctgcagaattgtgtgagccaaataaacctcttttccttatatattacccagcctcaggtatttgtttatagcaataaaaacagactgagacacatgatgaagaccctttgatatcctataaatattgatatctctccctgagagaagagcatgaatctaagtgatgccattactgtaatgtgaattccacaactctcctcaaagatgtggcccatatgttcctaataatggctttctaagaatctgttctgaaggggtaccttctctctgattttcatttgcatttcctgcttagcttacacacttcaccttgcctacccacctgtcctgaccccaataacctccatcatcagacatctcatcttacctacctactttctacttttcccagtccttcccgtgcttcataaaccatgatcatgagctagagacacaaggtcatagctaaggagttgggatcagaaaatcgccttctgtgattttccattattctcaatacataacttcaacaaaatcaagaaaagcatgaaaggacatcctaaggggtcaggtgaggttgcagtggggttaatcggtcaatagtttctttatgccaattaggatttctgcagaaaacaatgaaacactggtttaaacagtaaaaatattttaattccttacagaagcccatggaacatacactccaggtttaattcatcagctgaatagcatcatcaatgacttaggttctttccactttctgcttgtcatctaactgtgttggctttattttcaagctagctcctccctggttgcaagataattgcagcaggtttagttatcatattcggacatgctaacacccagggtagtgatcccttccttgcatttctttctcattttaagaacaaagtgtttaaaaaattatacttaaaattattggcatctctgtcaattgaaagatgtcaatctctttcatttttcctaatcactaataacatctactaaaaacaaaatgtctgtgtaaataatttatttgaataaaattaaagttgttgagtgagctcggcttttgaggagtgggaaaggaggggtgcatagattagtggaagatgagaagctagtggggctcaagtccagcaggagcagaagtttggagccaggacttcctagcctctcagggttttttttttaacttccttacctgaaatgatttgtgctatacaacttgtcctggctaaactttcttaatctcaactgtttcatttaatcaataacaactactgtgccaccttcataatatcaattttcagcatttcatttactgaatatcatttcctttccttccagactattttactgtgtcaaattcaatattcctttgactcaataggatctccaatccagtgaccccattacttgtttgcttattaggacaagaaaaacaaactttcccagaaactccccagtagactgctcctcatatctcattggctagaactgagttgcgtgcccattcctaaaacaaaactggcaagaaagatagttaccaagattggttcagaccaaatcaggattttttcctgaggagaggataaagtgagcttcccgggaggcaaatatttacacattccaaagattccaaagaaaaaaagagaataaatactgggtcgttaactaatagtaagtggtacggtattacaggtaaaatttatccttttagccctagcaacaagtgacaccttctgaagccattattcatttgtcaggaatagggcaagtattaggaaaagaaacacaaaaataaactctgtttccatttattgcattctagcactggttctaccaaatatttgttggatgactttaggtaaagcatctagcctctctgtcttgattgccacatccacaatatgagataaatattattctgcatacttcctgggagagctgggaagataaagtcagatcattataccacataaagcaaagcaataacacttccatattttagcttcccacactgcctatctgtcctattttcatttattcatttatacttttcaacaaacagttgctagtagtttgcttaatgtaagatatgggatgaatattttcatgatggcccctgcatctaagttatcatttagcagtacctgccttatctcttgtaccgaatcagattagacagcataggaagaatgaaaaggtgaggtgggataataaggaatgttgtttgtggaaacataatggttgcttcaatttgagtgtaaactgtcctttttactgaagcaattgcaaccaagtgtgtgagttcacaggtgcctaccttgcttttttggcttaggtattgtttgggttttaatactgactgatatataatacagacaaatcaactcaatcaaagaaaccaactcaatcaaagaaagatgggtctacatacaacaaaactgaacaaaatctgcaagaagagtgattcatacatgggctattgaggcaacatgaaatggacattaattgactaagtaaaaaacagatttcttgaagaattaataaagaacttttgttttggaagttctctattgtttaaaattagccagatgtggtggcctgcacctacagtcccagctactcaggaggctgaggtggaaggatcacttgagcccaagaggcggaggttgcagtgagctgagactgtgccgctgcactacagacagcctcctgcgtgacagagccagaccctgtctcaaaacgtgggggggaagaaagttctctattgtttgaaataataaggaaacattaaaggctctaaagtcagctaaccaatagtcctaaaaatagaatggctcaaaaagattgtccaattttggaaaactaacatttcaaaaagttgtttcactttttatgaatcctaagatttccatatcctagaaaactaacatctcagaaaaaaaaaaaagatggtaaaacacaattgccatcatctatgcctgttctgtaaaaatacagagaagaagagagtgtttggtttttttaaccaggatttggaaagccattatttatctctgtgatagaataacaatatgttttggatggagggtaattctaggggaaattatatttctgaacaacagtgttggtttgtgcaggaaaatcaccaaagaacatgactagaaagtgtatagctacagtttccctcttttaaatgggaatagcaaaacatataaagaatattgataggccgggtgcagtggctcacgcctgtaatcccagcactttgggaggccgaggcgggcagatcaagaggtcaggagatcgagaccatcatggctaacacggtgaaaccccgtctctactaaaaaatacaaaaaattacccaggcgtggtggtgggcgcctgtagtcccagctactcgggaggctgaggcaggcaaatggtgtgaatccgggaggcggagcttgcagtgagccgagatcgcgccactgcactccagcctgggtgacagagcgagagactctgtctcaaaaaaaaaaaaaaaaaaaaaaaagagtattgatagtttaaacctactacaattttgcatctagtttctcaagtagttctgtggatttagaaccaacatttgctgaggggaaagaattaccaacatcaaagtcctaggatgtgtcagggcaccagaagagaagttttgtcactgtaaaataactctcttggcagagcatgatagagactgtaaacagcaggttacttcaatggttatgtgcgattcagtgaagatctctacattaattgaagcacaactcaagcaattcaatgtagctctgatatgctggagaacaatctagcagttagctatcag

SEQ ID NO: 3506 - DNA, 4395 bp, Homo sapiens
  SITE (3294): n equals a,t,g, or c
agggtaatgttggcttcatagaatgactcagaaagggttctgtttctcaactttttggaggagttcgagaaggattagtgttaattcatttctaaacgtttggtagaattcaccagcgaagtcatcagttcctgggcttttctttgttaggagagttttggttgctgattcaatcagaattgaatatcattactttttatagatctattcagatttattctttgttcttgagtcaactttgttggtttgtatgtttctaggaatttgtctgtttcatctaggttatccaattttttgacatatagctcttatacgaattctcttacaatcctttttattcctataaatcagtagtagtgtctttcatttctgattttagtagttgagtattctttttccttaatctagttaaagctttgtcaactttgttgatctcttcaaagaactaattttttgtttcattgattctattgtttttctattctctatttcatttatttttgctctaatccttattatttccttcctctttatggcttcaaactcaattgaacataaagtattaagaaatttgactttttttctcaaatgtctaaaatgtaagaagaaatatgtctagagtcatcaaaaagcagcctgtttgtcagatttactgtttaatccatgtaaacagctttcatataattcatgatagaatattactatgtgctttggaagacactgaggaaagacaaaaggtcattgggcagaaccaccctagattgactgttaaggccatcttctagtttgcaggacttgtggtagacagacagaataatatcctggacctcttgggtgtatacaggacaaactgaaataaactctcatttttagatcataatgtcatcatgaaacatatcaattcggtctatttctgaagaaaacaagcacaatgataaagtttgaatgtttgtctcctccaaatctcatgctgacatttgatccccaatgttggaggtggggcgcactgggaggtgttttggttacgggggcagatccctcatgaatggcttggtgctgtcttcatgggattatgttctcactcctacttcctgtgagatcttattgttaaaaagaatctgataccttcctcccctctcttgctctcttcctccctgatcatgtgacacacgggttcccctttgccttccaccacgatggaggcttcctgaggccctcaacagaagcagatgctggtgccatgcttctcgtacagcctgcagaattgtgtgagccaaataaacctcttttccttatatattacccagcctcaggtatttgtttatagcaataaaaacagactgagacacatgatgaagaccctttgatatcctataaatattgatttctctccctgagagaagagcatgaatctaagtgatgccattactgtaatgtgaattccacaacttttctcaaagatgtggcccatatgtttctaataatggctttctaagaatctgttctgaaggggtaccttctctctgattttcatttgcatttcctgcttagcttacacacttcaacttgcctatccacctgtcctgaccccaataacctccatcatcagacatctcatcttacctacctactttctacttttcccagtccttcccgtgcttcataaaccatgatcatgagctagagacacaaggtcatagctaaggagttgggatcagaaaatcaccttctgtgattttccattattctcaatacgtaacttcaacaaaatcaagaaaatcatgaaaggacatcctaaggggtcaggtgaggttgcagtggggttagtcggtcaatagtttctttatgccaattaggatttctgcagaaaacaatgaaacactggtttaaacagtaaaaatattttaattccttacagaagcccatggaacatacactccaggtttaattcatcagctcaatagcatcatcaacgacttaggttctttccactttctgcttgtcatctgtgttggctttattttcaagctagctcctccctggttgcaagataattgcagcaggtttagttatcatattcggacatgctaacgcccaggctagtgatcccttccttacatttctttctcattttaagaacaaagtgtttaaaaaattatacttaaaattattggcatctctgtcaattgaaagatgtcaatctctttcatttttcctaatcactaataacatctactaaaaacaaaatgtctgtgtaaataatttatttgaataaaattaaagttgttgagtgagctcggcttttgaggagtgggaaaggaggggtgcatagattagtggaagatgagaagctagtggggctcaagtccagcaggagcaggagtttggagccaggacttcctagcctctcagggtttttttttaacttccttacctgaaatgatttgtgctatataacttgtcctggctaaactttcttaatctcaactgtttcatttaatcaataacaactactgcgccaccttcataatatcaattttcagcatttcatttactgaatatcatttcctttccttccagactattctactgtgtcaaattcaatattcctttgactcaataggatctccaatccagtgaccccattatttgtttgtttattaggacaagaaaaacaaactttcccagaaactccccagtagactgctcctcatatctcgttggctagaactgagttgcgtgcccattcctaaaacaaaactggcaagaaagatagttaccaagattggttcagaccaaatcaggattttttcctgaggagaggataaagtgagcttcccgggaggcaaatatttacacattccaaagattccaaagaaaaaaagagaataaatactgggtcgttaactaatagtaagtggtacggtattacaggtaaaatttatccttttagccctagcaacaagtgacaccttctgaagccattattcatttgtcaggaatagggcaagtatcaggaaaagaaacaccgaaataaactctgtttccatttattgcattctagcactggttctaccaaatatttgttggatgactttaggtaaagcatctagcctctctgtcttgattgccacacccacaatatgagataaatattattctgcatacttcctgggagagctgggaagataaaatcagatcattataccacataaagcaaagcaataacacttccatattttagcttcccacactgcctatctgtcctattttcatttattcatttatactttntaacaaacagttgctagtagtttgcttaatgtaagatatgggatgaatattttcatgatggcccctgcatctaagttatcatttagcagtacctgccttatctcttgtacagaatcagattagacagcataggaagaatgaaaaggtgaggtgggataataaggaatgttgtttgtggaaacataatggttgcttcaatttgagtgtaaactgtcctttttactgaagcaattgcaaccaagtgtgtgagttcacaggtgcctacattgcttttttggcttaggtattgtttgggttttaatacagacaaatcaactcaatcaaagaaaccaactcaaagaaagatgggtctacatacaacaaaactgaacaaaatctgcaagaagagtgattcatacatgggctattgaggcaacatgagatggacattaatcgactaagtaaaaaacagatttcttgaagaattaataaagaacttttgttttggaagttctctattgtttaaaattagccagatgtggtggcctgcacctacagtcccagctactcaggaggctgaggtggaaggatcacttgagcccaagaggcggaggttgcagtgagctgagactgtgccgctgcactacagacagcctcctgcatgacagagccagaccctgtctcaaaatttgggggggagtaaagttctctattgtttgaaataataacgaaacattaaaggctctaaagtcagctaacgaatagtcctaaaaatagaatggctcaaaaagattgtccaattttggaaaactaacatttcaaaaagttgtttcattttttatgaatcctaagatttccatatcctagaaaactaacatctcagaaaaaaaaaaagatggtaaaacacaattgccatcatctatgcctgttctggaaaaatacagagaagaagagagtgtttggtttttttaaccaggatttggaaagccattatttatctctgtgatagaataacaatatgttttggatggagggtaattctaggggaaattatatttctgaagaacaatgttggtttgtgcaggaaaatcaccaaagaacatgactagaaagtgtatagct

SEQ ID NO: 3507 - DNA, 5744 bp, Homo sapiens
cattttgagttaatgtttgtacattgtgtaaaagtataggtccaacttcattcttttgcttgtggatatctagtttccccaacaccatttgttgaagagattgtccttttccccattgagtgatcctggaacccttgctgaaaattaattacccatagatgtgagtgttagttctggcctctcgattctattccattggtctatattgtctatctctgtgccaagtccatgctatttcaattattatagctatgtagtacattttaatatcagaaaatgtgagtcctacaactttgttcctcttcagattattttggctattttgggttccttgaaattttatatgaattttagaataggtttttccgtttctgccaaaagcgctgttgggatcttattagcgtgattacattgactctacatatcattttgagtagcgttgtcgttttaacaatattaagtcttccaacttatgaacacaggatctctttccatttatttaagtctgctttaatttctttccagaatgctttgtagttttcagtgtacaagtcttctgccttcctggttaaattgatttctaaatattttattcttttgggtactactgtaaataaaaaattcttaatttccttttcagattttttactgctagtgtgtagaaacacgactgatttttgtgtgttgattttgtattctgaagccttgctaaatttgtttattagctttaagaggctatttttggtattctttagggctttctacacttatatcacttgcaaatagagatagttttacttcttcctttctaatttggatttattttatttctttttcttgcctgatgggtctggctagaactgccaatactgtgttgaatagaagtggcaaacacaggcatccatggcttctgattttagtggaaaagcttgaaatttttccccattgagaatgatgttagtcgtgagttcttaatacatggtctttatcatgttgagacagttcctttctattcctggtttgttggacagttctatcataaaggaggaatggattttctcaaatgttcttctatatcaattgagatgatcatgagtttttcactccttccttctattacttggtgtattacatcgactgattttcatacgttaaaccactcttaaatttctgggataaatctcagttggtcatagtgtaaaattcttttaagggctgctgaatttaatttcctagtattttgttggggatttttgtatctataatgcattcataggggacatttggctatagttttcttgtattgtctgtctagctttggtatcagggtaatgttggcttcatagaatgactcagaaagggttctgtttctcaactttttggaggagttcgagaaggattagtgttaattcgtttctaaacgtttggtagaattcaccagcgaagtcatcagttcctgggcttttctttgttaggagagttttggttgctgattcaatcaaaattgaatatcattactttttatagatctattcagatttattctttgttcttgagtcaactttgttggtttgtatgtttctaggaatttgtctgtttcatctaggttatccaattttttgacatatagctcttatactaattctcttacaatcctttttattcctataaatcagtagtagtgtctttcatttctgattttagtagttgagtattctttttccttaatctagttaaagctttgtcaactttgttgatctcttcaaagaactaattttttgtttcattgattctattgtttttctattctctatttcatttatttttgctctaatccttattatttccttcctctttatggcttcaaactcaattgaacataaagtattaagaaatttgacttttttctcaaatgtctaaaatgtaacaagaaatatgtctagagtcatcaaaaagcagcctgtttgtcagatttactgtttaatccatgtaaacagctttcatataattcatgatagaatattactatgtgctttggaagacactgaaggaaagacaaaaggtcattgggcagaaccaccctagattgactgttaaggccatcttctagtttgcaggacttgtggtagacagacagaataatatcctggacctcttgggtgtatacaggacaaactgaaataaactctcatttttagatcataatgtcatcatgaaacatatcaattcggtctatttctgaagaaaacaagcacaatgataaagtttgaatgtttgtctcctccaaatctcatgctgacatttgatccccaatgttggaggtggggcgcactgggaggtgttttcgttacgggggcagatccctcatgaatggcttggtgctgtcttcatgggattaagttctcactcctacttcctgtgagatcttattgttaaaaagaatctgataccttcctcccctctcttgctctcttcctccctgatcatgtgacacacgggttcccctttgccttccaccacgatggaggcttcctgaggccctcaacagaagcagatgctggcgccatgcttctcgtacagcctgcagaattgtgtgagccaaataaacctcttttccttatatattacccagcctcaggtatttgtttatagcaataaaaacagactgagacacatgatgaagaccctttgatatcctataaatattgatttctctccctgagagaagagcatgaatctaagtgatgccattactctaatgtgaattccacaactcttctcaaagatgtggcccatatgttcctaataatggctttctaagaatctgttctgaaggggtaccttctctctgattttcatttgcatttcctgcttagcttacacacttcaccttgcctatccacctgtcctgaccccaataacctccatcatcagacatctcatcttacctacctactttctacttttcccagtccttcccgtgcttcataaaccatgatcatgagctagagacacaaggtcatagctaaggagttgggatcagaaaatcaccttctgtgattttccattattgtcaatacataacttcaacaaaatcaagaaaatcatgaaaggacatcctaaggggtcaggtgaggttgcagtggggttagtcggtcaatagtttctttatgccaattaggatttctgcagaaaacaatgaaatactggtttaaacagtaaaaatattttaattccttacagaagcccatggaacatacactccaggtttaattcatcagctcaatagcatcatcaatgacttaggttctttccactttctgcttgtcatctgtgttggctttattttcaagctagctcctccctggttgcaagataattgcagcaggtttagttatcatattcggacatgctaacgcccagggtagtgatcccttccttgcatttctttctcattttaagaacaaagtgtttaaaaaattatacttaaaattattggcatctctgtcaattgaaagatgtcaatctctttcatttttcctaatcactaataacatctactaaaaacaaaatgtctgtgtaaataatttatttgaataaaattaaagttgttgagtgagctcggcttttgaggagtgggaaaggaggggtgcatagattagtggaagatgagaagctagtggggctcaagtccagcaggagcaggagtttggagccaggacttcctagcctctcagggtttttttttaacttccttacctgaaatgatttgtgctatataacttgtcctggctaaactttcttaatctcaactgtttcatttaatcaataacaactactgcgccaccttcataatatcaattttcagcatttcatttactgaatatcatttcctttccttccagactattctactgtgtcaaattcaatattcctttgactcaataggatctccaatccagtgaccccattatttgtttgtttattagaacaagaaaaacaaactttcccagaaactccccagtagactgctcctcatgtctcattggctagaactgagttgcgtgcccattcctaaaacaaaactggcaagaaagatagttaccaagattggttcagaccaaatcaggattttttcctgaggagaggataaagtgagcttcctgggaggcaaatatttacacattccaaagattccaaagaaaaaaagagaataaatactgggtcgttaactaatagtaagtgctacggtattacaggtaaaatttatccttttagccctagcaacaagtgacaccttctgaagccattattcatttgtcaggaatagggcaagtatcaggaaaagaaacaccgaaataaactctgtttccatttattgcattctagcactggttctaccaaatatttgttggatgactttaggtaaagcatctagcctctctgtcttgattgccacacccacaatatgagataaatattattctgcatacttcctgggagagctgggaagataaaatcagatcattataccacataaagcaaagcaataacacttccatattttagcttcccacactgcctatctgtcctattttcatttattcatttatactttttaacaaacagttgctagtagtttgcttaatgtaagatatgggatgaatattttcatgatggcccctgcatctaagttatcatttagcagtacctgccttatctcttgtacagaatcagattagacagcataggaagaatgaaaaggtgaggtgggataataaggaatgttgtttgtggaaacataatggttgcttcaatttgagtgtaaactgtcctttttactgaagcaattgcaaccaagtgtgttagtttacaggtgcctacattgcttttttggcttaggtattgtttgggttttaatactgactggtatataatacagacaaatcaactcaatcaaagaaaccaactcaatcaaagaaagatgggtctacatacaacaaaactgaacaaaatctgcaagaagagtgattcatacatgggctattgaggcaacatgaaatggacattaatcgactaagtaaaaaacagatttcttgaagaattaataaagaacttttgttttggaagttcgctattgtttaaaattagccagatgtggtggcctgcacctacagtcccagctactcaggaggctgaggtggaaggatcacttgagcccaagaggcggaggttgcagtgagctgagactgtgtcgctgcactacagacagtctcctgcatgacagagccagaccctgtctcaaaacgtgggggggaggaaagttctctattgtttgaaataataacgaaacattaaaggctctaaagtcagctaaccaatagtcctaaaaatagaatggctcaaaaagattgtccaattttggaaaactaacatttcaaaaagttgtttcattttttatgaatcctaagatttccatatcctagaaaactaacatctcagaaaaaaaaaaaaaagatggtaaaacacaattgccatcatctatgcctgttccggaaaaatacagagaagaagagagtgtttggtttttttaaccaggatttggaaagccattatttatctctgtgatagaataacaatatgttttggatggagggtaattctaggggaaattatatttctgaacaacaatgttggtttgtgcaggaaaatcaccaaagaacatgactagaaagtgtatagct

SEQ ID NO: 3508 - DNA, 1087 bp, Homo sapiens
ttttgggtattgtattaggccattcttgcattggtataaagaaatacctgacactgggtaagttccaaagaaaaaagggtttagttgcctcacatttctgcaggctgtacaggaagcatagcagcatctgcttccggggaggcttcaggaagcttccaatcatgatggaaggcaaagtgggtgcatgcatgtcacatggcaaaagccagagcaagagaggaagtggggaggtgctgcacacttttaaacaatcaaatcttgtgagaactcacaatcttgatgacagctagagatggtgaagccattcatgagaaaccactcccatgatccaatcacctcccaccaggccccaactctaacactggagattaattatatttcaacatgagatttgcataggaacaaacagtcaaactatatcaggtatatacttaagagtagaattactgggtgataattctgttttacgttttgaggaattgccaaactatcttcctcagcagttaaaccatttacattcccaccagcagtatactaggtttccaatttctccacatgttcaacaacactagttattttttcttctaattatagccattctagtaggtacaaagtggtatctcattgtggttttagcatcttttgagttgcttattgaccatttacatgtcttttttttagagaagtgtctaagtcttttgtccattaaaaaaattgagttatttatcttttatttgttgagttgtaggattctttatgcgttcaattcttttgggtattgtattaggccattcttgcattgccataaagaaatgcctgagtatattagttttttgtcagatatatgatttgcaaacattttctccaattttttgtgttatcttttcactctctttatagtgtcacttgatacacaattttgatgaagtccaatttatcagttgtttcatcacttgtacttttgatgttatatttaagaaaccgttgtcaaacccaaggtcatgaagatttttcagtatgttttcctctaagagttttatagcatttaatatttaagtgttttatagcattaaattttggtctttga

SEQ ID NO: 3509 - DNA, 307 bp, Homo sapiens
ccgggtgcggtggctcacgcctgtaatcccagcactttgggaggcccaggcgggcggatcaagaggtcaggagatcgagaccatcatggctaacacggtgaaaccccgtctctactaaaaaatacaaaaaattatccgggcgtggtggtgggcgcctgtagtcccagctactcgggaggctgagacaggaaaatggcgtgaatccgggaggtggagcttgcagtgagccgagatcgcgccactgcactccagcctgggtgacagagcgagagactctgcctaaaaaaaaaaaaaaaaaaaaaaaaag

SEQ ID NO: 3510 - DNA, 380 bp, Homo sapiens
ggcttctgattttagtggaaaagcttgaaatttttccccattgagaatgatgtcagtcgtgagtttttaatacatggtctttatcatgttgagacagttcctttctattcctggtttgttgaacagttctatcataaaggaggaatggattttctcaaatgttcttctatatcaattgagatgatcatgagtttttcactccttcattctattacttggtgtattacatcgactgattttcatacgttaaaccactcttaaatttctgggataaatctcagttggtcatagtgtaaaattcttttaagggctgctgaatttaatttcctagtattttgttggggatttttgtatctataatgcattcataggggacattt

SEQ ID NO: 3511 - DNA, 1077 bp, Homo sapiens
ttgtattaggccattcttgcattgatataaagaaatacctgagactgggtaagtgccaaagaaaaaagggtttagttggctcacatttctgcagtctgtacaggaagcatagcagcatctgcttccagggaggcttcaggaagcttccaatcatgatggaaggcaaagtgggtgcaggcatgtcacatggcaaaagccagagcaagagaggaagtggggaggtgctgcacacttttaaacaatcaaatcttgtgagaactcacaatcttgatgacagctagagatggtgaagccactcatgagaaaccactcccatgatccaatcacctcccaccaggccccaactctaacaccggagattaattacatttcaacatgagatttgcataggaacaaacagtcaaactatatccggtatatacttaagagtagaattactgggtgataattctgttttacgttttgaggaattgccaaactatcttcctcagcagttaaaccatttacattcccaccagaggtatactaggtttccaatttctccacatgttcaacaacactagttattttttcttctaattatagccattctagtaggtacaaagtggtatctcattgtggttttagcatcttttgagttgcttattgaccatttacatgtcttttttttagagaagtgtctaagtcttttgtccattaaaaatttgagttatttatcttttatttgttgagttgtaggattctttatgcattcaattcttttgggtattgtattaggccattcttgcattgccataaagaaatgcctgagtatattagttttttgtcagatgtatgatttgcaaacattttctccaattttttgtgttatcttttcactctctttatagtgtcacttgatacacaattttgatgaagtccaatttatcagttgtttcatcacttgtacttttgatgttatatttaagaaaccattgtcaaacccaaggtcatgaagatttttcagtatgttttcctctaagagttttatagcatttaatatttaagtgttttatagcattaaattttggtctttga

SEQ ID NO: 3512 - DNA, 327 bp, Homo sapiens
aagaatattgataggccgggtgcggtggctcacgcctgtaatcccagcactttgggaggccgaggcgggcagatcaagaggtcaggagatcgagaccatcatggctaacacggtgaaaccccgtctctactaaaaaatacaaaaaattagccgggcgtggtggtgggcgcctgtagtcccagctactcgggaggctgaggcaggagaatggcgtgaatccgggaggtggagcttgcagtgagccgagatcgcgccactgcactccagcctgggtgacagagcgagagactctgcctcaaaaaaaaaaaaaaaaaaaaaaaagagtat

SEQ ID NO: 3513 - DNA, 4715 bp, Homo sapiens
gccaccggctctaccttccagtttccagttccggcctccaaggggcgggcagaagttggaaacatgcggctgtcggtcgctgcagcgatctcccatggccgcgtatttcgccgtatgggcctcggtcccgagtcccgcatccatctgttgcggaacttgctcacagggctggtgcggcacgaacgcatcgaggcaccatgggcgcgtgtggacgaaatgaggggctacgcggagaaggtgaggagcgcggccctcttgtccactctgcgggtctggtctgagggggcggagccggctgcaagtggaaagggaccgggaccaacctggtaaaccattccccaagtctgagtcccccagaaccttgggctgaacccgcccctccatcgcctctaatggaagactggttagggctgcggagttaggggtggcgtagattggagatgcttggctagtggaaagaatggattcttccggcattagagaaattagattggcaccttgttttcttgctcggttggatccgtgatgttatgtcctcacagctcatcgactatgggaagctgggagacactaacgaacgagccatgcgcatggctgacttctggctcacagtgagtgcgacctatctgccttcaaaatcccaccctttgctccctgggggtgggggttggaaaaaggagaactatgcagaattaaacttgggtactcacttatgggccagtgctgctaactaaattagaaactgtgtcttaagttagttgaagtcgatgtgaatatacctctgcacaactgcctataaacgacccctttgtgtaacactgactatgccagattggcgaggggagggggaggtctttctatgtgtggatggaccttacctttgggaatggtgtaaagttaaatgcctctgcagttttgcctgactctgctgtctcttggataattctccctctaggagaaggatttgatcccaaagctgtttcaagtactggcccctcggtacaaagatcaaactgggggctacacaagaatgctgcagatcccaaatcggagtttggatcgggccaagatggcagtgatcgagtataaagggaattgcctcccacccctgcctctgcctcgcagagacagccaccttacactcctaaaccagctgctgcagggtttgcggcaggacctcaggcaaagccaggaagcaagcaaccacagctcccacacagctcaaacaccagggatttaactggatctgaagagtctgcagcccttaatcagtacccatgatcacaggcctttggagcacttttactctctgagaagaactggagctagagatgtaaaatggacagtcttgatggggttgagaaccttctggggagccagatgaccctctctttgcacaatagataaaagtctttatatgaatatatataaatttatttattttttccttcctgtgggatttctggagaatgagaattatccaaatgctcagtctacctgagatagtaaattcatggcttatgcttctggtccttaaatttgggttatttttggttagtgcaattttgtttttcttaatgccagtttacatgggaatgcatcctataattccaaatgttgccagaggtggttgtgttttgacatctggtctcctagagatgagtgcttgggatttcttagagaaagattacttcctgacaggggtaggggagtgacaatctgcaagtgaaacttccttaaacaatctagtaccctgcgaaccttcaggggatactgcaatcagtcctctgttttgaggcaggatcacacattaccttaatgtgttcccttcaaccccctgaatgggcctgggaggagaggacccaagaactcagatgttccaccagtttggccaaaggggtggagacattcagcagaggatgttgggctccaggataagctccttcctcttggtgaggggaaggggtaagaaagagggtctatgcgagagaaggattaggaaattaaacctcctaggaatttcctggaagtttttattgttgtcaaatctggcctctctgggaacccagaaaagggaaatccggcttcagaatgtgagaagctgggagcccctttcttggcacagccaggctgccgttcccttgggttcagaggctttagtagggtagtagttatggaaggacttagaaaggagccatcagtcttggtccaaacacttgatagcagtgcctgataattgccatatccccagtaaagtgggtagaagagattttatcttaggctctatcttctgagtgtatttggcccactgaacccatccactgtctgagataataagtaagagtaagggtaaagggatcactggtgtagcagacatggcttcagtgacagaacgaactattctggtgctaatttagctgtagctgccttagtctgatactcatctactcccaacagagctctttatctctttttctctactatggtttgttcttcacactatagccagaaagctcttatattttaaatgaaatatagtagacactcaaaacatttatgaaataaagctacaactctgcttctgctaaaaaatatacccctcttctgtcttagcatgaatatccaccctagctaggtatctaggagtcatacctaacttctagagaaaccactttccttaaaaccacatctttattttaaatagatggattgtggctgggctcctgtagcttttcctcttagaccccagaaatatatctccctttgggacttccaacagttccctacatgctttttgagcatctgctagttcccagcatcaatttaggcagaagggatacaatatccactgttcatctaatagagactagagataagaaacaacctgtaccatcaatgagctcacaataacaggccactgccactaccacagtggcctcaagggacactgcttcccctttaatgttttggtccaaataaaagtacatgaatcctaaaacatttgctaaaggctcagggataacacaaggaaagtaacagcatcaagaattttactgccgggtgcggtggctcacgcctgtaatccccacactttgggaggccaaggcaggcagatcataaggtcaggagatcaagaccatcctggctaacacggtgaaaccccgtctccactaaaaatacaaaaagttagctgggcgtggttgcgggcacctatagtcccagctactcaggaggctgaggcaggagaatggcgtgaacctgggaggcggagcttgcagtgagctgagattgtgccactgcactccagcctgggcaacagagcgagactctgtctcaaaaaaaaagaattttactaatctggcttataaataacttcttcaactagtggactgctccccccaagtccatctaggcacctctttaatgcgttccaaacccaagagcaccactctcaaaggttcccaccgtcttgggcgccagttctttacagtaaggtagacaaagtaatgatcactcctttctcaaaaggtaacaagtttaggctttacagttaatacactgtaagcctgatatcttggggagatgactagaaaagtcagagattatttccttaccctcattgacactgaaattaacaagtcatgtttatttccgtaatgtttctcaaatctgcagtcaacttgctccctagtaagaaatccaagatacctctatcctgggttacttcaacaacctcctaacttacctccctctacactttggctgtactgacgggaatctgatcatcttaattccctggtgatgatctccagttgcttatttcctatgggatccttatcatgactcccctccttgttcaggcatctactcatcactccaactacttcctttgcctctaaatgctatgctctagaagcataaaagttcctattttggatgtttccctgtgcacagctcccctgtccacaaccttttgttaaagcagtccctgccgtgcagacagccttctctcttttacctatgtaacttacacacaaacttttggtatcacctaggtggctccccgcccatccccacagctaaattcatgacttcgtcagctgaggtgctctatgtttcgataatacactgaatttgccacattgcattacagtttcctacagtagattagttcctgaatgggttgtagtggacaggcctaaactaagttaaggcagtgagaatctaagctctattctgcctagatgaataaattggcatgttattctaagtgccactggggaactggctttaggcagaagataacactgagagtggcagattagaacaactaaaactctcagtaaactatcgcaagaacaaaaaaccaaacaccgcatattctcactcataggtgggaattgaacaatgagatcacatggacacaggaaggggaatatcacactctggggactgttgtggggtggggggagaggggagggatagcattgggagatatacctaatgctagatgacgagttagtgggtgcagcgcaccagcacggcacatgtatacacatgtaactaacctgcacaatgtgcacatgtaccctaaaacttaaagtataaaaaaaaaaaaaaaaaaaaaaaaacaactaaaactacagcaccaagagctcccaaactggaatcctagttacgttggaataataatcttttttagtgattattcccat

SEQ ID NO: 3514 - DNA, 216 bp, Homo sapiens
taatttttgtgtttttagtagagacggggtttcgccatgttggccaggctggtctcgaattcctgacctcaggtgatccgcccgcctcggcctcccaaagtgctggaattacaggagtgagccaccgtgcccggcctgcatatatgtatgtacgtatatatgtgtctatctatctagctagctagacactaggcattttggattaggcgcccacct

SEQ ID NO: 3515 - DNA, 383 bp, Homo sapiens
tacaggtcaaaaaacattttacatcagaacagattatccataaacataaatgattgaaacaaaatcttcataaaatgttatttacctttacaaatatgatctaccctcatattttctacttgttcaccttttatatgctggccccaattcactaaattgattttacaacccactaatggattataatctactctttgaaaaacactcttcatagccagtattccagtgactaaccaccgccttcgctggataaaaatccagacatttaatgacacaaaggtcatctatgacctggtcccggccacttctcagcctcctttcctaccactatttgcagccacccttcatgagaaactccttgttattctctgactatattacta

SEQ ID NO: 3516 - DNA, 2227 bp, Homo sapiens
aattaaccagctattggatcgtagctttaaagtttatatcaaaactgttgtttgcactcctgaaaaggttaccaaaagaatgtatgatagcttctggaggcagttcaagcactctgagaaggtatgtgcctattgtggcttatttactttgtaacttagcaatgattcgtagtctccttcacctaacctaatggtgctgaaaccctttccatcacccctaccaacccaaagaaaaacattccaggacagctgtctcaggtaccccttcagaagggaacctgattatgttgatagagtaaaagaataaagacagggaacacaggtgggctggcccgtcttcagaagtgctggcatggctgtcagcacatagaagactgttttataaaagctgtgtataggtagaagtgtctgttctctttgaaacatctttatagaaattactgaataatgatttggcaggggaagttgctattctgataaaacagtgtctagattttctgacatgtaacaaacctccaagaaacatgataaaatataaatgaaagctcaatctatccaaaaagaatattaggccaggtatggtggctcacacctgtaatcccagcacttggggaggccaaggcaggctgatcacttaagatcaggagttcaagaccagactgtccaacatggtgatactaaaaataccaaaaaattagttggacatagtggcatgcacctgtattcccagctacatgggaagctgaggcatgagaatcgcttgaacccaggaggtggaggttgtagtgagccaagatcgtgccactgcacccgagcctgggaaagagtgaaagtgtgcatcaaaaaaaaaaaaaaaagatagctgctgttttgagaaatttataatctgttcaacaaacccaaggctaagttatgctgtactacataggaagtgtaggaagtgtacttattttatgtgttcattagattcactgaaaaactgattgtgaatgcttgtaacccttccttatatgatgttgtattttatattcaggttcatgttaatctgcttcttatagaagctaggatgcaagcagaactcctttatgctctgagagccattacccgctatatgacctgatgcctttccttcattaaagatgattctggaatgatcagcagatatagtctacaagggggaaggtactaagccccaggaccaatggtagacaaaataattcagaaatccattgtgccatgattcctttagtttctgctatttttctgtggaaaaccactgctggcacaagcagtgactgtttggcagcttcaagtttagagctgtgaagacaggctgccattcacagtattttgctttttgacagtacaagatgctgtgtaactgttttaatacagcaaatagtaactctccaaatcctgttgcttttatgttaaataagataacaagaattggagcatgcaaagaatgggacttggataatgacttaagctttatatgtaaagaattttagaagatcttggtgctgctattcctgctggaggaatgaatagatggctgtttcagttaagctattagtaataaaagtgaacattgctactatctgagcctacatacataacttgtgtgatttcaaattaaacttgcattatgtgttaattttcttgcatctaaaaaagcatagaattcctactcacacagctcagcaacaaccattttgatggtaacagttaatttctttcattagttttttaaattcagggttctggatattaaattaaaatggcattcttaaagattttcttcaaaaagcaatcctaaatgaaagtgtgtaaattataagaagctggcgatcttttgatatgctgtttcacaggatcctgacactggagggcagctgtcttgtgcattacttgtgtttccagcaccaaagttgtgggacatgttgctgtagactgctgcgcagtcctgggtgcattcagtctctctgcctctgcctgcctcctggtccccactttaaaggctgtgcagctccttaaataataaagctggaaaatatttttagtcgggttatcaaatttgatttacaaaaacgctaactttgtttgaaatgcaaacaggtttgaaaatatgtattaagtactttgtattctggaagcgtgaattgcttttgaagtctgtcagtattactggtatttttaaataaagaagaatttttctccaatttta

SEQ ID NO: 3517 - DNA, 14171 bp, Homo sapiens
ggggaccccaagtggctcaatggtttagagaatgctcctcaaaaactacagaatttaggagaacttaacaaagtgttagcccatagaccttggcttattaccaaagaacacattgaggtaagcagtggggtaatatatcttgggagtcatttcagacttttttagagcagttttaggattacagaaaaatcgcacagaaagtacagagagttcctattttctaccccctgaatctcttcccacagatgcacattttcttctgttacagcatttctgtggtacatttgctgtaattgatatattactagtaactctatagttcacattagggttcagtctttgcattgtatcgttctacacattttgacaaatgcctaatgtcacgcatccattacaatatcatatggaatagttagtaccctaaaaatgccctgggttccacctgttcatccctttccccccctttccccttcccctaaacccctgcaaccactcatctttttattgtttctatatagttttgccttttccagaatgtcatacagctggaatcatacaaaagtatgtagcttttcagactggcttctttcatctagcaacatccatttaaggcttcttcatgctttttcacgacttgatagttcatttctttttatcactgaataattctctattgtatagttatgccatagtttgtttatccattcacctattgaaggacatcttggttactgccagtttggggcaattacggataaagctgctgtaaacattcatgtataggtttttgtttcttgttttttgtcgacaaaagttttcacctcatttggataaataattaggtgtgcgatttgtggataatacggtaagcctacgtttacctttgtaagaaactgtaaaactcttccaaagggcagtatcagtttgcattcccaccagcaatgaagcagcattcctgttgtcccacatcttggccagcattggtgtcagtgttttggatttcagccattctgataagtgtgaagtggcatctcattgttatgcatctttatgttacgttttaaatgccatgttaagctagttctggttctatttattaatagagataatagagtaaaagtagattgatgttctctaaaattgtctaccatgcactataaattcttagagatgcatcttttggtcttatctatttcatagaatagatactattagataattaaagatattatcaagaagatacaagatttgaatatattaatacaatgcctattatatattgtcaagtaaggaaaaattatacaagattacaaaatagataatgaagcagaagtgacacagaattgaatagaagaattatagaagttatatataactttttgatgatttaggaatatttaatcaagttgttcaagccactatcttaaaaattccttgaggaggccttataataaacaaagcacaggcgtttcacacagcagcttctacttttaaacacaaatttattacatttgctttgagattttgaactaacaacacagtaattcattcataatccagcatctgaaatacagcagccacttttaagcaaaatgcattctcttacattttaagtcaatatttcagaaaatcaaaataatagtgaatgtcttaacagattatgttaagttctatttgtgaatgcatattcataaaaattagcaaattctgggttctacatgtttcaaatgataattttatgctaggctttgtatgatgactcatgttttcaataaattaaatactaaaatgaactgtatacttttaccacaccccagtacaaaaatatattctttttttttttccccctaagggacttttaaaagctgaagagcacagctggtcccttgcggaattggtacatgcagtagttttactcacacactatcattctcttgcctcattcacattcggctgtggaatcagtccagaaattcattgtgatggtggccacacattcagacctccttctgttagcaactactgcatctgtgacattacaaatggcaatcccagtgtggatgagatgccggtcaactcagcagaaaatgtttctgtaagtattatttgtcatgagattgtcataaaactaatcacaataattgctgttatattatttcttcagttggcttcttagaaaaacccaccctgttaagactgtggagatattgggcccctatatctattcattcagtagggttttattgactgcctcacatgctcatcactagtctaggtgatatacaacattttacaaaagtgatgtacaaaactctaagaccctgtaggagtttacatttagataattttaggatcaggagccaacagcatgtgtcccgtcaggaccaaataatattgattggctactgcagtgacatgagggaaggctgaaaatagtgtggcctggtggtggagactgtgtgtgccaatcacattcttctgttttgcacaaaataaacagtctggcttcttaattttttatatttcagaagatttaatcaactttgatctagaaatttctctcttcagaattctttttcatgtttaactttgcaccaatatagaaggtgatatcaggtgaatgtaaatgtgttaaaatgctttcacctctattccttctgttcctggcttttatatattcttagttttgttactcctttgaaacagagcaagttcagttttctataagcaaattttaattcctgtatatgatgaatcaaaatctccttctgcattcttttgttgtagtgaaaaagcaagggtttattttatgcttcaaaaataaattttagaagcagtaccacagccatctgaatgctttacatgcattttctgagttatattatccctttgaaatagatttgacaggttgaattgcctttaatttatatatttgacttcgggcaagttactgaatctcagttcttttgtatctaaataaaagtaaaacacaaagttattgtgaggtttaaatgaaatgtctctaaagaagtaaaatgccaagtacagcacttagcatttgtcaggtgctaaataagaggtagcatttacatatggtgaaattagcacaagaaagaataattttcccaaggttgatcataggactgccaaagaccatcagtttcaccctcctttgagctgcctagattcatgttataggcctgcatatggccactgattatttttcaaagcttggcagtcagaagaggatccaagagagtattcagttgctagaatgctaggagatggattcttctccttgctaccaataatttagtacaaggctaaagaaaaaagtacttgattgtttctagttctccttctattaaaagaatgaatagtgaaagaagataatttttatttctctaataagcttcctattcccaggtaagttggatacttttagaaggtttatggcctaccctgatgacactttgacagtgagctgatatggcttgttctttaggtacatatccagtatctgactcagctcttcagatacaaatggtaacaaacaagaattttccctccctcccaaccctggaaactacttattcatttctttactctctccatagttgtcttttccagaatgttatatagttggaatcatacagtacgtagccttttcagattggcttctttcacttagtaatacacatttaaatttcttccatgtctgttcatggcttgatacctaatttctttttagcactgaataatttttcattttctggatgtagcaacatttctttattccagtagctactgaagaacacattggttgcttctaagtgttggtgtattattctgttctcatgctgctaataaagacatacccaagactgggtaatttataaagggaaagaaaaaagagttttcttacacaattttaacattttaatattaaaatgaaatgccattttttttttggtccctactttagcagatcagtgaaggaacaaagaaacctactttgtttcctttccctcttatttcaatataatttatcaagaattacctttcctaagaatacttaaaatttgggctctttaagaggagaataggtaaacaaaataaattagtgacagataatgtgagttgacagagatcttttttaaactttgagtcatcctgtcatgaaacctaatccttttcagctattttttatttggttactgactctatgtcaggaataactggggaaaatgcatgcatgcaccacaagaatcttcagtatcgtcatagaaacacttcccatcatgaaagtcttagagaaagggcttaatactgggcatttcagtataactgtttggatcaaaagaaaatgtaaagcacaagtgatatagattgtctcttaatatagaattatcctgagagtcattctccagcaagtatttcttgaatatctactatgtaccaggtactatgctaggcttgggatatatacaagtaaaccaaacagatttcctacctttatgaaggtttggtctgggaagggagcctgcattaaatcaatatcatgcgagtaacaattataaattatgattggtcctctgaaggaaagaggagagggttgtgttagaataattggagcttgtggggtaaatgacagtgtttacaaggatgtaagctgctacctgaaggatcaatgggtggaagccaggaagaatggaagatagaggtcttaaaagcattcctggcaaaataaatttataaggggggaaacattaattttgtatgtatacattgagatttgagattaagacttttttttctctttgggagacaaagtctctctctgttgtccaggctggaatacagtggcacaatcacagctcactgcagccttgaactcctcctgggctcaagtgattctcctgccttggtctcccaaaatgctgggattacaggcatgagccactagcccaacccagacttcttaatatattcattttataagaaaggtataaattgcatagatttgatctagcttttgtagcaagaatgcagcagggtatagaagtataaccagtttgactagtgcaaaaccacttggccagtcctttgtcagccccattactctatgtgtgacactgctctagtcatcccagcaagtgacagctgccagatccatttgcagaggtcaggtggccaactccagccatgtagacatctttcatgtttaattggtaaattgtagaaataaagctaattattaaagatgatagacacattgacaatatgtatgcccagtgtacacagttgatgcaaaatcacttatactttgtgtatcttatttatttaaagattaagcaagtagaagttatcttacgcagttctgctttaaattgacaagtagtttaaaacagcataaatggtaatgacattattgctaattttataaggtaaaagcattagaatgtgttcttaaaatcatttttttccttatattttaaaatctgcatgtctgtattcctaataggccaaagtagttttttattcattcatgtacattaaaattataggaatattttccctatattctactaagatataaattctggccaggtgcagtggctcacgcctgtaatcccagcactttggaaggccgaggtggacagatcacaaggtcaggagatcgagaccattcctggctaacacggtgaaaccccgtctctactaaaaaacacaaaaaattagccgggcatggtggcaggcacctgtagtcccagctactcgggaggccgaggcaggagaatggcgtgaacctgggaggtggaccttgcagtgagccgagatcgcgccactgcactgcagcctgggcaacagagcaagactctgtctcaaaaaaaaaaaaaaaaaaaaaagatataaattcttatgagacagacttaaaagataattcatatatattctatgtctgccacatgtaacattaattgtattttttcttcaggtaagtgattctttctttgaggttgaagccctcatggaaaagatgaggcagttacaggaatgtcgagatgaagaagaggcaagtcaggaagagatggcttcacgttttgaaatagaaaaaagagagagtatgtttgtcttctcttcaggtaagaacaaccattatatagtcaatataattattgcaaactcaactttttatttagagaatttaaataacttttaaagcatcaatctaaatatgtccttccttttagagagactattgcataggtattcctaaagtcaaataatttttaaagcaagcaactaagaaaaggtcataagtgaaaacatcctagactaagggggaggacatttaatttggattctggcactaaaattaggggtaataagctttgtgaacttggcttaggcacttaacatatgagttccctcttttttctctttctttttttttttttttttttaagaaacaggggcttgctttgttgccaggctgaagtgcagtggcgtgattgtagctcactgtaacctgagactcttaggctcaagcgatcatcctgcctcagcttcctgagtagctaggactacagacacatgccaccatgcctgcttaattttttaattttttttgtagagatggggtcttgctgtgttgcccacgcttctcttccttaatatgaggaaatagtcccaagattgcttgtagagttaaaattctgtgatttttttgggcacggcagtttgtacctgtagtaccggctactcaagaagctgaggtggaaggatcaccttgaagccaggcattccagactagttggggcaacatagcaagactcctgtctctaaaaaaacaacaacaaaaattatatgatttgtgcaaaaggagatatttattaaattaccaacaacctaaatcctctatgtttaacctttatctatatgcaggctacaggagataatatataaaccaggtaatttaaaggagaaaaagtttataaagtgtctccagatgtattttgacaatataatagagtgggagaaagagcaccgagtttcttaatagcaaagaaacaatcaaatttgtttaaatggaggttggatgttcacttttttttcttccaggaaaaatttttgtttccatgcctaaagatgtagagttgtcatctaatgatacacttacatgaaactataatctcatcaactcctaaacatgatgatagtccagaaagtcttagtcacagtgcaggcagcactgtaaaaatgttaacccatgggatttctttctttgatcatgttacatattatatgtcattaatattcaacaaaaataatctaagtgctaaattttggagcatagctgatttttgtagttatcttaaaaattatccaaaagtatgttcatactttgaataagtcgaacctaatacatataaattggaatgggaggagagagaaaggatctatgaaagaggcaataaaaggcatagagaattcaactatgagttttcattttataacagaaaatctccttttactacattctgtttactagcaagtaaactactttgtataattgtaagactactttggttgatattggtcactcagtatcagagaaagagttatgccatttttactcctttgggtaaaatcaattttaactagcatcctatttttaaaaacctttcaatggccttttttcccagatgatgaagaagttacaccagcaagagctgtatctcgtcattttgaggatactagttatggctataaagatttctctagacatgggatgcatgttccaacatttcgtgtccaggtaaaattgcaacttgtatgcacatgattgactagaaatatctcagtctgacttaaaatacaaaacagccacttagatttgagaactatgctaagtgctttgcaggcagtatctcgtcttgtttcagaataaaaggtgaaagactgtttctaattcatccatggaatcatactgtagtttcaatgtatgtatatcttaaaaattttattgtgtaaatatttaaatatgtaagtatttaattcagatgagttgatactcccagcgttcccaaatattgttaggggccagtgttaaataataactattttaccagaattatgaaaatatttgagaaccataagattttgtttctttgctcaaaaaactaaggggcctggcacaatggctcccgcctgtgatcccagcaccttgggaggctgaggcaggtggattgcctgagccgaggcattccacgaccagcctggccaacaaggggaaaccctgtctccacaaaaaaaataaaaataaaaaataaaataaaattagccaggtgtggtggcatgtacctgtggtcccatctactcaggaggctgaggtgggaagatcacttgagcctggaaggttgaggctgcggtgagttgtgatggagccactgcactccagcctgggtgacagagtgggatcctgtctcaaaaaataataaataagctaaggggcaaaatttaggcacaaggaagagttatagaataattatgcaatagattagaaattgaagacatcatgtgggctggaaattttttatggagggacattaggatttgaagaatttggatggtgaaaagggtattgtaagtagaggagactagacaataattaagcttaggttgagggatagagtgaaggaaggaattataaagagattggttggctgctgagagcttcaagctaaagattcctacttctgattagtggtgtatgtttaaaattggttaggtgtgccttaaatgtcaaagtagtttacattagattatgtggggtttgtaggctttgaccagcgtgatggcatactatcaaagaggtgtttttaggaaagcaacaaagaagtaggggcttattaagttttgtttcaggtggaaagaaaggaggcaaggagatttaatataggaaaactaattaggagactcagttaatagggctaaaaggcagaagtgcaggtaggagaaggaatgggtgatagatgtgtttaattaaaaattcacaaaatttggccagatctggtggctcccacgtgtaatcccagcactttgagagaccaagatgggaaaatcactgaggccaagcattcaagactagcatgggcagcaaaacaagaccctatctctacaaataattttaaaagtagccaagcaaggtggcctgtgcctatagttccagttactcaggaggctgaggcagggaggatcgcttgagcccagcagttggagactgcagtgagctgtgatcataccattgtactctagcctggacaacatagtgagaccttgtctcttaaaacacacacacacacacacacacacactcataatttgaagaccacttgaatggctgcagcaatggaaaaggagaggggactcccaagctggtcacatctggggggctgagtggagagagagtgaaagacataaaggccaatgtgtaaggggaagagactattagtttttttttgtggagtttttttttgagatgagactattagtttttaaactcactgagttataaaacacaaccttttgcatgttgcagtatgggaattgaaaaaaagattggagtgtaagtgaagctgggagttagggataaaagccagttggattgtcagccaaatgacaatgatttttaccatgctacagagctatagatatagaactgtacttgaccacatttattcacatttgttctattccctgtatttaggactattgctgggaagatcatggttattctttggtaaatcgcctttatccagatgtgggacagttgattgatgaaaaatttcacattgcttacaatcttacttataatacaatggcaatgcacaaagatgttgatacctcaatgcttagacgggcaatttggaactatattcactgcatgtttggaataaggttagtcttctttctgtgtttataaagagatgttttcctctgggccaaattattcaagtgcttggagcgcacatgcacatagacacacacataatcaaaacccatcccctccccaataacttatttttatgctatttatgcttcaaagaaccactttattgcagcttagttttttcttctctttcctagctaggcaggagggagagttagggaccttgacaagaattgaatgacagctgcctccaggaaagggaggacaagcaagctggtcctagaacaaagtttgtaactgaacacctttagtatcttttctcttcatataatctatctcttgatacacttatgtttctacctccttggaaatcagtacccttatattgcccctctggctgttcttaggctccttctgaggagtacttgctctcataatacgtaatcaaaatgcaaaactttcatgtccttgctgttaggttttcagccatgttactatgttacattgaaaatgcagtcattgtataccaccttctcacacatgcacacaaactctgagctacagtgcttactagttaactatttttgctgtaaaatcaggctttctattatcagagactctggtcaaaacctacaaaccctatttaatctactctaaacggatctggcatttgaagtacagctgaccaactttaaactaatttcccactaatcagtagccagactattgactttagcctcctcaatggtggtagaaccagctttgcaagacctttgtcccctttccactgaaaactcaataggagacttcagtgcctatgtgattggaaatccattacccagtggagcaacgcacacaactggtgcatgcagccatcttggcttaaagcaggataggctctcctaagtatagaccatccttctcctcgcagcccctgccttttttctcatttgaccccagaaactcctagaaacatgagtaaagtaattctaattatttttattttatttatttatacaagtaaatttctctatatagagagatatctatctctctctatctctctctatatatagatatctctagatctagagatctagatctagagatatctctatctctatagatatctctctatatatatatagatatctctagatctagagatatatatacagatatttctatatctctagatatagagatgtatctagatctagatatatatctctagatctagagatatctatctatatatagagagagagaaagtactagtaccaataacaaatgtaattaatttgtttcttaatttcgataatactcaaaatctgttttcagaatttgttcagccaggcgcggtggctcacgcccataatcccagcactttgggaagccaaggcgggcagatcacttgaggtcaggagttttagactagcctggccaatatggtgataccctgtctctactaaaaatacaaaaattggctgggcatggtggcacacacctgtaatcctagcttctcgggaggctgaggtgagagaatcgcttgaacccaggaagcagaggttgcaataagccaagatagcaccactgcactccagcctgggcgacagggcaagactccgtctcaataatagtttgttcctcagtgtggctacgtgttcatgattgcagatatacactattgcttggtacccagtgctatgttaatattgtcagctttcaggaatgatttacttgggtagtagaaaaaatgttatgttagtctccctaagtactctgtttcttatccctttatactcacttattcatctgcagttataaagctctattatttttggggacagctgcctacacaaagagagaaaaaatacagtattaactattgatgtgtatacttttgtaagatgaaaacaggttatacactgaaaatatcataattctcattatgtctttcaacagatatgatgattatgactatggtgaaattaaccagctattggatcgtagctttaaagtttatatcaaaactgttgtttgcactcctgaaaaggttaccaaaagaatgtatgatagcttctggaggcagttcaagcactctgagaaggtatgtgcctattgtggcttatttactttgtaacttagcaatgattcgtagtctccttcacctaacctaatggtgctgaaaccctttccatcacccctaccaacccaaagaaaaacattccaggacagctgtctcaggtaccccttcagaagggaacctgattatgttgatagagtaaaagaataaagacagggaacacaggtgggctggcccgtcttcagaagtgctggcatggctgtcagcacatagaagactgttttataaaagctgtgtataggtagaagtgtctgttctctttgaaacatctttatagaaattactgaataatgatttggcaggggaagttgctattctgataaaacagtgtctagattttctgacatgtaacaaacctccaagaaacatgataaaatataaatgaaagctcaatctatccaaaaagaatattaggccaggtatggtggctcacacctgtaatcccagcacttggggaggccaaggcaggctgatcacttaagatcaggagttcaagaccagactgtccaacatggtgatactaaaaataccaaaaaattagttggacatagtggcatgcacctgtattcccagctacatgggaagctgaggcatgagaatcgcttgaacccaggaggtggaggttgtagtgagccaagatcgtgccactgcacccgagcctgggaaagagtgaaagtgtgcatcaaaaaaaaaaaaaaaagatagctgctgttttgagaaatttataatctgttcaacaaacccaaggctaagttatgctgtactacataggaagtgtaggaagtgtacttattttatgtgttcattagattcactgaaaaactgattgtgaatgcttgtaacccttccttatatgatgttgtattttatattcaggttcatgttaatctgcttcttatagaagctaggatgcaagcagaactcctttatgctctgagagccattacccgctatatgacctgatgcctttccttcattaaagatgattctggaatgatcagcagatatagtctacaagggggaaggtactaagccccaggaccaatggtagacaaaataattcagaaatccattgtgccatgattcctttagtttctgctatttttctgtggaaaaccactgctggcacaagcagtgactgtttggcagcttcaagtttagagctgtgaagacaggctgccattcacagtattttgctttttgacagtacaagatgctgtgtaactgttttaatacagcaaatagtaactctccaaatcctgttgcttttatgttaaataagataacaagaattggagcatgcaaagaatgggacttggataatgacttaagctttatatgtaaagaattttagaagatcttggtgctgctattcctgctggaggaatgaatagatggctgtttcagttaagctattagtaataaaagtgaacattgctactatctgagcctacatacataacttgtgtgatttcaaattaaacttgcattatgtgttaattttcttgcatctaaaaaagcatagaattcctactcacacagctcagcaacaaccattttgatggtaacagttaatttctttcattagttttttaaattcagggttctggatattaaattaaaatggcattcttaaagattttcttcaaaaagcaatcctaaatgaaagtgtgtaaattataagaagctggcgatcttttgatatgctgtttcacaggatcctgacactggagggcagctgtcttgtgcattacttgtgtttccagcaccaaagttgtgggacatgttgctgtagactgctgcgcagtcctgggtgcattcagtctctctgcctctgcctgcctcctggtccccactttaaaggctgtgcagctccttaaataataaagctggaaaatatttttagtcgggttatcaaatttgatttacaaaaacgctaactttgtttgaaatgcaaacaggtttgaaaatatgtattaagtactttgtattctggaagcgtgaattgcttttgaagtctgtcagtattactggtatttttaaataaagaagaatttttctccaatttta

SEQ ID NO: 3518 - DNA, 15998 bp, Homo sapiens
  SITE (4619): n equals a,t,g, or c
aggaacttggcattagaattcctcgaccactaggacagggaccaagcagattcatcccagaaaaggaggtacgttgtttgtgaaagtacatagtgaactgtatgcttttaaggaagagctttcatgacccacatgttggcatctgaagaactgttggtcaacaacatgttttagtcagagttggttgcagttaatcattctttggcagtgaatctgtgggaataaaaagctgttgtacttgtgttgatttctagtatttcatgatgtgtttttaacacccatatttaatcaagtaaagccaagatttgtttttgaccagtgatacaacatctgcttatatttagatgttgtttaggtgtgcccataacctgagttacttagtcttgactgtctccacaggctgatatcagtgctagattggatctttaattctatatatgtataaaagcatctatgctttattttcataagaagtgtatgctattagttaattttagttctccttaaattgagtgagagtaggcggttttgtaaagaaaggctttagtgtctgtttgcaagctctgcaaatttgataatctaaatctgcttctttatctggattctggccaactctgcaagcagcctatctagatggcctttaatgttcagcctttgttgtttatcccctactatataatatgtaactgtttattcttctgtatctttcaaccagttgagtttaaatttgtaacccctctttcttaagccagatttaatctgcttctaaatgatacttagagtgtagcgcatgtatattttcttcccttaacaccaatttaccatttcagtaaccatggtttttctcatttatacagatcctccaagtggggagtgaagacgcacagatgcatgctttatttgcagattcttttgctgctttgggccgtttggataacattacgttagtgatggttttccacccacaatatttagaaagtttcttaaaaactcagcactatctactgcaaatggatgggccgttacccctacattatcgtcactacacttggaataatggtttgtaaacattcagtgaaaaattggttttgcctatttttattaatctctttaagagacagttaatgctttaaacacagggataaatacttagattatgatatataatatgattcctgttgcacagtctctgtttttcctatttttaaataagtacgctctcaagtataacagaaaaagaagcaagtatttatacattgctgagaaccattcttcattaaataagtagaacacaagttctgtttcattattataaatagttcacattgacataagtggtgcttcctgttcaagatgtaaataatattccattattttatgattggcaccttaattgaagtttcttcttaatctgaagttctgaaagtatatagataaaatgtctaaagttcaaatacttttatcagatattttgtttgttcttggaatatttctaaggttcttacagtatttgaatttttaaaatgtttatataaaaactgcatttctgtagtttacggaaaatttgaaaacatactaataaacttaattagctcttttgcatgttgtaaataaaaaggatatgtagttcaaggttttaatatttataattagaataatctttttgttttaaggctgcggcaagacatcagtgctcctacttagtgaacctgcatgtaaatgatttccttcatgttggtggggaccccaagtggctcaatggtttagagaatgctcctcaaaaactacagaatttaggagaacttaacaaagtgttagcccatagaccttggcttattaccaaagaacacattgaggtaagcagtggggtaatatatcttgggagtcatttcagacttttttagagcagttttaggattacagaaaaatcgcacagaaagtacagagagttcctattttctaccccctgaatctcttcccacagatgcacattttcttctgttacagcatttctgtggtacatttgctgtaattgatatattactagtaactctatagttcacattagggttcagtctttgcattgtatcgttctacacattttgacaaatgcctaatgtcacgcatccattacaatatcatatggaatagttagtaccctaaaaatgccctgggttccacctgttcatccctttccccccctttccccttcccctaaacccctgcaaccactcatctttttattgtttctatatagttttgccttttccagaatgtcatacagctggaatcatacaaaagtatgtagcttttcagactggcttctttcatctagcaacatccatttaaggcttcttcatgctttttcacgacttgatagttcatttctttttatcactgaataattctctattgtatagttatgccatagtttgtttatccattcacctattgaaggacatcttggttactgccagtttggggcaattacggataaagctgctgtaaacattcatgtataggtttttgtttcttgttttttgtcgacaaaagttttcacctcatttggataaataattaggtgtgcgatttgtggataatacggtaagcctacgtttacctttgtaagaaactgtaaaactcttccaaagggcagtatcagtttgcattcccaccagcaatgaagcagcattcctgttgtcccacatcttggccagcattggtgtcagtgttttggatttcagccattctgataagtgtgaagtggcatctcattgttatgcatctttatgttacgttttaaatgccatgttaagctagttctggttctatttattaatagagataatagagtaaaagtagattgatgttctctaaaattgtctaccatgcactataaattcttagagatgcatcttttggtcttatctatttcatagaatagatactattagataattaaagatattatcaagaagatacaagatttgaatatattaatacaatgcctattatatattgtcaagtaaggaaaaattatacaagattacaaaatagataatgaagcagaagtgacacagaattgaatagaagaattatagaagttatatataactttttgatgatttaggaatatttaatcaagttgttcaagccactatcttaaaaattccttgaggaggccttataataaacaaagcacaggcgtttcacacagcagcttctacttttaaacacaaatttattacatttgctttgagattttgaactaacaacacagtaattcattcataatccagcatctgaaatacagcagccacttttaagcaaaatgcattctcttacattttaagtcaatatttcagaaaatcaaaataatagtgaatgtcttaacagattatgttaagttctatttgtgaatgcatattcataaaaattagcaaattctgggttctacatgtttcaaatgataattttatgctaggctttgtatgatgactcatgttttcaataaattaaatactaaaatgaactgtatacttttaccacaccccagtacaaaaatatattctttttttttttccccctaagggacttttaaaagctgaagagcacagctggtcccttgcggaattggtacatgcagtagttttactcacacactatcattctcttgcctcattcacattcggctgtggaatcagtccagaaattcattgtgatggtggccacacattcagacctccttctgttagcaactactgcatctgtgacattacaaatggcaatcacagtgtggatgagatgccggtcaactcagcagaaaatgtttctgtaagtattatttgtcatgagattgtcataaaactaatcacaataattgctgttatattatttcttcagttggcttcttagaaaaacccaccctgttaagactgtggagatattgggcccctatatctattcattcagtagggttttattgactgcctcacatgctcatcactagtctaggtgatatacaacattttacaaaagtgatgtacaaaactctaagaccctgtaggagtttacatttagataattttaggatcaggagccaacagcatgtgtcccgtcaggaccaaataatattgattggctactgcagtgacatgagggaaggctgaaaatagtgtggcctggtggtggagactttttgtgccaatcacattcttctcttttgcacaaaataaacagtctggcttcttaattttttatatttcagaagatttaatcaactttgatctagaaatttctctcttcagaattctttttcatgtttaactttgcaccaatatagaaggtgatatcaggtgaatgtaaatgtgttaaaatgctttcacctctattccttctgttcctggcttttatatattcttagttttgttactcctttgaaacagagcaagttcagttttctataagcaaattttaattcctgtatatgatgaatcaaaatctccttctgcattcttttgttgtagtgaaaaagcaagggtttattttatgcttcaaaaaaattaattttgggaaccagttcccacagcccttttggaatggctttaccatggcctttntctggagttaattttaatcccctttggaaaattgaattggacaagggttggaattggcctttaaatttattatattttggcctttcggggccaaagtacctggaattcctaaagttctttttgtattttaaaattaaaaggtaaaccaccaaaggttttttggggtgaggtttaaatgaaatgtctctaaagaagtaaaatgcccaaggttcaggcactttagccttttggtcagggtggcttaaattaagaaggtaggcaatttaacattattggggaaaattaggccccaagaaaaaaattaattttttccccaaggttgaataattaggaactggccaaaaaccattaagttttcaaccttccttttgaggcttggctaagaattcattgttattaaggccctggattatgggccaactgaattattttttcaaagcttggcagtcagaagaggatccaagagagtattcagttgctagaatgctaggagatggattcttctccttgctaccaataatttagtacaaggctaaagaaaaaagtacttgattgtttctagttctccttctattaaaagaatgaatagtgaaagaagataatttttatttctctaataagcttcctattcccaggtaagttggatacttttagaaggtttatggcctaccctgatgacactttgacagtgagctgatatggcttgttctttaggtacatatccagtatctgactcagctcttcagatacaaatggtaacaaacaagaattttccctccctcccaaccctggaaactacttattcatttctttactctctccatagttgtcttttccagaatgttatatagttggaatcatacagtacgtagccttttcagattggcttctttcacttagtaatatacatttaaatttcttccatgtctgttcatggcttgatacctaatttctttttagcactgaataatttttcattttctggatgtagcaacatttctttattccagtagctactgaagaacacattggttgcttctaagtgttggtgtattattctgttctcatgctgctaataaagacatacccaagactgggtaatttataaagggaaagaaaaaagagttttcttacacaattttaacattttaatattaaaatgaaatgccattttttttttaatcccaactttagcagatcagtgaaggaacaaagaaacctactttgtttcctttccctcttatttcaatataatttatcaagaattacctttcctaagaatacttaaaatttgggctctttaagaggagaataggtaaacaaaataaattagtgacagataatgtgagttgacagagatcttttttaaactttgagtcatcctgtcatgaaacctaatccttttcagctattttttatttggttactgactctatgtcaggaataactggggaaaatgcatgcatgcaccacaagaatcttcagtatcgtcatagaaacacttcccatcatgaaagtcttagagaaagggcttaatactgggcatttcagtataactgtttggatcaaaagaaaatgtaaagcacaagtgatatagattgtctcttaatatagaattatcctgagagtcattctccagcaagtatttcttgaatatctactatgtaccaggtactatgctaggcttgggatatatacaagtaaaccaaacagatttcctacctttatgaaggtttggtctgggaagggagcctgcattaaatcaatatcatgcgagtaacaattataaattatgattggtcctctgaaggaaagaggagagggttgtgttagaataattggagcttgtggggtaaatgacagtgtttacaaggatgtaagctgctacctgaaggatcaatgggtggaagccaggaagaatggaagatagaggtcttaaaagcattcctggcaaaataaatttataaggggggaaacattaattttgtatgtatacattgagatttgagattaagacttttttttctctttttgagacaaagtctctctctgttgtccaggctggaatacagtggcacaatcacagctcactgcagccttgaactcctcctgggctcaagtgattctcctgccttggtctcccaaaatgctgggattacaggcatgagccactagcccaacccagacttcttaatatattcattttataagaaaggtataaattgcatagatttgatctagcttttgtagcaagaatgcagcagggtatagaagtataaccagtttgactagtgcaaaaccacttggccagtcctttgtcagccccattactctatgtgtgacactgctctagtcatcccagcaagtgacagctgccagatccatttgcagaggtcaggtggccaactccagccatgtagacatctttcatgtttaattggtaaattgtagaaataaagctaattattaaagatgatagacacattgacaatatgtatgcccagtgtacacagttgatgcaaaatcacttatactttgtgtatcttatttatttaaagattaagcaagtagaagttatcttacgcagttctgctttaaattgacaagtagtttaaaacagcataaatggtaatgacattattgctaattttataaggtaaaagcattagaatgtgttcttaaaatcatttttttccttatattttaaaatctgcatgtctgtattcctaataggccaaagtagttttttattcattcatgtacattaaaattataggaatattttccctatattctactaagatataaattctggccaggtgcagtggctcacgcctgtaatcccagcactttggaaggccgaggtggacagatcacaaggtcaggagatcgagaccattcctggctaacacggtgaaaccccgtctctactaaaaaacacaaaaaattagccgggcatggtggcaggcacctgtagtcccagctactcgggaggccgaggcaggagaatggcgtgaacctgggaggtggaccttgcagtgagccgagatcgcgccactgcactgcagcctgggcaacagagcaagactctgtctcaaaaaaaaaaaaaaaaaaaaaagatataaattcttatgagacagacttaaaagataattcatatatattctatgtctgccacatgtaacattaattgtattttttcttcaggtaagtgattctttctttgaggttgaagccctcatggaaaagatgaggcagttacaggaatgtcgagatgaagaagaggcaagtcaggaagagatggcttcacgttttgaaatagaaaaaagagagagtatgtttgtcttctcttcaggtaagaacaaccattatatagtcaatataattattgcaaactcaactttttatttagagaatttaaataacttttaaagcatcaatctaaatatgtccttccttttagagagactattgcataggtattcctatttacaaataatttttaaagcaagcaactaagaaaaggtcataagtgaaaacatcctagactaagggggaggacatttaatttggattctggcactaaaattacttctaataagctttgtgaacttggcttagtcacttaacatatgagtgccctcttttttctctttttttttttttttttttttttaagaaacagggtcttgctttgttgccaggctgaagtgcagtggcgtgattgtagctcactgtaacctgagactcttaggctcaagcgatcatcctgcctcagcttcctgagtagctaggactacagacacatgccaccatgcctgcttaattttttaattttttttgtagagatggggtcttgctatattgcccacgcttctcttccttaatatgaggaaatagtcccaagattgcttctagagttaaaattctgtgatttttttgggcacggcagtttgtacctgtagtaccggctactcaagaagctgaggtggaaggatcaccttgaagccaggcattccagactagttggggcaacatagcaagactcctgtctctaaaaaaacaacaacaaaaattatatgatttgtgaaaaggagatatttattaaattaccaacaacctaaatcctctatgtttaacctttatctatatgcaggctacaggagataatatataaaccaggtaatttaaaggagaaaaagtttataaagtgtctccagatgtattttgacaatataatagagtgggagaaagagcaccgagttttttaatagcaaagaaacaatcaaatttgtttaaatggaggttggatgttcacttttttttcttccaggaaaaatttttgtttccatgcctaaagatgtagagttgtcatctaatgatacacttacatgaaactataatctcatcaactcctaaacatgatgatagtccagaaagtcttagtcacagtgcaggcagcactgtaaaaatgttaacccatgggatttctttctttgatcatgttacatattatatgtcattaatattcaacaaaaataatctaagtgctaaattttggagcatagctgatttttgtagttatcttaaaaattatccaaaagtatgttcatactttgaataagtcgaacctaatacatataaattggaatgggaggagagagaaaggatctatgaaagaggcaataaaaggcatagagaattcaactatgagttttcattttataacagaaaatctccttttactacattctgtttactagcaagtaaactactttgtataattgtaagactactttggttgatattggtcactcagtatcagagaaagagttatgccatttttactcctttgggtaaaatcaattttaactagcatcctatttttaaaaacctttcaatggccttttttcccagatgatgaagaagttacaccagcaagagctgtatctcgtcattttgaggatactagttatggctataaagatttctctagacatgggatgcatgttccaacatttcgtgtccaggtaaaattgcaacttgtatgcacatgattgactagaaatatctcagtctgacttaaaatacaaaacagccacttagatttgagaactatgctaagtgctttgcaggcagtatctcgtcttgtttcagaataaaaggtgaaagactgtttctaattcatccatggaatcatactgtagtttcaatgtatgtatatcttaaaaattttattgtgtaaatatttaaatatgtaagtatttaattcagatgagttgatactcccagcgttcccaaatattgttaggggccagtgttaaataataactattttaccagaattatgaaaatatttgagaaccataagattttgtttctttgctcaaaaaactaaggggcctggcacaatggctcccgcctgtgatcccagcaccttgggaggctgaggcaggtggattgcctgagccgaggcattccacgaccagcctggccaacaaggggaaaccctgtctccacaaaaaaaataaaaataaaaaataaaataaaattagccaggtgtggtggcatgtacctgtggtcccatctactcaggaggctgaggtgggaagatcacttgagcctggaaggttgaggctgcggtgagttgtgatggagccactgcactccagcctgggtgacagagtgggatcctgtctcaaaaaataataaataagctaaggggcaaaatttaggcacaaggaagagttatagaataattatgcaatagattagaaattgaagacatcatgtgggctggaaattttttatggagggacattaggatttgaagaatttggatggtgaaaagggtattgtaagtagaggagactagacaataattaagcttaggttgagggatagagtgaaggaaggaattataaagagattggttggctgctgagagcttcaagctaaagattcctacttctgattagtggtgtatgtttaaaattggttaggtgtgccttaaatgtcaaagtagtttacattagattatgtggggtttgtaggctttgaccagcgtgatggcatactatcaaagaggtgtttttaggaaagcaacaaagaagtaggggcttattaagttttgtttcaggtggaaagaaaggaggcaaggagatttaatataggaaaactaattaggagactcagttaatagggctaaaaggcagaagtgcaggtaggagaaggaatgggtgatagatgtgtttaattaaaaattcacaaaatttggccagatctggtggctcccacgtgtaatcccagcactttgagagaccaagatgggaaaatcactgaggccaagcattcaagactagcatgggcagcaaaacaagaccctatctctacaaataattttaaaagtagccaagcaaggtggcctgtgcctatagttccagttactcaggaggctgaggcagggaggatcgcttgagcccagcagttggagactgcagtgagctgtgatcataccattgtactctagcctggacaacatagtgagaccttgtctcttaaaacacacacacacacacacacacacactcataatttgaagaccacttgaatggctgcagcaatggaaaaggagaggggactcccaagctggtcacatctggggggctgagtggagagagagtgaaagacataaaggccaatgtgtaaggggaagagactattagtttttttttgttgttgttgttttttgagatgagactattagtttttaaactcactgagttataaaacacaaccttttgcatgttgcagtatgggaattgaaaaaaagattggagtgtaagtgaagctgggagttagggataaaagccagttggattgtcagccaaatgacaatgatttttaccatgctacagagctatagatatagaactgtacttgaccacatttattcacatttgttctattccctgtatttaggactattgctgggaagatcatggttattctttggtaaatcgcctttatccagatgtgggacagttgattgatgaaaaatttcacattgcttacaatcttacttataatacaatggcaatgcacaaagatgttgatacctcaatgcttagacgggcaatttggaactatattcactgcatgtttggaataaggttagtcttctttctgtgtttataaagagatgttttcctctgggccaaattattcaagtgcttggagcgcacatgcacatagacacacacataatcaaaacccatcccctccccaataacttatttttatgctatttatgcttcaaagaaccactttattgcagcttagttttttcttctctttcctagctaggcaggagggagagttagggaccttgacaagaattgaatgacagctgcctccaggaaagggaggacaagcaagctggtcctagaacaaagtttgtaactgaacacctttagtatcttttctcttcatataatctatctcttgatacacttatgtttctacctccttggaaatcagtacccttatattgcccctctggctgttcttaggctccttctgaggagtacttgctctcataatacgtaatcaaaatgcaaaactttcatgtccttgctgttaggttttcagccatgttactatgttacattgaaaatgcagtcattgtataccaccttctcacacatgcacacaaactctgagctacagggcttactagttaactatttttgctgtaaaatcaggctttctattatcagagactctggtcaaaacctacaaaccctatttaatctactctaaacggatctggcatttgaagtacagctgaccaactttaaactaatttcccactaatcagtagccagactattgactttagcctcctcaatggtggtagaaccagctttgcaagacctttgtcccctttccactgaaaactcaataggagacttcagtgcctatgtgattggaaatccattacccagtggagcaacgcacacaactggtgcatgcagccatcttggcttaaagcaggataggctctcctaagtatagaccatccttctcctcgcagcccctgccttttttctcatttgaccccagaaactcctagaaacatgagtaaagtaattctaattatttttattttatttatttatacaagtaaatttctctatatagagagatatctatctctctctatctctctctatatatagatatctctagatctagagatctagatctagagatatctctatctctatagatatctctctctatatatatagatatctctagatctagagatatatatacagatatttctatatctctagatatagagatgtatctagatctagatatatatctctagatctagagatatctatctatatatatagagagagaaagtactagtaccaataacaaatgtaattaatttgtttcttaatttcgataatactcaaaatctgttttcagaatttgttcagccaggcgcggtggctcacgcccataatcccagcactttgggaagccaaggcgggcagatcacttgaggtcaggagttttagactagcctggccaatatggtgataccctgtctctactaaaaatacaaaaattggctgggcatggtggcacacacctgtaatcctagcttctcgggaggctgaggtgagagaatcgcttgaacccaggaagcagaggttgcaataagccaagatagcaccactgcactccagcctgggcgacagggcaagactccgtctcaataatagtttgttcctcagtgtggctacgtgttcatgattgcagatatacactattgcttggtacccagtgctatgttaatattgtcagctttcaggaatgatttacttgggtagtagaaaaaatgttatgttagtctccttaagtactctgtttcttatcccttaatactcactaattcatcggcagttataaagctctatcatttttggggacagctgcctacacaaagagagaaaaaatacagtattaactattgatgtgtatacttttgtaagatgaaaacaggttatacactgaaaatatcataattctcattatgtctttcaacagatatgatgattatgactatggtgaaattaaccagctattggatcgtagctttaaagtttatatcaaaactgttgtttgcactcctgaaaaggttaccaaaagaatgtatgatagcttctggaggcagttcaagcactctgagaaggtatgtgcctattgtggcttatttactttgtaacttagcaatgattcgtagtctccttcacctaacctaatggtgctgaaaccctttccatcacccctaccaacccaaagaaaaacattccaggacagctgtctcaggtaccccttcagaagggaacctgattatgttgatagagtaaaagaataaagacagggaacacaggtgggctggcccgtcttcagaagtgctggcatggctgtcagcacatagaagactgttttataaaagctgtgtataggtagaagtgtctgttctctttgaaacatctttatagaaattactgaataatgatttggcaggggaagttgctattctgataaaacagtgtctagattttctgacatgtaacaaacctccaagaaacatgataaaatataaatgaaagctcaatctatccaaaaagaatattaggccaggtatggtggctcacacctgtaatcccagcacttggggaggccaaggcaggctgatcacttaagatcaggagttcaagaccagactgtccaacatggtgatactaaaaataccaaaaaattagttggacatagtggcatgcacctgtattcccagctacatgggaagctgaggcatgagaatcgcttgaacccaggaggtggaggttgtagtgagccaagatcgtgccactgcacccgagcctgggaaagagtgagagtgtgcatcaaaaaaaaaaaaaaagatagctgctgttttgagaaatttataatctgttcaacaaacccaaggctaagttatgctgtactacataggaagtgtaggaagtgtacttattttatgtgttcattagattcactgaaaaactgattgtgaatgcttgtaacccttccttatatgatgttgtattttatattcaggttcatgttaatctgcttcttatagaagctaggatgcaagcagaactcctttatgctctgagagccattacccgctatatgacctgatgcctttccttcattaaagatgattctggaatgatcagcagatatagtctacaagggggaaggtactaagccccaggaccaatggtagacaaaataattcagaaatccattgtgccatgattcctttagtttctgctatttttctgtggaaaaccactgctggcacaagcagtgactgtttggcagcttcaagtttagagctgtgaagacaggctgccattcacagtattttgctttttgacagtacaagatgctgtgtaactgttttaatacagcaaatagtaactctccaaatcctgttgcttttatgttaaataagataacaagaattggagcatgcaaagaatgggacttggataatgacttaagctttatatgtaaagaattttagaagatcttggtgctgctattcctgctggaggaatgaatagatggctgtttcagttaagctattagtaataaaagtgaacattgctactatctgagcctacatacataacttgtgtgatttcaaattaaacttgcattatgtgttaattttcttgcatctaaaaaagcatagaattcctactcacacagctcagcaacaaccattttgatggtaacagttaatttctttcattagttttttaaattcagggttctggatattaaattaaaatggcattcttaaagattttcttcaaaaagcaatcctaaatgaaagtgtgtaaattataagaagctggcgatcttttgatatgctgtttcacaggatcctgacactggagggcagctgtcttgtgcattacttgtgtttccagcaccaaagttgtgggacatgttgctgtagactgctgcgcagtcctgggtgcattcagtctctctgcctctgcctgcctcctggtccccactttaaaggctgtgcagctccttaaataataaagctggaaaatatttttagtcgggttatcaaatttgatttacaaaaacgctaactttgtttgaaatgcaaacaggtttgaaaatatgtattaagtactttgtattctggaagcgtgaattgcttttgaagtctgtcagtattactggtatttttaaataaagaagaatttttctccaatttta

SEQ ID NO: 3519 - DNA, 2227 bp, Homo sapiens; identical to SEQ ID NO: 3516

SEQ ID NO: 3520 - DNA, 329 bp, Homo sapiens
tgttttcaagggtatgatgaggtttgctacctcatgagtacaccattacaccattcttgggactgggcattgttataatccctttgaaaagcaatttggcagtaagtataaagagtcataaaatgtccatctcctgcaacgttttatgttttgaaaattctgaaagtcaattctaagaagataatctaaaatgtggaaaagaaggccaggtatggtggcttatgcctgtaatcccagcactttgggaggctgaggcaggaggattgcctgagcctaggagttcaagaccagcctagggcaacatggtgagactctgtctctataaaata

SEQ ID NO: 3521 - DNA, 329 bp, Homo sapiens; identical to SEQ ID NO: 3520

SEQ ID NO: 3522 - DNA, 329 bp, Homo sapiens; identical to SEQ ID NO: 3520

SEQ ID NO: 3523 - DNA, 697 bp, Homo sapiens
ctattcatcgtagatttattcataagagtcccaaactgaaaataactgaaatgactgtcaccaggagaagaaataaattgtggtatatttatacaatggaatacaaaaaaaaaaagaggaaaattttcattctgctttatattaatatacatattaaaagcctcaactatattttcagtaatagggtctaataacgcatccttactcaaaagtatgtctgaggatctatgctgaggagttggcagtgcttcattcaaaacactaaaaacaatttgttttcaaattatattactataggatacattcgtttctttaagatttttaacaattcatctaactagcaaaaactcagtcatacaagtgaaatctgtaaaatgttgctaaatccataaattttaaaagcacaaccacttacgaaccattttgttttcttaatatgttaagataaatttactagggagtagaaaatatatgaatggtccattgagagtcacttggctaatataccattttccacccacagcatcttttccccccagcaaccagtagcaaagatgtccaaatcccactgaggacagggtatgagtgcatgctttacacaggcttgaaaatccaagtctaatcctcttttggttacctcaagcttaagacctagacaaatccctacctgtagaactcagttatccatctacaagcc

SEQ ID NO: 3524 - DNA, 697 bp, Homo sapiens
ctattcatcgtagatttattcataagagtcccaaactgaaaataactgaaatgactgtcaccaggagaagaaataaattgtggtatatttataccatgggataccaaaaaaaaaagaggaaaattttcattctgctttatattaatatacatattaaagcctcaactatattttcagtaatagggtctaataacgcatccttactcaaaagtatgtctgaggatctatgctgaggagttggcagtgcttcattcaaaacactaaaaacaatttgttttcaaattatattactataggatacattcgtttctttaagatttttaacaattcatctaactagcaaaaactcagtcatacaagtgaaatctgtaaaatgttgctaaatccataaattttaaaagcacaaccacttacgaaccattttgttttcttaatatgttaagataaatttactagggagtagaaaatatatgaatggtccatttgagagtcacttggctaatataccattttccacccacagcatcttttccccccagcaaccagtagcaaagatgtccaaatcccactgaggacagggtatgagtgcatgctttacacaggcttgaaaatccaagtctaatcctcttttggttacctcaagcttaagacctagacaaatccctacctgtagaactcagttatccatctacaagcc

SEQ ID NO: 3525 - DNA, 15613 bp, Homo sapiens
cactttaaaaatgaactagtggattttaaaccagggacccttgtttaagcgtgcatttttagcaccaaaatcggggccaggcacatgaatccctcagttaagttgtttaatgaatgagtaaataatttccctttaaagaggcccccaccccaattaacggccaactgcagtaacacttcagggtttcaaccctgcttccttcctgctaggaggtgccatgtcatttattcaaagaaaacaaaacgaaaccaaacaaaacagggcaaacacatttcttaataagtgcagtttgttaaaatcatgttaaaacatatgagtcaaggggaagtaaaaataaagggtatcactgtaggaaaagcttttgggtctggcacctgggagaccactggagaggaggcagtgggagaaacttcaagttctgaagggaaggagccccccaacctccccttcttccctctcacccactgaatcccaccagaaactaccaagacgcccggaataaaaggtttcaagttcaatagtcactctctccaaatacaaaaagcagttacaattcaactgaacacagaagcttgtgtgcaaagttatggggaactggggcatcgtataaaaagttgggttaaagatgattctgtggtttggttttgttgtgttttgttttgtggctcttcctcagtcacctgaactcaggaaagaaatgcttatcttgatgaaatatcaacagcccacccacagtaaaaagacaaattctaaaaattaaaaaaaagcgcataattaccaaaaaaaagtcactgcttcctccccctccccattttgctttttaaacttttttttttttaagttttgattttttttttaatcctgaaaagtagacagtaaaacagctcctgggagaatttacaaccaactgcatgagggtctgggaagctgaggggctggagcagggttgggagagtgaacaggaggggattctcccctcagtcactgtagcctcactgtatgatcaagggaggtggggattatttagtcaaaaaggaagaaggtaggaagaacaggaggtggaaggctggggaggtggggacaaacagaaaataaaaggtcattgttgcctgtttgaatccagaaaaaaatgcctggccctatggaggggaaggaagcccctcagaggggaggcagtgggctggagggaggcagccctgggatgaccccatccccagcaccacgggatctggcgggggcagaggaggggccgaggcaggcgctggtggaggaagccggcaggggcctccgggagcctctgggtcacactggctactgtgtacttgtgccaccctgtgtgttcccggagtagctcccgtagtcgtagttcccgtagtatggcggccactggccctggttctgatagtactggttccactgctgggcatactggggaaagaaaccaagaacaccaagttgtcctgcatccaccacacatttagcctccccaccagccccaccctcacctagggcagagacagctgcagtgacaacagttgaacacaggtcccctgacagagaaatcaaggcaccttggaaagacctgacaccacacaggtaggcagttagggactgaagcccaggtctcagcttgtcaacccagtgccttttgggtatagctagatatcatagtcaaaagatttagtaacaggtatgggggcctgggcaccaacctgcagcaggatttggagccccctgtctatggtgctgaaagaggactctgaggcccctggtacttaggccagcccttccccttcacttgctagactgtggagggggctaggataccaattacctagcaaccagtgcagaagtgttgaccaaatggaatggctgcaccagatgaacgccaggccgaggccagcaggctgtctttttagggataagcagggacttaagtctgggaatacacacccaggaggggcccatggaagtctctccatccagttggcccccagtctggcacctacctgctgatactggttatagctgggctgagggtaggtctgtgcagtggggggtggcggtggggtatagggggccgggttgtaaccgccgtagctcccatagttgtaggcaggtggtggtggaggtggaggcggtggggctgtgtagccctggctgtaacctccctggttgtagggtggctggctgtaactcggctggaaagtggagggaaaaaagccaaagctctgtgaaatagaggaaatctgcagatgtgaaatgctgggatggaaaaagggcctttttaagtggttggcccacaggggcccttcccttgcctagtggacattgtttgtgggctgagaaggaggagagccagctccatgccatggtagggcaggatgaagggcaagccccagggctgtgatgtggactctaaccccagctctgagacccccagggagcaaggtacacggcacttcttgaaatctcagttttcttttttataaaatgagaatcacaatagaacaagaacaactcctttagcttgccctgggtatccaataagcttgtgtgtataaaccactgggtactcaacaggtggtggtagttgttactggaagatctgctgagaaacagtagtggcaattgactaagtgcttcccaagtacaggttggatcattacatcatataatctccatatagaacctaggggtaggtcccactagccccattttaaagagaaagaaactgaggctcaagatgaaatttctgggccaaggaaaaaggacttgaccccaggtctgcctagtcccagagctatagtgccacccattcctcacaacaaaccttggaagggacttctactaacacctttatgaggaaaatgaggcccagagacgggaagctatttgtccaagctcacagaaacaggatgttgtggggctgggggtttggatctgtgcctgcccaactcttgttctaagaaatattctagttagctgggcctgggaaccatccattggtctcctggcagctgattccaggcccggcatgaggaaagtgcttgggaaatggctgtgcgataactgaaaacctctctggtttacaggagcctgtgcataccagagccagggcactggctttccaagaatgggaactgagcctggagctgctcaggattgaagctctctgtgcagagggcaagtcctcagcaaccttagtgccctggttattatgtccaaaagacaaagaggtcagccagcctgggcaaggggtgactccagtcaagtgctttcttggggatttagtgaggttagtgacactagccaagaataatgtacttgctggagggatcagtgcttacagcccatccccttgagggtggtgggagaagagcaggttctgggaaggtctacatttactcctgggtttggaggggatctgggaatgtgtagggtccatctgagtcaagatcacggccagggagaaagaagggcaggctagaggttagagtgaagaccagtagctggggcatgtgttgatttccccagatccgcctccacctaacttgctcaggttcaaaagcacacgtgcgatcactacatacaaacacacactcattctctcacctgtggagggctgtagctgctgacggtgggggtgctggtattggcgcttgagccagggatgttgctgttcttattgtaggtgctggcccctggggggttccgagcagggctgtagctgggtggtggcggtggctgctggggtggtggctgtggtggcggaggctgctgtggtggcggctgttgctggggagcccggttgtagctgcctctgttgttggagttgttgttatcccggttgttgttaccccagcggttctggctatagccaccacctccgctgcggttgaaacctgtgttggagaaatccagatgaaaggcgccatcattcccaaatggcaaccccagggaactgggttgtcttggtgactactgtgagccggcatggccaggcgcagagcaagaactcaaggtgaacaacaaagcatgtcctctgggattctctagacccccgggcatactcccctgtcccagcccttatgacaggtttgtctcattcactggactgcaagaatggtgaggcagagaccaaggcagtcctgggtttctgtgtcccagcatctcaatagctgttgaatatgcaggaaggagatgctcaaggagaggaagctggcagggtgcggtggctcacatctgtaatcctagcactctgggaggctaaggcgggtggaccacgtgaggtcaggagttcaagaccagcctgaccaacatggagaaaccccatctctactaaaaatacaaaattagccgggcgtggtggtgcttgcctacaatcccagctactcaggagactgaggcgagagaatcgcttgaatgccgggaggcagaggttgcagtgagccgagattacaccattgcactctagcctgggcaacaagagcaaaactccgtctcaaaaaaaaaaaaaaaaaaaatgagaggaagctaagcactggtgacagccatgaacgagtcacatctagtcctcttcagacctggccaaagatgtagcccccatttccaatagattttgatctagatcctatttccaaggagctcatggtcagatgggggaaggttcacaaaaatgacagcaatgtgacagaatgtgcactgtgatatgcaaatgggcaaagggcttcataaccagcgtccagggagtgggaaagtgggagcgtttctgaggtctccgtgtctgacttgtttcaagttttctaccagagtataactcacagctggagctcagaaaacttcagttgctgattgaataagcagtcaaagcccagccccaacctgggaacagaaagtggagagtgctgtgtgtgagatgtctcacctcctcggtagttgcctcctccaccgctgcctccccctcggttctggaagccgccacggttgcctccagggggtcctcggttttcatagcgctggaagccaccaccacccccgcggccccggaagccaccaccacctcggttgtcaaagcgcttttcagggggtggcccagccttgcggccttcctcgttgtactgcctcactagcttgtccgcttcctcccgctgcagctcaatgaacagaacctcatccaggaagtccccaacatctggcaacgtgaagttggctaggaggaaggaagtgccccaaagagaacaagaagaagaggtcagtaccttctgaagtctggtcccctccacccagaagagtggccttccagaagggagaaggtgaagaaaactggaatagtgaataagaaagacatagacagaagggcgggcgcggtggctcacgcctgtaatcccagcactttgggaggccgaggcgggtggatcacctgaggtcaggagttcaagaccagcctggccaacatggcaaaaccccatctctactaaaaatacaaaaattagccaggcatggtggtggacacctgtagtcccagctactcgggaggctgaggcaggagaactgggtgaactcaggaggcggaggttgcggtgagccaagatcgcaccactatactccagcctgggtgacagggcaagactccctctccaaaaaaaaaaaaaaaaaaaaacagagagagagagaaagaggtagacaaagccccaacccctcagcctgctaagtgtcaggggctaacaaagactcctccgttttctgaagaggtggctaagacccacctagacacagtgcacagctccctcaggcctcaccccagggaatgggtcagacagatggcatcaccatccctatatttacagagaaacaaactgaggcctgcccacagtcagcccatctgggaccagaggcagggtgagcacacaggactttcagctttagctcccatacatcctttcccttgtgctgccccagccccatccagcctgaaaaccccaacataagacagatgggtagcttttccattcacagctgtggtagacaaggaagggacaaagcagaagcaaagaaagagtaagatcaaaaaagaaatcactggggagccagggaaggacaaactgagtaaagagcttcttctctccaggaccctgcattgacgttcctctgggaagcactcatttcctacctttcatttctaagaccgcatgatctgggacatccttcccttcctcgtcggttcgctttattgttcggtcttttaggtcctcgtcagtgggacaaattacaatagctttgcgctggaagccttcaaatggtctcatttttcgtctctgggctgacccataaacatttgtctaagggtaaggtaacagaagaggcaagagatggtacattaagagttggttttttcctctgaggggtattatgtaggccagggactgagaaaaggatatcagtgctccttgtaagcagagaaactcaggaaacagctcttctttacttagaagattcttgagtcaccctcagcaaatgaattgacttaggtaagtggctgcagacaggcacagggcaaaggattcctaatggttgggactttgctttttaatcctatttgttcttggtactggaccttacaatttcttttccctattctaaaagctaatacatactcttggtaaaaaaattcacagtataaggcataaagtttagaggaaaaacccctgtgttcccttagtgccagccctacttcccagagagaatgaagaatgaatttcttccgtgcacttttagaaatatctatgtgatttttttacacaaaaagaattgtattatgcacatcctcctgaggctttttcatgtaacgtgaaactttctctgaagtttttctgtgcagtattcttttttaatggctgtgtaatacctatagattagctatgctactaattaaccagctcctttggacagttttgtagtttgttcttattaacattggttcttttattccctcagtccttctctgaaacatcagcctcacccacaagcttctaaccagcaagctctacacatcaggagactctgcttttcgcaagtgcagttttgctcctaatgtttccttcccttcctctaagtgatggcaggtgtgtcctgggctggtgctggcagagcggtgctctagcacatatgtggttgagagcagtaacaacatcggcttccatttaccgaacacctccttcatgtcgggccctttgggaatggggcctacctctgttggattcagggttccatagactcagcctgtatacttgaatcacgaggacactacttaaaaagtgagcagctcaaacttcatttgagacttcctgagcctgaacctctagaagtaagacccaggcacctatacaggtaccctccctatggaaactcaggaactcagcagaaacggagtaaggagtttttaactgcatttaaacaattttttagtggctctaatagggacccaagaaagaagccacagatggggaaaacagtctgtaaaggggtatatacaaatggaccaaaaaaaaaaaaatgtattctgaagatgtggcctgcttgggtgcaaagagtctagggtcaagtcctggtgtggctactaacataccttggccagtccttatagttgcctcatctgtaatacggggttgaaaagcctccctccctgggctggcaaggactgagtaagagaatgtccataaagcaattgacaaagtgcaagaaactactcaagtagggggacacaggtggcctccagggcagaagacaccttgacaggaagcgggcagtgcactgggatggcccagcctcagcctgctcctctgtaaaatcaagccctgaaaagggaaaacggcatggatgtcttagggttgctgtgaggactgaatgagtccacgtgagtaaaagccctcgtctaagcccaggccctggctcatagccaacactcaacaactgtgagctgccattgatgtggtcatcactgggtagatatttatactgtcatgttgacttgaagcaactcagaccaaagaaaaggttaagcttatagtgacctcccaagcagaaaagcaggaacagtgagacagggtggaatgaacacaggctttggggaagaaacttgggcttgaaatccccgctgtgccctttactatttgtgagactcagacaagtccccaagtagcctgagtctcaaatttcctcgtctgaaagacaaggatcatcaccctcgtcctggctctggagagcatttgcagatgtaaaaatctctggctagtgccaaaggagtgggcagtgaaaagtcaacacccagagtggatctgaaaataagacctacaggactgactatccaggagaggcttcccaatggaaaataccaaggaaaattgaagcttgaggaaaaaacaaggtttcaagagatcgtcttctaagacataggaacagggtgctggatgtggattagccaggggccaaggactccagcacaaatctgctggaagttctggggccgtgggtgcagttgcttaaactaaccagatcctctggccctgaaacacgcgccaggaaaaaatgttcttccctgtcccccagggaaagtgtccctaccctcacgaaggaggatgtgggcagtcatgtgggtgacaggcacacacatactgttcttggggtcttggacaccggcccacaaagagcacttgggccacaaatggtttgaaaaggaacatcatgttacagaggaaaagttaagtcccctctccccactactcttctttgactccattcctaaaaccaaagcagaacgtggcatctggtcataggaagaaagagtttggcttcctcagctaaatataattttcttctgacacaaaagctcagagtaggtaggtgccagggtgaatatggccccagaccattctgcatttttttttttttgcccctaagtgatcctactttgattcctctgaactgcgagggcatggagtgacagtcctggaggtcttccatgtggtacaactgccctgtcaatgtcctgatgaggggacagagaagagaagcaatgctgccaagacggctagcccctgcagcttcatgggatgagaggaatggaggtggagcagattggacttataaatagctggcctttgtccttggaagtgggtagactcagagatggcttctcaggcactttggaattgaggtgctgagaatcaactcagcagtggtttttaagactgcacctccctccacttactccttcgtttggggaagggaagaagagtatctaaaccacaccagcagaaatgcaaatacttggctttcctggaggaaagggaattagctgctggtggctgttgccacagcaaacacagtgaggtcacagcccctgggccagcccagcacttctgtggtcgctgggggctgctggcagctgttgctatgagaccagcacaacagctaggtcagcttttccagctgctttggttccctctgcctagcttctgcttctcccagtcccaccctgcttgaagatgttgattccaagagaaaatgtggctgtctgtgttccctgaaccctgtgacatggactaagggacaagagttgggtttctcagagaagctatatggggagttttggtgtataacagtctgagggagggaggagggaacacagcaggtacgaatgatgatgtgacagcccaggatctctcaagccccactgtccctgtctactctcacttgtcacagctcaccagggtcatactggcagcaggagaaacctagctagatctgaggagcaaagtgaaggctgatgaggaaagatttactttgggctcagagtgaggtgaattccagtcaaaagaaccacatttataggaagagaactggctggtgtgtcaagaatggaatgggcttcaggctctagggatggctggctggggatgaaggaaagaaacatccttcctccaaggcctgcaaataagacacaggttacggtgggagactattctagccctgggtttctgtttcaggcgaaagtgtggcacctgctgaccaggatgcaaatgaggactagaacgacatgttctgactgtgacgtcaacccatccagccctgattctaactgatgcctggcctggctctagctgttagagccctctaacggaactcccaggcaacagtgccctactctggggtgggcttgggcaacatggccctgcggaggctccccagaagcctccagaaaggcaacttgtttgcctcacagcaggccagtcagttcctgttctgtactccattttgaggccctctgggacaaggccagaaagcatctcattccagaggcttcccacctccaacagaggaccccaaagagacacctgaagcaatgtggccttctactccacctttctctctcctctgcagccttttactagccaggcaaatttatccacattcctccggatgaaaacctaaccatgactccccactctcctcaggacaaagccccaactcttttaatcatcctctgtgccccgactcagacattccacctccagaaagcttccccaaattcccaccatggccccaaccattctagactatggctgtttgggaagtcagcagagctgtgatctatcagtacactgagtgcgtgacttagcagtcctatagtcctctgcagaggcttcagcttcctctctggtctacctctttttcctcttctgatgttccacagctgtgatgcccacatcatctcaaaaggctactcaggttatcacagaatgtaggtcaaagccccgatatacctgagagtttgtgcccaatcacatacatcccagggtaggagttagagtcctggccagacaaacacagaatcctggcttacaaaggcccacctggcttctgcagacaacctctccttccctctcaaggatgagcatttctaaggccaacctacataacaggaggctggaagagccaaatctggggagatctgaccactcaggaaaaaccagtaaaggcaaaagatggttctgggctgagatccaggaactgcagggattttgcctgtagtatgggtttcccctttggaaattccacctagcccaggagacagctatgcatcatcaacttacctgtcaccgccaaagctggtggaatggaagtgccaggattggccaggggcctgctctgaaccctctatacacaaacacacaacttccccctccctctttctcatacccagagttttctggaacccacttttggggtttaggccaaaacaggtgaaaccactggctttacaatccctccctcagcctgagtagcctatggcttcaggccccgaggcaatcctccaatctgtggttaaccagagaaccctcctccccagccttcagagtttaggttctctgtctcattgttggccaagatctcttggcctgacccacatgtcccttaagcaggaggctggtagccctgaagaccacaggcatacctggtacagccctagaccctgtccctgaacaagccagcagcagccaagaaggctgacagtaggtcttcagagtgcaaagctgtcatgggcctggcttccagagaaaacccacttcagcatcctggacagagatgttagacgatccactctagactataatcattctcccctaggccacatatttgaaatgagtttcacagctgatttaaccagcaaaccaagaaaaagacagggaggaatactggctagggtatccaaaagaggtatgtatcctcagagtgttaaaatggtattactgctctccctttcacgacaatgagtccaactggggtcaatacagactaaaaaaattcttgaatgccccgacaaggaggatcaggtaaagtgaggccaagggtttaaaagacaaatcttcaaagcggagagaacactgattgtacacaatatgagctggggggataaccacggatggcttttagactatcctgtgctcaactgttttgtgtaggatcctcattcctatgtgaaggcaactcggtctctggcgattcctttctaacaagcaaactaccattctgacaaagccaaacgctgtccccacctccactcttatcaggagccctttgaactcatggtcaccaagtatccaggcctacacgtatggaaggcacttcaggaaggctacaagggcagggtgttacttagtttacatatttgctcactcacaggttcttaagaaagcacaaatgcaaggctgaagggaacagaggctcattcacagatccccaaacatagaaaataaggagacaccctttgttacttgtgaaagccttcaggacaaatgtcaataggcaatgacgttgcataggcaataaccatgtggaactcattactctgagacaggaatctgtaatgatttttgggtcactcatccttttgagaatgctgaaagatagggacaaaaaactgtttttttttcccttctttttcataaaaaggatacacctgcagctgcatacaatatttatgttcaaatacaaaggttccaaggtccctgatgttaagaactccaccattaactgaagtgtaggtagaaaatatgacttaggtatgtacctgccagtcatacgtatttgtgaagagaaaatgacggaagcaataatagcatttaccttacagcactgctgttggcatgaaagctactctacctattctgtagagtatttaacaataatcaccagctactaagtgccaggtcctgcgttaggggtgcagatggtattgagatccctgttttacaaaccaagagatggagattcagagaataaagtcagctgcccaaaggcacagagctagggagtagccgagctggcattcaagctccagtctctcaggcttggaaatccatactccttccattttgctaaacagttcttacctgatgttctttggggctgctgatgagtctgagtaagtaggcctagatcatgatcccagtccaggctcagctgtgtgtagtaccatgtcatcatgtatgacaaggtctgacccccccgactagcacagcagtccatcatcattacgggggaaaaaagaaagggaccagagggagattctcaggcatgcaaggggtcccctcccttctcctgaggacacaatggtcatcattaagtacctgatctaggatatagttgcgtttcttgcgggcagcaatctggatgaggcggttgaggcactgggtggcctgctggatcaggacatcccagcggccagcatagttccgctgccggcgtaggcccatcacctgcgggcaggaattggtgaggggtgagtgattttagttgcagggcagcactcagtaggttggaggtgagtaaggagagtccagtggctggccttacccgcatcttatccatgatggcattggtacccaggatgttgtacttcttggaagggttggaggctgcatgtttgatggcccatgtggtcttgccagcagcaggcaggcccaccatcatcagaatctacaagaacaagacagggaaggtgttgcggcatggtggtatggcaccacttggctcggtggtgactgtgagtgtgactctggacctctgagctgtggctgcctctacaaagcggaagcagtaataccatctacctcacagtactggtatcgggattcaaaaagatcaggcttgtcagactctgagcacagtgcctgggacagggtgagcattaagtcaagtgctggccaggcacggtagctcacgcctataatcccaggactttcgggggaaaacaaaaacaaaaaaccaagtgctgtcatcattagcatttatagtattttgtttttttgagacagggtctcactctattgcccaggctggcgtgtaatggcccaattacagctcactgcagccttgaactcccaggctcaagcaatccttctacatcagcctccagagtagctagaactacagatacaaaccatcacacccagctaatctttttctctctttttttggtagaaatgagagtctccttatgttgcccagactggtctcaaactcctatactcaagggatcctcctcccttcttggcctcccaaagtgctggaattataggcatttgccaccaaacccagcccatttacaggattatgtgacccattccccgccccctgcaatagcccagggaaggctgtgtactgggactggccccatggagtgggtagaagtggtacaactttctttaagtatgaaataggaacagagctgcacacacaaggacatgaattgtatctaatcagtacatttagaatttggtaaacacagatgcatcttaaatgcccgactaggggggagtggcgagtttgtaaggccattaagaatgacgttcattcccttgaaggatttttaaaaaagaaaaaatgatgttcaaagagaggtttttatgtgatgggataaagctcacaaaataatgtgaagtgaaaagagcagggtatcataatgcttataccatagaatctcaatgataaatgtttgtgagcataaaacaggcacttagacattaaaaagaacagatgaactccaaaactctgcaagtaaacttatttgtagatgatggcattatgaaaatttaaattttttacttcttaattttctagaacaagcataaataacttacacatacaagaaaaatattgttttaagaaaaaagacactagtatagctcttggaatcaaatcttcccaaaggccatttatcttttgatagctctgggtgagaggtggaacttactcaacctccttcaagaacactcggtgggccaggctcagtggctaaaaaagttagcctggcatggtggcatgtacctgtggtcccagctactcgagaagctgaggtgggaggatcacttgagcctggaaggtcaaggctgcagtaagccgtgatcgcaccactgcactccagcctgggtgacagagcgagaccctgtctctaaagaaaaaaaaagaacacttggtggcacagtgcactccccaagaagcgcctagtgtccttttctgctgtaagaaaagcctccttttcccctattctggcctcacttaagaagaagatgcaatctttctgagatttaggtagcctctccgacttcaacttaggtcacaccaacacccctcacctcacactcagagcagcttttcagctctgagtccaaccctgaggagctgggacaaagtggccacttgccccaaggctactctcgcagcaagtctgtgtgtgtgtgtgtgtgtgtgtctcctctgtcttggcagcaaggtggccaccaatacattctggccccactcacctcacattctgccttgctctttggtccaacggtgccccggatacgctcactaaggggaaggtgctggatgaaggtaaaccccgggaggacagaacagtagggctctgctctctgtccgaagttgaactccactgcgcaattcttcaccaggacatgaggatagagggcctgaccccccaaggcttccttctggattcggaaagcaatgcccatccactttccattcttggtaaaagacagttccacgt

SEQ ID NO: 3526 - DNA, 467 bp, Homo sapiens
ctccatcctgattctctcggacttttcaaccgcccggcgggccccgcacactaacctccggcccacgcacgcaagagacactttcgcctgagaatgttccgggtccgggtgcaccgctgcgcccaggcaccgaagttccgggcctaaggcagacgttgcattgcgcatgcgtgcctctctcgggctccgccctccgcagccaggaaggaaaggggctccccggagagtgagagacccttaaacctctcctgtcagtcagtaggaaccagaatcattgttcgttttatcactgctgtgactccagctcccagcgtgcttaattttgggatggatggctaaaggactttcccccggagcctggagccgtcatacgctgagggttcgtgctctcgtttagacccccgcttgtccttttcctttcttaactccttcaggaattcaggaatattactaagccttgactcttt

SEQ ID NO: 3527 - DNA, 794 bp, Homo sapiens
tttttttttttgttttttttttttttgagacagggtctcaccctgtcccccaggctgagtgcagtggcacagctagggctcaccgcaacctcaaacttccaggttcaagcaatcctcccacctcagcctcctgagtagctgggactacaggcatgttccacacctggctaatttttaaatttttttgtagagacagggtcttgttatgttgcccaggctggtcttgaaatcctggactcaagtgatcttcccaccttggcctgccaaactgttggaattataggcttgagccactgcacctgtcctaaagcaggtaattttaagaagctccaagtatttgagtcttgtgcctagactgagatgaagacgaaggaaaaggtggtccagtcctgtcctgaaaactgatgaggagacaggtgcagtggctcacgcctataatcccatcactttgagcagccaaggcaggaggatgcttgaggccaggagttcaagtacagcctgggtaacagaaagagaccccatctctacaaaaacaaacaaaagaaacccagaaagggcagtctatgaatataacagatgaaggaaagccaccgcagggccttttcgaactgagttcagcttgttcaacatgttccctgagttcgtactctttctgatacacatgtctgcataatctgggaccgacagagcttagcgaccagtggggaatgagacaaggacactctatcataattcagtaagatgacctacctagaagcaagtttctgaggtttctcagttgcttgtatataagc

SEQ ID NO: 3528 - DNA, 2220 bp, Homo sapiens
cagagataagttaggattggatgtagctatatagatccctatttctggcacaggctgatagcaataaaggaagtcagaacacaaccccactctcacccacatcccactttgcaaaaaccatgacccaaatgcctctgtagatactgggctgtggactgctggcaaagcctcaggagcctttgctctactgagtgatctacctttagattgacagcagcggctgtggagtaacatctgaatgttgattgacagtgcagtttgtgggaataaagcagggagggaaaccctttaaccagtttccatttcttggtgtcttaaagttttcatcttactaaagaatcaaaccgttgtgtaatccagaggaagagcatccctcatcctggcagccctgctctaccacatctgcctatccatagtgaaagacaccatatttttaagaaaatatgaaatgcagagatgaaaactattttggagcaaatgattttaaataaaaaggttgcatactcattttaaatgattttaattttctgaatattatgttccaactcaagatattgcacaatgctttaatattacacttgttatttttctcacactagtgagattttgataaacatagttgactttggaagtaacagagaatgttttcattggttaaataatttcaatgacctgtgaggaactgaaagcaagctattacattcatataaaagataagtacatatccataaattcacttggattcaatgaaaaataataaacttctcgtgtacttaataaaacttaaaaggaaacaaaattttaaatggtgcaaaaatagaatgtatttcttaaagttttgaaaacacttagacctaaaagaattctaagaatatctggccacattataagcctcttatttgtaaaagctaacacttgataattttaaaacaaaatctagattaaataaatatagttctgcattattaaagtaacaaaatctgtgatggtaaggtaaaatttccctaaataatataaacaaaaaacaacaccggaaagcaaatgtatcacgttatggcatcgataaacatttctgttcaaatgtgtggatctacagcattttctctaggtaacacacacagttgttatcacattagtatggaataaatgctgaaaaattaagaaatactaatggttactaggccaaagtcaattccaaaaaactcaattcttataaacttttattatagtgatttttactgtattacaacactttttttctctttttcctttgctttgtgattcatatttttagcagaggcatagcactggagataaagaaggggaaatatgcttcaggtgccagttgcgttttttaacttccattttgcacttttgctatttttagacttgttgctcatcagattcattaacacaccctacttttgctatgtttttttccttcatttccaggaaaactcaaccacagcattaggagaaaaggcaaaaacttcacattgcctgatacaccacttattcttgctctgccactgatttgtagtagctgtgtattactgcagtagcgctgttgtctctattaatgcttagagattccacaccatgaatttttttatggtcatcctaagatacaatgaattcttcacattttgtgaaaattataggcatctgacagctggtgtatttatctaccatcttcatcaaactcgaatattttataaaatacttgagaaaagatctctaccaaagataccctcatgaaacactctcttatcaaaaagaaaagggtaaaattatggattagttcaattgtaccttgaactagaaacactgattatgattatatttcagaaaacagttataattatttcattaaaaatgattcccatttagaatgatgactggagacttatttacaagaaaagatagagaaattttatgagcctaggattgtgccaggattgcctgtgagggcagttttttcaattgcatatgcatgttgagatgggactatttatgatcttatttccttattcattagagaaggagatgaccagtgttttctgggggttttttggttaattttgcatattctcttatttcaaaattaatctaattaattttattcatgtgtcactcagattgcatttgggtttaaacagaggacttaatcatagcatggacagaaaaggctcaccatctatctaaatgactctgattgca

SEQ ID NO: 3529 - DNA, 487 bp, Homo sapiens
aacatcatataatttataatacatgttgaaaatgatttgccaattccccaaggtgtaacttaaaaccttccaaggttacataggggaggaagtccatcattaatttttctattccagagactcagtttggatgcccgtgtgtgggcttctaaagctgagcacaacctgtgaactagagaaatgggccagcagtcctccttgtgtggcttttagttatccttgtgacactcagaagcattctctctttaatttcagtaaagttacatgataaatgacttccacattcagaaactgatgtgtcaactcttaatttatctttaaagttatctttaaagaccttactaaaaacatgtccatattaacagtctttaaaaaaaagagtatattaccagggtttcaagtagactttagatgcacattttcacataaacctaaattcaacagtagctctgacgttgagatttgagtaatgcacgttgtgcttttt

SEQ ID NO: 3530 - DNA, 365 bp, Homo sapiens
aatgagaggattttagggaatgtgtctaacctgcagcagtggaaccagggggaactgtgtcgttctataacagatcccttggtgtctttgttatagccagaattcagggttggatgaaccatattttcggacccattgtgatattttatttttcttgttctgttaatctggaatgttaggtgttaaaaggaagatggtagttgtaaaactagcaagacattttctaggactcctgactggtggcatgtggcatggcaaaaggagatagctcccttttctggctgtaggagacaacttctcaaggcccagaaagccagcatggccccaggagccaccttgaggaatggaggcccacatgagctacc

SEQ ID NO: 3531 - DNA, 365 bp, Homo sapiens; identical to SEQ ID NO: 3530

SEQ ID NO: 3532 - DNA, 521 bp, Homo sapiens
gtttttttctcttggtctttaagttggacacacttaaagaaaacaacttgaaaaatgtggaagagctgaacaaatcaaaagaactcctgactgtagagaatcaaaaaatggaagaatttaggaaagaaatgtaagtttctatcctttgagaaaaaaatatggaatttattttaaattgaaaatgtgaacacaatgctaattacttaaaaattatttgagaagtacataaagtaaacgtatgcagactctattgcataccccagaagcaacatcagtaaccaccgtgaggtcagagccacagctaagttaaaggatcagaatgaaatgtgtactggctgatgagttcagttggggattcagatgtgactttggggtgggtgtggtggcacgtgcctgtaatcccatcactgggaggctgaggtgggtagatcacttgagcctgggagtttgagaccagcctgggcaacacagcaaaaccctgtttctacaaaaagtacaaaaattagttgggtatggtggtg

SEQ ID NO: 3533 - DNA, 521 bp, Homo sapiens; identical to SEQ ID NO: 3532

SEQ ID NO: 3534 - DNA, 9519 bp, Homo sapiens
cactgccttgtctttccccctttgggcctctagaactgtttcaaaagtgcccatgggtgggaagcaaaaacaattaccttatgagaataagaagaaagttttttgggagcagtatagttcattttccttgctcatatttaattggaaaatcagagaagcggcattatatattcgcattggagttacagaactttctgttttgacagattgggttattcataggtatatcgtaaagcatttcttgatggtataatacaggccagtgtggtcttgtactaccccttagtgaagccttaaacgatggtcagtattttgggagttttaatttgactggatttgtagtcttctattcagtgtttttaaaaatattgtataattgactctttaattgaactgtatagattaagaaagcctttaaaaactaacgggtaaagtatctatttggcttttaatttgaaataatttcagtgactgttataaatagtgatatctttaaaaggtactttactggaatttgatggttttgtttttgcatttgcagttttctactctaaactgtagttcatttctgtggcttttcttatgtttagctttacagatgggaacctctactgcttagcctttctatacatctggtgcagcatattggctaatccactgtacataataactgttagcagtcccattcattcttcagtcctagaggtatcagcataatcaaagaatgatgcaaattaagttaattgtggtgttcctttatttttacagttgaaggcacagttaaatgaaacactcacaaaacttagaactgaacaaaatgaaagacagaaggtagctggtgatttgcataaggtaggcactgttcgtcctagagatgtagtatcatgagcctgtgttgtgtgttcaatcttaagcaaacttatgctgctaattctggatttgttgttttgcatcataatattaaccttttataaatttaagctgcttgttattagttagtattttggaatgaaacgttttggcttgtttttccaggattcttaattcacctcattatttcctcacatttctataattaattgctttataaagtacagagtaaaatttagttggagttattaaaatttggctgcatccatatattttttaaaattgggatttggctgtgtattcatttacaaagtatgtttctcttggtcttttggataaaacaaagatataaatttctattttttttagatgtttttccttcatttatttcttcatacaaatatatttttcctaatctcaatgcaaatgaatgatttttaggactgcatttctttgcattggtttgacaggttatttgtaattctgttttgagatctatttttaatagtagaattcacatattcttatatcaaagctgttttagagctatgatagtgtttatggatatatcatcattagcaaaacaagtgtcactttttggaattgcaagaacaagaggtacgcacttaaattttgatagtataaaatggaatcccagaaacccaacagtagtaatttatactcctctcaacatggtatgagaacatgtatttccctataccctcaccaatattagatactgtctaacatttaaatatttgatattctaatagattttaaaagttatctcattttaaaaaataatactccttttaaagagttgaaagaaatttttttttgattctatatgcttatagtttataattgttatgtaaaagtctaggaatccacaagtgttgtcaggttattttagtgtagacagaatgtgaatttgggtctgttttagaggacaaactttgatgcttaatacactgttgtggttgagcagtcagtttactttgatacgtgattttaatttttgacctctggatcaaaatataaacatggaatttagcctagcaatgtagtttcttagaaagtactttaaaaataccaaactggtgctcaaagttatataatagatataccatcttatttacagtagctaagatggcaatgataggtgacagttaactgccccatacctatacagtagaaatattgtgcaacatttgattggaaaagcacataaatatttgactaaaaaaagtttataacggctgggcatggtggctcacgcctgtaatcccagtactttgggaggccaaggtgggcggatcacctgaggtcaggagttcaagaccagcctggccaacatggtgaaacccccgtctctactaaaaatacaaaaattagccgggtgtggtggtgcgcacctgcagtctcagctactcaggaggctgaggcagaagaattgcttgaatccgggaggcagaggttgcagtgagccgagattacgctactgcactctagcctgggtgacagagaaagactgtctaaaaaaaaaaaaaaaaaaaaaagttaataacatactttgtaaaataggtaagtataaagcagtatgtatgttaaagctcacttatgtaatattttctataagcacataatatgtagagagggatctaaactaggggtggacaaatcccaaagcttttttagggtttgtgggtcacatatgatctctttagaatatttttgtctcctttttaacataaccctttattttattatatattttttgagatggagttttgctcttattgcccaggctggagtgcaatggcaccatcttggctcactgcaacctccgcctcccaggttcagttgattctccttcctcagcctccctagtagctgggattacaggcatgtgccaccacacctggctaattttgtatttttagtagagatggggtttctccatgttggtcaggctggtctcgaactcccgacctcaggtgatccgcccgccttggcctcccaaagtgctaggattacaggcgtgagccaccgcgcccagcaacatggccctttaaaaagtaaaaaatattcttagcttgtattctgtacaaaaacaggctttgggccagatttgactaacctgtaatctagactaatactaacctaaatatcaactatggttatttctgtttttaaatttctttgtatagtttctgcattacttaagcttttaaaaacagtgaacatatgttcttataatctggtggggggtgaagctattttcattttggagggaaaaacctgtgtcgtcttttgagaggagcttttatcttctacaaaatgaataaaattattcattttttatgtatttatcaactgtattacttagtagctaccatattgttttccttataggctcaacagtcactggagcttatccagtcaaaaatagtaaaagctgctggagacactactgttattgaaaatagtgatgtttccccagaaacggtatgtattttcttcatccccagatctctgagctagttaccttgtgacctgtgtaaagaacaaaaatgtataaggtccatctccgaaagtcatctttcttgaaaatatcctgtccctaaaatgtagtgttttcattgatgtttgatctcatttttgcttattgaggtatgttaattttaagggttgtgttgagaggtatggagcgggggtccccaattcctggactgtggacaggtaccagtcaatggctttttaggaaccaggccacacagcaggagatgagtggtgggtgaatgaccattgccgcctgagctctgcctcctgtcagatcagtggcagcattagattctcataggagtgcaaaccctattgtgaactgcatgctccttatgagaatctaatgcctgatgatctgaggtggaacagtttcatcctgaaaccatccccgcactcacccatctgtggaaaaattgtcttccacaaaactggtccctggtgccaaaacggttgggtattgctggcctagagtatagactctggagctagactgcctatgtttgaatcctggctctgccacttagtagccatgtgaatttgggcagatctttagccactttgtgctttagttgccccatctgtaaaaggcaatgataatagtacctatcctgtagggtttttgaaagaagtaaatgagttaatacataaaacacttaaaatagtaggtggtacttacaacagtgcctggcacttacttactaagagctcagtatatgttaactttttttactgtttggaatgtactttcttttgcggggcaaattttctttttctgaaagaaaaaatggatatatttctgatattcatagattctagattttttttccttttgtgtccaagtgacaacatttataacatagttttctttggtgccaactagtttgcaccactagttagcaaacagtatttctctatgtggtttttgttattgttgattttcatgtcattgttcagattttttaatgtttgtgtttaaatcagcaatataacattttctgttgtttggttttacatttcttttccttgtgtatggagtttatcatcacttccatcttctttttaggagtcttctgagaaggagacaatgtctgtaagtctaaatcagactgtaacacagttacagcagttgcttcaggcggtaaaccaacagctcacaaaggagaaagagcactaccaggtgttaggtaaggacaactgaaatattgctgtctatgggtaattgatgttatgtgtctgtgtaatgtgtatttacataaataaactcacttcactagaggaaatattccttctttatctctcagaacttccagatgacagccttaagctttcttggagctttagttctattttgtgcatatcttgaaggtcttgtagcttggaggggttatctgtgcctcctttgacctttgtatcaaacagactctcttgtaacttggctgcctgggtttttgtgtgttgccttaatacctgcaacggcttcgttaatttattctgttcttagtttagagtaagtatctgtgaccttttctcccccctcccttccttcctcctttcctccctcccaaaataaaatgaccataacattttaactgaggtaaggttgctaaactggaagtaaggtcatcacagtgtcttaaaattgaaagctggtttttattcaagtttgcttttgttaggtaatctaagaaattcgttcattagctcctgaagtgagatttttacttgaggatagctaaacccataattaaccaagtcatgttatgagcttttattgtctatattaccttggaaggctcagatttggtagcattttaaaatgacttgtattccagccggtgaatgcagtttttgtttttctggttgtagggtttttttttttttttctgttgctacctggattttacctgttttatgaataacttaagtcacactgcctagagtgtaattagagtattcagatatgcactgaatacttcagatattcttcttttgaagatattttctctaaaacaatcatgatatcctggagaccctgaggggcaactcatcactgaattatccctttcagaacccctgataatactgtgttgggctatacaaggcctcagggagagcttaggtatcctggaaaagttgggatggacttccattttgatcttacaggagcgttttgtctcactttagagtgatcatcctctggcctaccttgacacatgctctccttcaaaatgctaattcaggtcagttatctctaacatgactttccatataataagcccagctcattcttcaacatatcaacaaaagtaattaagcctcagctcaaatcttttatccttggtaagctgacttctccagtttcccaatgtaaaaattctgccacatttcctcgcttttccaaattaggaaataaccttgcttcctagggaaacttccatcgcttcttcccaggacttcagccttattctttccactggctccctctgttcagtcttgaaaacatgctcagatggcttattttaaccttgtacttccttcaggttaccacccttatttttttacttttttactatttagtattcttaagaaaatactctctatctacttatttattgttattgattactttatacactctagaatggcttttcttcctgctatttcaatgaaatcatttttgcaaaaatcattaatgatccctaattgctagatccaatataggcccttcttttgcatgtgatcagatactgaaagtacttaatgaaatatgtcaaaaatgctgacattagacctttgtcttataagggaagggtttcatttctagagagcttaaacaattaaaagattgcctattaccccttgcctttcgacctaagcgatattctctctttagcatctcatagatgttctttaatattttccttttcttcctaaatacatagtctgctcattttaagtcttgtgaactatttttggcttgtccattgccacatttgttttaattgtattacacttgagacatatgaatcattgataataacactttttctttttgatttgcagaattatagtaatttattaaaatatgtctgtataccctcacaacgcagttggcaggcagctcccctcctaactgatagcacaacattcttttgtcagctgataaacataagtccaagtttggcaagtgggtggttgacagtattatatcatgaatgataggctggattgttatgaaaatagaggcccaccaggcactctcgaacttcttcattccttaggctctacctggcattgacattgataattcttccttgtgtacttatgttttggttcccgtagctcttctttatacccgttaaatgtttgtgttaccctcaggtttttatccttagctatcatttttgctacatatattctccctcctgtatactctatttaaactgacacgagatgattacattgaaaatacacatttctcaatcattagaatgtaggtaatagcttaatatatctaatgtcaagaaacctttaaaaatatacacaagtacttatgaattgtttatgataatgctgcacatattcaataaagggagagttgtttttaaaaacaaatatgcaagaaataatatgcattgatgtagtttttctaaatcctgatacatagtacttagcgtttcttagagctgtaggggtaggtgtatttaactgatatctttaatttgtgaaaacttttcttttggaaatttttttccccattacctatttttcctccccccatcaaaaaaagaaaagggtaccatcctccgctttccatttgtggggagtgggagattgattaagatgccttttatatgaattgacagtattggcattttataatatacttttttgttcccagatatctactctttatgtttcacatttgcctggtttctaagttttctaggtgtatttctaaccaaatcagaaaactttattatcccaggttaccttatcttggaaccagtttatagaatcctgttgagggaggatgataatttaaatagctgatacttcatgagtatgcctgttagcataagcatgcttccaacatgtggcaactcctttaatcttcacaaccaccctgtgtgttaggtaggtaggtattattattaccatgttacaacagacccaaagagattctataacttgtccaaggtcatacggctaataaatgggcgagctggggtttaaatcaaggtaatttgggtacagggcttgtgttcttaatcagtgcttttcttctccctaattcaggcactgtgttcactgatcccttttgtcactgttttcttttctcctcattttgtctttttatttttttttggccagcctcttagaagttttgtcaatcaattctgactttttcctaaagttgatatttggtttgtcagtagcgtattggagaggcttacagtagtatccagaagaaatggaggtgaagctctgtgtgtactctctgtactccctttaacaaatagattcttaagtgtttctgaaagaaaaagtccttttgtagggctcctgaagtacaagagttaatgctctggagaaaaacttatcttatttctacactgaaccttagctatcatatggatcaggttttcattttctgtgtttacatagcactttagagtttaatgtactagtgatctttttagactttccgatcaactgttaatagccagtgataactttgctttttaattttccaattgcttctttcctctaaactttttatttcaacacataaagttgaaagaatagtacaacacccgtaaaccctccacctgcttcatctctttctatatgtctacatattttgttgttaaactaattgaaagtaacttttagtcattatgacattttatctctaagtactttagcacacatctccgaaaacaagacattgttttaccaatcagtggtaccattattacaaccaaaaagacaaaatagtagttatgtactatccaatattaaacgtttattcacattttgtcaattgtacccaaaatagctttttaactattttccccaaaccagaatccaaggcaaaatttaacatgttgtgttttgttaagtcctcttagtctctctaatggcttttgaagtttaatttctttagtcatcttatctgacttagaaaacttcatatgacctaaaaaaaaaaaaaaaaatctatttctgctcttttaaattatttattcactggggtaaggttgtattcaaccccttttcagtgctactcactcactttagctttacattctcttgagtaggactaataaaaatggattaccagtgttgttgttttaaatgttttctaacagaatttggctcacatttaaaagtatctacctaaaagcttgtttcctttgaatcctgagatttttctcagtttgattaccattagtgtgaattgctttgagtctatttgaaagggccatgctagatcaaatggaatatgtacttttggtgtttgacaaatgtcttctgattgccttctgttgctttgttttaaagtgaaattcattctttctgatcttttacagagtgaagtaattgggaaactgttcatttgaggataaaaaaggcattgtattatattttgccaaattaaagccttatttatgttttcaccctttctactttgtcagaaacactgaacagagttttgtcttttctaatccttgttagactactgatttaaagaaggaaaaaaaaaagccaactctgtagacaccttcagagtttagttttataataaaaactgtttgaataattagacctttacattcctgaagataaacatgtaatcttttatcttattttgctcaataaaattgttcagaagatcaaagtggtaaagacaatgtaaaatttaacattttaatactgatgttgtacactgttttacttaacattttgggaagtaactgcctctgacttcaactcaagaaaacacttttttgttgctaatgtaatcggtttttgtaatggcgtcagcaaataaaaggatgcttattattcaaacttgac

SEQ ID NO: 3535 - DNA, 32134 bp, Homo sapiens
agaaaaggacaagttactcgctgctgtgaaggaagatgctgctgctacaaaggatcggtgtaagcagttaacccaggtgaagacattcttatgtacgagggatatacttcccaaatcagaagcaacaaaagattttagaaattgtccataatcagtagtttaattatttgtaatttatgtccaacaaaagtaactttcctttagagttttgggagggtagatagagctgtctctctcttttgtgatattatagcctatagttgaattatttaaaataagagtacttacagatatcctagcttcagaataacaaaagcactctgtacagaagcatgggaatttgttttaattggatctgacctagatctgttctcaatagaaacacagaatttggtgtgatcttgtttaagtctgattaatggaataagtgtgaaactcttaacataggtaatttatttatggagcttcttgtgataagtataattttttgtcaagttcttcacatctcagaaattttactttgagaggttaatagtaaaaaataccagaaaagccaatctttaaaacatcatgaaactgagagaacagaattgaaactatagaaaatatggtttaattattcctgaagtgcttgtttctctttctagggattaaatgcagtagaatacatgatgtttatttatgagtcattcacctagccacttgatgacattgtaagagtgaatggctttgtttgaatataaatcctttatgtgaatttgaagtaaataaaaaaagtcaatggaaaaagttggcaagattaattaaagttgttaataaaattagaaactttaacatagttttttgtgactatatgactatataaaaaattaaaaattaggataactaatttgataattcattgagccgcatacttatgatgtgtatacttctaagtatgttatacaggagtataacaatttgtaaagatgaatgaacaaactcaggcagccataaattatgtaatatctcaaattttgtcatacaattgctttagagcaggaacatgattagtcctaatgatacctgcagctaactttaaaattgcttggctttcatgtactttgataattaatatttgttctaggagttcatagtaccggcaaaacaaaatgaaatccctcatttaagatttgacttagtggccgggcgcagtggctcatgcctgtaatcccagcactttgggaggctgaggcgggtgaatcatgaggtcaggagatcgagaccatcttggctaacagggtgaaaccccgtctctaataaaaatacaaaaaaaattagccgggcatggtggtgggtgcctgtagtctcaactactcgggaggctgaggcaggagaatggtgtgaatctgggaggcggagcttgtagtgagccgagatcacgccactgctctccagcctgggcgatggagtgagactccgtctcaaaaaaaaaaaaaaaaaaaaaaagatttgacttaggaagatgataaaactttgctttctgaatttgctttcccttgtttcaaactttgactctgctatagacatcttatccctatttttttcccttaggaaagagaattatttccttctaggccttttttccctgaaagagaacgtgtacctgggaatgatagagaatgaactgttgtgctttaaaatgttctttcgtgtaatcaagttagaatgtaggatttattctaggttcatagtctttaactcataataaactagaaagtgcatttgaattaagagtaaacaacagtggcaaagtgtttatgaagggaattggcgtgaagagcagatgagatgcagaagactgtttttaaaatcttttgaccttgctttttttaagcaagtacttaatgttttatcattcatgattattttactgatgttaaataacatcattgtttatcattgttgcaggcttatgatacttattaaataacaagtttttaaatttctgggatattcttttaggaaatgatgacagagaaagaaagaagcaatgtggttataacaaggatgaaagatcgaattggaacattagaaaaggaacataatgtatttcaaaacaaaatacatgtcagttatcaagagactcaacagatgcagatgaaggtatattttcattctttggaaacaagatgaaatggttgcattcactttattagcaaacttttaagtggctagtatgtacaaggccctttcttgggccatcaacatacagtggctagtgaagttcactctgcgtcctaagtaaaacaacttttctaggtggggatgaggtagggaggccggatgcagataaatatgatgatagagataagtattggcgactttagagcaatggtgatgggaggtaaggaagaaaaggatttgatagggaagactttttagaagtgatatgcagactgtgttaaatcttttaaatcaattaggcattatcaagtaagagagtaaagaaatgggcactgaggataagagttacttggtgtgatttcttagtccatctctggaggtgatagttcagtgggtatattttgggacccaggactgagctttttaatgagtgcactccaggtgttaccagtacagattgtctagagtaactgctctatgagaaatacagtaagagttgtggtatttggtaatgagggctggaatgaagaagggatattgagaagtagatagaggccccatcttaaagggccttgtatacctgaagactggggagccagtgaaggagtttaagcaacgcagcagtcgctggaattatactactattttaaattttcaccttggtagcagtggggaaagtggagcaagggatagttggaacactttgctagaattcaagtcaaagaacaagggcctgaaattagatgttgacaatgagagaatgagtttgagtatacaaagagttagttagatagggcttggtgttagtgtgaaggggagaggtgatagtgaagaatgacttccaaggttttggcctgagtgattttgtctgttgttgcttcctaccctttcacctgtcttctgtcagaaggctcagtttttacagtctgtcttttgtatatattttccattttcatgattctagttaggactagaccagtgaattttttttttcttatttttgaaaagattgaaatatctttattactgctaaagaggttattgaagaatatggcttgagtctgcttgcttggtggtcatgtaataccttccttaatttaactttcttgaccagtgactttttgaaattgttacttccatctgctggctgatccttcaatttggaaggtctgtcattacctcagatttaatatatgtctaaaactcacctattgataaggttgatatatatatatatatatatatatatatgtattttttttcaggccaatcatgagcaatgatgtttttaatattttgaggcattattatctttatgcttgaatcctgtgacttttctctgcctggcttaggctacaatttgttctgaaatcttaaagacactttatttctatggctaggtgccgtggctcatgtctgtaatcccagccgaggtgggaggatcacttgaacccaggaatttgagaacagcctgggcaacatagtgggaccccattctataaaaaaattaaaaagtttgccaggcatggtggcatgcccatggtcccaattactcaggaggctgaggtgggaggcttgagcctggaaggatgaggttgcagtgagccatgatcacactattgcactgcagcctgggtgacagggtgagaccctgtctcaaaaaacaaaaaactccaaacctctttatttctagttactcttgcattcaattcttagacatgtctttagtttattattacatactgggataattatggctgatattaataggtttgtcattttcattccgtcttgtatttggtaccagatttttttttggtaaaatattgctttgataatatcgctagtctgctaaaaattttaaaatattctttgctgctttcagagtcccagtgttttcctctgaaatgccactaatagcaaaaaagaagtgaatgatgctgttttcatgttcttaccctatccactgcttttagcatttgtttaactcattccttcatcttctcatcccccagcaatttgagttagtgaagaactgattttcctagcctcaagtgatcttttcttcttaattcctaattcctgttaatttgaaaattaggcagatacttgtagcagcatcttttgttgaaggtgaaaggtatttaagtgattcatcctgttttacttgattacttacagaggtcaggatatagattccatatgataacttctgtgaaaaatagaaatgtataccttaatttcccttaataagcaacagtttcttttgaaagaattattaataagattatttcatacaaaaacatgttcttatgagaatataagagtcagtgtgcctttatctttagattctttaatccaaaatttaaaaattagaagaagaaagttagagtggtggtcgccaggggctgcagggagaggaatgggagttattcgttaaaaggtgtagaaggtgttttacacaatgaagagagttatggagagatgaatggtggtcatgattacacagcattatggatatatttaataccagtgaactgtatacttgaaaatggttagaatggtacgttttatgttatatgtattttataatgtaaaaacttggaaaaaaaattaagaggtcagaatattttagcaagcaggtttttgtgttatctatatgattatggcccaatttgtaacttaatataaagtgtaccaaacatattttcagtttttaaactttggcttactaaagactttaagaatattgctaatgtataattgacataagatcaggacaagcttaattttgtatgaatctattcggtaggaaagaaatcctaaatcatatttagttctgaaacatcatctctaagcatgtttatcttgtatttcaaatatgatagcagctagcatctacttgtattcttgaatgtggtgacagtttgtatttgatttgcattcatcactaacaaaatataattcttttaaatttgtttatatttatttgagaagaatgattcaaacttcattctattgatgttttttatattctcattttaataaagtttattttaaaagttagctttgacagtctttgttttctaagttttatgtgtgtaaaataattttagtttcagcaagttcgtgagcagatggaggcagagatagctcacttgaagcaggaaaatggtatactgagagatgcagtcagcaacactacaaatcaactggaaagcaagtatgtttccaaataccttattttttaattgaatggcagagtattttcttgaatcatcaaaatattaatagcgtttgatagtaattggttagacttttgtgtttttacatttgtttctaaaatgagttacttttaaaaacaattctcttttgctttgtgaagaacttcttcagttatacatatgtaaactatgttatattaatgtcatactattatatacttatacaaatacattaatatatatcatatattacatatttatataaacatgtatgtgtatattgtatataaactatgtaataaatactagtaccaccaatggaatggtctacaagcttatgagtttataagttttaaaccatctgtcccctttcacagtagctcccaaacttcagtgttctgaagaacacctggcattctaattaaaaggtgtattcttgagtcctccccttaaaagattatgattcactgactctgaggtagagcccaggagtctacatattaagacactttcgggccgggtgtggtggttcatgcctgtaatcctggcactttgggaggccgaggcaggcggatcacctgaggtcaggagttcgagaccagcctggccaacgtggtgaaacccctgtctctactaaaaatacaaaaattagctgggcttggtggcacacacctgtaatctcagctactcgggagacaggagaatcgcttgaacctgggaggtagaggttgcagtgagcccagattgtgccactgtactccagcctgggtgacagagtcacactccgtctcaaaaaaaaaagacactttccttgtgatagtgattggctctgaggccatactttgagaaatagtaccttagagagactagtaataccggtacacagtaccctgactggctgatttttaatacgttttcagaagaccagtttgaaggtgacactatttatggtcatccatttttcttgatattttacagtgattttagaatttgaataactcattagaattatataggaattatacaactaaactttattgttagtagtcacttgtgttctgtttcagttgggctgtaaatggaactactagctcagctcagcaaaactaacaaagtatgttttgtttatttcttatatatatttgtaataacggaaggctcctaatccagttactgttttcaggcagtctgcagaactaaataaactacgccaggattatgctaggttggtgaatgagctgactgagaaaacaggaaagctacagcaagaggaagtccaaaagaagaatgctgagcaagcagctactcagttgaaggtgatatattctcacctttatttgtcatttcatgaataatataggcgtattagttcgttttcatactggtatgaagaactgcccgagactgggtaaatttttaaggaaagaggtttaattgactcacggttcaacatggctggggaggcctcaggaaacttacaatcatggcagaaggtgaagaagcagcaaagcatcttcttcacgaagcagcaggaaggagaaatgccgagcgagggggaagactcccttataaaaccattagatcttgtgagatctcactattacaagaacagcatgggggaaaccatgcctatgattcagttacctccacgtggtctctcccttgacacgtggagattatggggattacaattcgagatgaggtttgggtggggacacaatgcctaaccatatcagtaggtatttaatttgatgacttaaatgtgtatataggtttgaaaaatatagtttgaagcttaatgggacctgtagtctaaatgctatgccctgatgaaagaaaaagaagcatgtgccctattgaaagaattgaatataggcttgaatttgaagttaaagaccgtttgaagatatggtaaatgatgttagctgattgacagatataaattgtagaattttatcatatatatgggggttagggtctacagtatagggcagaaatcatgtagttaaaaattacccttaataccactttatcacccatagcttggatttttcagtaggtccagcagaacctagttttctttcagcactggaataggtagtttttcctttgcttcagcacaagactaagtagtgttccagtggcttgcactcgacccatgatgtacaaaaagtcacatactgtatctttagacgccagagtgtcacttggtccagtgagatgcttatactatgaagagatgcatggctttgctcaggctgactgagggaggagcagattcatttatctcattttatatgcattctgaagcatatgtacattgaatagaatgatgagtataattctctattcctgcttttattgaagaggaaatttgttgaaagtatagttcaatttgtgtaagttaaatgctacctcattataatagattcctacctaggtcattgatagaattgtactttgataccagttccagagtaggagttaaaaaggcttcaagagtaattgagtatggaaaatagtgtttttcttaagtcttgttgggagattgatataagtatcctttcttttatttaatattgatcttgctggtgggtttactactggcatagatacggaagtctgttctctgtggatatggataaataaatgacattaaagattatagtcatgattggagtgttgtgttataaaaatacctcaaaataagaatttttagctacttagatttagcaataaagacaccatcctgtcttcggaagcttatcagctaaaggaaggttagtgggaaacaggttattgctaagtggatcagatgtatatagtagtagctatcttgatagaaactcagcacaaatattgagtctgaaataatctccaaactgtaaaccctgtaatgttggaggataggatggctatggctgataaataaatggcttttagactgtgtgtatctgcttgtcttattgaaatgtaggagactagttgcaataagcagttttatgatacaacagtaaaggtagaggatgctttttttccctctttttcaaagtagaaattctgtgtttgtgctaatttatcctttctcccttttaaaataccaaggttcaactacaagaagctgagagaaggtgggaagaagttcagagctacatcaggaagagaacagcggaacatgaggcagcacagcaaggtaaggggaagaagtattcatgtaaactttgtatataattttgggtaaaatttcctctctcttccatctgtgaagaaagtataatttggcattttggttatagctcaataaaaatagcttttatactttcagaatatctttctttctttgacatttgttagggttttaaaataagttacctactagctttgcctgaagcattaaagttgcaggcaaaattatagtacatgataggttaatgggatcctggctgtgtgtgtttcttttctgtagttattctctttggttctttggttaattctttttttttttcccaagaaaatactcacttcttattttgaagagaaaaacagagcattaccatcccaggtagtttacttaaaactgcccatttaatacatgctaacgtttactcatttactcttaatttgatggatccatctgggagataatggagtacgtgttatgtgtattgtttatttctctactactccctttctcccatgaaacgcaagtatagcctgctacaggagcatgcaagaatggaagcaggagagattcaaagaaggttttctagaggagagaatgcctacacgaaagatgagtatgagtaactaggcaaagaaagagacctctgtaaaatgtaatgttttattacagatttacagagtaaatttgtggccaaagaaaatgaagtacagagtctgcatagtaagcttacagataccttggtatcaaaacaacagttggagcaaagactaatgcagttaatggaatcagagcagaaaagggtgaacaaagaagagtctctacaaatgcaggttcaggtattttttcttctttttttttttttaaaaaaatacaggtggtcacttattagatctgtgtgtctagaagagagactaaagtctaccttatcctaattctgaaatgatgatgaataattataactttgtcttttgagcacttgtcacaatatggtgtgtttgaaggtgtgctcacccacagtcttaggctctttgtgttagattaggaatagcacaaacatatctttaacttctgtcttataagctaactcagattgtctaatcattgtttaaaataatgccttttggaatctaagaatgccttaaaaaaaaaaaagaaaaagataaacaaatgtacctataatacattgtgttcatatacatggggttatttattagcatgctttttctctttttggttgctatttatgaaaggatattttggagcagaatgaggctttgaaagctcaaattcagcagttccattcccagatagcagcccaggtaatgatgctttcttattgcttatgattaataacttgcagccatttaaacactcacctgaatgtctgttgagtgccaattactggattaatagctgggagactagtcaatgaatcaacaaatgatgatcctgagtgctaaacacttgctaattatgtacggtgctgagggaaaacactaagaaagaaatccataccaactaattggatgaggggaaggttagagagcttttattatacaaaaatgtccccaatcctgtcacaaaacaaggagagagaattggccaaatcctatctagaatagtggcttatgtattacagatgttcattaaatatcagctagctctggaaaatcctaatatatcagcagggggaacagtatggtaaccatagatcacagattatatttgcaaaatgatcaattgaaaatttgtacctcagtttagtgactcagccttccaaagttttcaagtgatagtgtaagacctgttattctttgatgtgacatacatgtctttataaataatataaagaaaatcaaataaaaacaagtattgtgaattttgagcttcagtttttcaacttgaaaattctgagagttatttgtagcaaaaagtattggcttagaagtctgacatttctgtataaaaagtggtttttaacattaaaattttgtttttaaggttcggagaagttcagactcccaaagctttgaccatataaatatatttttcccagttgctttatctgtagaaattatagtctaaagtaattgaggaagaattaatgcaggaaagggtgctggtgtggatgtgtatgtatatgtgaattaccaactcagattgaattgtgatctttagttatcagctgagaagtagctctaaaaaatttatcaggagttaaatacatagagaatgctgtaagaatcttttaaatagtaaacatgaacatgggtattactaaactatattagtcatggaatggataattttattattaaaagttgttactaaggagaagaaacacaggatgacaaatggcctttctggctgtttttcctactcatttgttgcttgtcaattatttagtttccaggcctgtcaacttgttttattctaaatgtcttgtgatatgtaattcgtgactactggctgttggtgatcaaacttgctttcagaatgatagttactctttattgaacacttaccatgggccagatactttcataacaatttatatacattaacttctcttaaaatttaaagctgttatgattattgtatagctataaagctttctcttaaatacttttatgttgacactatttttctttcttagacctccgcttcagttctagcagaagaattacataaagtgtaagcctaccttttcacactcttataattgtgtagtcaccactaactgatacttgttagatgcgacacttatgattaactttatacctctgacgacctgttcagaaaatactctgaactagatttggagcaacttttgctttttttttttttttttcctttttcccattagtgagttgggtccctaaacattatatattctgcttttatttatgtttttattataacaagagttggggagactttcatttgagtgttagcaattatgtggaagaggtaattgtttagaaagtagtggaagtaaattagtttttgtgtcttataagtagttgtagttcttctgtgtccagctctgtggtagtatacccaaaacaaagttatatgctttttttgtgccgtataattttgcatggacactgatcacttgagttcggaagatctgaaatctggttttgacatagctagctttaacaaattaacctcttttatctcgagttttaaaacagggttatgtattttaaggagttatagtaatgtgtgtgacagttgttagtaaactgaaaggggctatagaaatggaaggtatatgagaactactgaagtaaggatgatgctttttaaggctttaaatccttttgatttgtgacttctgaatgtttattgaatgtacaaatgtctttccttctaaaggattgcagaaaaggataagcagataaaacagactgaagattctttagcaagtgaacgtgatcgtttaacaagtaaagaagaggaacttaaggtatagtaatttgtataaatggctgcaatattttacagaactgaaatttaaattactttgatgcacataatcagtaagtgtatatgaaaaatggaaaatagtctagaattcatttgaaataactgtttttctaaactacaaaattctctagctctctacgaggaaaaattcaaagggcttctctcatgtgatataatttacaataatttgataggaatatgctaaataacaggaattggtggtttctcttgattatttgggaaattttgtaagttgagacatttgcttaactcttttgtagaaaagatgctttacaaactttaaaatcagttgtattaagtattttaaatgctatttttccttgttctaggatatacagaatatgaatttcttattaaaagctgaagtgcagaaatttacaggccctggcaaatgagcaggtagatctttattgcttttgagcattgatctcagaatttcaatttgcgtattcttattttcattgatattgtgagccccaatttgattgtgtaagtaaaaaatataatggtttatcatctttggctgcatgatttgatgttactgtttttatgttgaaataaatgtttgatccagtgaattaatcacttcaagatatcacaggaggcagttaaaattatcttactatgctggtttgtttgagtcttttatttgagccatttaattcaaaaaggatatacctttttgttagtgtatatgaagaatggaaaatagtctagaataaaagaagtaaaaaatatcgaacagcaaaacatgttacagaaatatacagtattgctgtaacttcaaatatatggaaatacagctttttaatatgtaaaaattagtgaaaaaaatagttttgagcacttcctgtgaagtgatatcattttcttctcattccacacacaggctgctgctgcacatgaattggagaagatgcaacaaaggtgactaaagtattgtacatctagtcgttcatacatttatgtttaattataattgttgcagaaaatattgctgcttataactgatagttgtgcccataattcttgtagattttctgaatgtatgaagtattttaattttttttttcaccctcatagtgtttatgttaaagatgataaaataagattgctggaagagcaactacaacatgaaatttcaaacaaaatggaagaatttaaggtgtgtgattaagcttgtacactcaggtttcttagaacaaccttgtatacttttcagttgagtgattccagaaatactacgttttgtatgaagtcactctgaaacagtgtttctgtagtttattaggggacttatgcaaaccatgaattttatcatagactttccccctagattatctgttcttttagtggagcttggagatttatttttggcccccaatcttttctcagctgatagtttctatttgggactgtcttatttgtctccactgttgctgtagttctagtttctggtcatggccaaccaagtgctagggtgcatctctgtgtccagtgaaatttgaattatgtcagtgtataattcacctgtcactttgaggactgaaagctgagataaaggtttgattgttcaaaaacccattcaaatgattgctttattaccttttttcttaataaaacagtaaattgagactctttcttccagattctaaatgaccaaaacaaagcattaaaatcagaagttcagaagctacagactcttgtttctgaacaggtaaggcttttcctaaattacaaagtagaaatacttgttatataacaagatctggttcttcttatttaggtaccaaattactaattgagaaattttgcttaagcttagatatggctgttattgcctttctattcatcctgtatctaaattcaggaaattttttctccctgaggtgaagctaatgccaatctgctcaaaagcacattccagaaaaataaaaatgtgtaataggatgcataaaaataatttaagccattttgatacatttgactttcagaataaatgtcctgccttagacttggagcctcagctttttcttttagggagcatggtgtctttaaaggttgaaacttattactagcacttaaaagcagtgtgatgttgatcaaatagcttaacctttgtgacacctctcattccaagcctttcacatggagattatattatatttacaccataaagttgttagatttgaaaggagaagcttatgtatggtgcctagtctagtgctttgtttatgacaggtatctaaaccttaattcttttcccttagagtatttattttatccatctcatctccatcccctgccaccatcactattcattttatatttatagcaagacatcaaaactatatcagctttgaataagcatggttccataaattagagcccagtggtatctgttctctgcctattcctcagtgctgccttcgtactcttcttctacgcagctcttacaattacaatttattaataaaacacaaactcttgatgacacattagaataggaagtttgcgtttgttcctaatattaagtttttgaattgtacttttattggaagccgaaatgtaaagccattgcaaatgatagcacttctttagcaaatgcatgcgttctttcatttattttaaaattcacatttatgcagatattgagctggtgtaagtagctgtgcctctggaagtattttgttaacttgtcaagaaataatccatttattctacctccccgtatgatattaagtgcattattacatagtcttactacttactttgtatttgctttacccttgtaaactaaaggtaatagaggagacagtgctgaagggatgatatttagtttaaatggcatttaaggcttattcttttttttttttttcttcttgagacagagtcttcctctgttgcccaggctggagttcagtagcactatcttggctcactgtatcctccacctcccaggttaaagccattctcgtgcctcagtctcctgagtagctgggactacaggcatatgccaccatgctccgctgatttttgtatttttagcagagacggggttttgcaatattagccaggctggtcttgaactcctggccttaagtgatctgcctgcctcggcctcccaaagtgctgggattacagatgtgagccactgtgcccagctaaggcttatttttgtcttatttccttttctggtatagcttacaaaaaagatatgataccaattataagatttctctccccccaccctcccttaccatctctgaaataagaatgtatcttgtagtctctggttacagtttagttgtttagttggcaacatttttaatttttactgttaaatagcagtggtgagatataacattggtgacttggattagataaaatgtaatagatttttgtgtgtgtgttcttacttggaaaagcagagtatagtttctgtgtgttagttaccagagatttttgaaatgctgataaccagtgtatgaagttttaaactttaaaattaacttcatggaggtaaaacaaatgcttagaaacttctgaaactgtcctagaattcttatattctagtagtatccaggtgctggcgactcttatttaaacagaaaacttctgttctttgctaaaaatggtattttccatcattagataaaagtaaaaccaccagccttaaatttttcttttcctttaaaatcatgtaataccttgagaaatgccattgtaataccttatgtaaaattcccaatcatatttatgaaagttaatattattgctatcttattaagtcagccttttattataatgtttctacgtacttttagatgttttgttaaagtgacaacttttagtatgagatgtgcttttgttatgaagaataattcacaggataaaattttatagccacattttttgatttatttaaaagaattatttgataagggggaaactcattttgtgatactaatttaagatctgttgggtaattcttagaattgttcttctgactctgaaagctttttattaatagtctagaaagcatatgactgaggttttggttatagttgagacttctttcatcttggcagacaaagaatcatttctgtggcttttcctctagtcgtttttattgttgctgctagtgaaagaagagaaaagattggtataatcttaatttctgtcatttccacttttctttaacccctttctatcccacagtcagaattccaagtgacagttgagagattgaacagtttagttatgtaaaaatttcagtccttttaccccatggatttttattctggaggaaaagattgagcgtataaaagcagaaaccaataatggtgccaagttgttgtttcttcaggtgtaggaagcagaaagacaacaggtaccaagtaagttaacctgttgataccctaaaggagggaaggctgcatttggatttaggcttgcagatggtcagataatgcaaataaatcatttactaatatttcatttactcagaataagactttttttttttttttttttgctgtgggggagcacattttgacttttagtgaaggagcagcatgacattcttattccagtagatttttaagattcagtgatcaagattattaagtgaaaactataagaagtttcttctttttgccctactgccttgttaaattgtattgcagaatatattgtatatggtttagttttggaaatcatctaggggaggaaacagtaggattggattaaaccaataaagtatgaagtaaagtaaaaatgttggaggagatgcaaactaagctgagtcaggtttatgcaatagagtatttgatgagctgcagaccaagaatactttctaaactggaacttcattaaaaaaaattcatcaaatacttatttactagttgagtatatgctagttgcttacctacatgctgaggttgcagagatgaatgagacttgattcttgccctcctaatatggagatagatatgttaaacagaaagttatggtgaatgaagtttctgaactctatacaggtttagaggaagagataatgcattctattaatatttgaaggaggtggggaggtaacacagggaacaactaaacctcgttttgaaaaatgagcatgaatttgccaaagagctaagagacagttcaggctgagggaatacaatgttcaaagacatgacagtgtggcaagattggcatattcagagtattggtatattgcagaagtacaaaatacaggaaggatgtaaggagtagagaaagatttgctaagacctaattatgaagggctttgtatgctgtgtcaggaccatgaacctgatgcagcatgtgggtaagccactaaagagtgttgcaaggataaatgagcatttagcctaacattttagaaagaatactctggtaggtaggagtaactaaaggtacaatacagtaaatggttaaggtgcaggtaacttagacttaatagtgttatgtctttttgtgagatggcattcattgaaaatatagatggacaaaagccatcttcatgaatgatttaaaggcttaatgcatgatttgtttttcatagtataaacctgatttaatgtacttttgacaactcctatttcccttctcatgtttggattattttttcccattgggaagttttttcctgtgcctcctacaaaacaattcttatgaactagaagcagagagaagaattagggtattatgatatttgagatgagtaagctgagggccaaaacttaggcattaaagagaagggtttaatttcataaatatgtacagagtggaattttaggacttggatagggcagtggaaaaattaatatcatttgtaaaaaatgattgtaataagattgggaaaaacaaaaaaatgggaaaaaagtaagaaactagcaagattgggaaagaggtgcacagaagagaatgttctaggagaaagaccctaaatctttttggtcaggctgcttggctgtctgaagataagggaagataagggaatactgagggagaaatcccactttggacataagataaattttaacattggggacttgtgtgtgtaccagaggatgccaggagaagtttcaaaggggactcatcttacatgtcatgttctaatgctttataaatagaatgtattcctgttgcttttgcaatttacaatcagttttaaaacattttatatcttgatctggttggtagttacataatatctatctaccaaaattcactgagctgtgaacaggatttatgcacttgtctacgtaaatgttacaccttagtatagaaaaaaaatcaattaaaagagcccatgtttgtctgtctttctttctttcttcctttttttcctttctttccttcctttcctttccttttccttttccttttccttttcctttcctttcctttcctttcctttcctttcctttcctttcctttcctttcctttcctttcctttcctttcctttcctttccttctctctttctctctctttttctttctctttccttctcttttcttcttttctttctttttttttggacttgcgaggtcttagagtctggattctttgtatttgaagaattgaattaatgtaaaggaagtgaggcagattgtcttaaggttatcttttctagtgattaagatttttttcataagatactaattcattttgccagcccattttacactgctactttttctgtgtctcttgtgtagatgtatctctttgttttgtgttttctgaattttttaattatcaagtcttcagataagttattgtcctaaattttgtatctatttaataaccctaaacaattttcacaaaattacatttctcatctggttttacttcatgcaaatttggtaaagttaaactttttttggtgatttttattttagcctaataaggatgttgtggaacaaatggaaaaatggtaagagtttagttttctttttatattttgatgagttacttctaccaaattaactacattaattagagttttaaaattctctttaaactttgtaatggaagaaatgtagtatgctgttgatttgggattacattaccgtttgtgggtttcacgtgtggcagtaattttacttgttgaggctagcatataagaatgaattacttgagtacattttacttgtaaagaggaagtatcctcagaccatgatcaaagatccctagaagcctttctagaattaaaagtttataagaaatgatggacaaaagagttgatccatttaaaatgattagaaataatatcattaactgctgggcgtggtggctcacacctgtaatcccagcactttgggaggctgaggcgggtggatcacctgaggtcaggggtttgaaaccagcctggccaacatggcaaaccctgtctgtaccaaatgtacaaaattagccaggcatggtggtgcatgcctgtaatcccagctacttgggaggctgaggcaggagaatcacttgaacctgggaggcagaggttgcagtgagccgaaatcatgccattgcactccagcctgggcgacaagagtgaaactctgcctcaaaaaaaaaaaaaaaaaaaaaaaaaaagagccaggcatggtggctgatgctggtaatccccagcactttgggaggccaaggcgggtggatcatgaggtcaggagatcgagaccatcctggctaacatggtgaaaccccatctctactaaaaatacaaaaaattagccaggcgtggtggcgggcgcctgtagtcccagctactcgggagggtgaggcaggagaatggcatgaacccgggaggcggagcttgcagtgagctgagattgcaccactgcactccagcctgggcgacagagcgagtttctgtctcaaaaaaaaataataattataataataatatcattaactttgaaaaatagttaatacatgtgttacaaatttataatttcagcattcaagaaaaagatgagaagttaaagactgtggaagaattacttgaaactggacttattcaggtggcaactaaagaagaggagctgaatgtaaagcattttgtagttttgttttccttgtgattattcagtgacataaaaggatttctctgtaatttgtgtaaggtttttcccatagatcttaaacttaatagtacctctcacatttataaatttatataatgcttttttaattaaagtttttttagaagttaaaaatgcataacattgactgccttaatgaggtagatactattgttatagtttgtcagtttccccacttgcaccaaaattataaccaaatgataactagcagacttaattcatgaaatagtactggaggccagagaagagattgccattctattttatggttgtcattagctttacctaacttgattgggaaaaggttgcgggaagaagtaagttaaaagatgtatttgaatgtagggagaggagtagcttaactaacaagttgtatactgtatatttttgaggttgtccagacatgagtggaaatatatgtggatgtaattgaattaaaaatttgtttggatagctatagaagttacagaattatagacattacagaattatagacatggaaaaaagtgagagttttgggccttccagagtagaaaagaagcagctaaagaaatgagaaactaatgtattttgaagctagctatatttttcagagagtaaaatcatgttttgcttatgtgtctttgaaaaaggcaataagaacagaaaattcatctctgacaaaagaagttcaagacttaaaagctaagcaaaatgatcaggtaatgtaaatttttacaactgttctttgtctctgtgttttttgtttgtttgtttgttgtttttaaattaaaagaaacggggtcttgctcttttgcccaggctggagtgcagtggtacaatcataactcaccgtaacctcgaactcctgggctcaaccgataactcctccctcagtcttctaagtagctaagactgtaggctcatgccacaatgctcggcttttattttatttttttgtagagatagggtctcgacatgttgtccagactggtcacaaactcctggcctcaagtggtgctcccaccttagcttcctaaagtgttggaattataggcatgaggcactgtgcccagcccattctcttttaaacagtgggcaaactgttgcataaaaacaagtctgttgtttctcttcctccaggttggaatatgtcaattatagttttaatttatgaatgataatcagtaatagaggctgcaatttaatactgattgccaggtactgtgacaaatactccagatagggtgccattgcctcttactagagtgataaaaaggttctaagtatacaaatataaagtaagactctagtaaaagaggccgcctgaaattaggcagtttcttagttgtgttttctctatggttggaattattgattaaataattttaacatttatctaatgattttttcttttggcatatttataagtgaccttaaagctacctatgttcaaaatgctatttgttgtcattattatgacattaaaaaagtctcgaaagaatgcctgggcttttcccatttggattttgattgtattggaaaatctaaggataatgtgcatttctatttctgacccatttctattttgaacaaattactaagtaggatactttcctatttccaggtttcttttgcctctctagttgaagaacttaagaaagtgtaagtgataacattattataaactggtttttcttctttggtccattttttttttgtgtgtgcttagaaatctagttttattgtgcagttgggacagctgatgtatgtttaactttcactctataatttttcttaatggaataagagaacttagctgtgctttcccaaattcagtataattaaaaaaaaaaaaacaaaaaaaaactatttccagaggatgggagtcagtatagttgaatggaacttgattctcctctgtattcctcagggtacaaatcttatatttctgatgtacttctgaagcacttaactgacttcttgtgtgcataggcttcagctgtctgttaggaggagctttatgttcaccctggccattctacaaagacatgttgctattttatttaaaatgggaaagggttgatttggagagccatttcattatttggtgctatttttatatcttggtgggtcttggtgatttctaatcaaattatactgcatttctttattgaaggatccatgagaaagatggaaagatcaagtctgtagaagagcttctggaggcagaacttctcaaagttgctaacaaggagaaaactgttcaggtattgggagacagagaactgtgttttatgtttttgtttatcaactttagttaatatcatttaatttcgtgtgtttttgtctgtgcattgcattttatgtcaatttctgtgtttccattgtccaatcttgtctgttttgtcattgtcaaggatttgaaacaggaaataaaggctctaaaagaagaaataggaaatgtccagcttgaaaaggctcaacaggtaaaaatcccagagccatagcatgacagatttattagttgtgttatttatgagctatttgattttttttcttgttactcagaaaaaacttagtatgctgtaggtatattgggttatgtgcttttaattttattttttgcctgatttgagaaagtattcttgatattttaatctgtatatcttaaaaattttaactgttaatggttattttctagaacattttttgtgttaatgtttcattttagtttgccaattacaaatgaaacacgaaacagtttggcaatttttttaatccccctgcccccttctaaaagaaaactgcatggaccaaaatgttatttgaatatacattgctctatctctgccttagaacaaagtacaagtttcattgggatttcagacatagatgtgattactggaaattgatgagttttgctgattttaatctgataaggctttcttgaaaaaatagtgagatttcattgaagagatgattcattcatctcatagattcattcagcaatatttattgtcaaagcagtacttgtcaaagcactgtactcgtgattggtggatcactagctagtgattggagataatgtgttgaatgaaacaggtaggatgaaaagatcatacttttctaatatagattgagagttcaggaaagtcttctcctgaggaactgacatctaagccaagaatctgaagggcctgtgagaagagagtggaggataaaaggtattatcagactgtgtatgattaagaaaaaattaaaaaaggacatcatagagtactgttgagtagttggccttgaaaactgggatggagaagagctctgatacagtagggaggtgtgtggagagttaatattctaattttcagtactgtagaagtatgactggtctgagtgcagtggtgtttacaactgattgatcacaaccagttacagatttctttattccttctccatcccactgcttcacttgactagcctaaagaaaaaaagcatcacattagttagacttattattcataactattttccttgtccctcccccttattatttttagtttattaattttcctgttattggagtcaagaggaggtaaactcaaaacacatctcattttgtcatgaaaaattcagctagtttctttgtaatttgaagtgtacacattataaagacttataaagcttaataagttaaattgaaaggattattaattgatttttctgtcctttgtatttcagttatctatcacttccaaagttcaggagcttcagaacttgtaagtaccatttatctcatttccttttactatttctttttcatgagttaaatagaagtataatgaaaattatagcttcttgatttcaagtggtgttttagaaaatacgaaaatactgattatctcaaaactcctaagggccctaagtttcttatttggctttaacctattaagtttttttgtgggaaggaggtaggaagtcttttcatgatttataatctgaatataacctcaaattgagatgttgctctttgcctattttaatagccatgtgaaattggtatcttccacatccagatcaattgtagtaagttttccaaatttgtttgtattgacttaaacaaggtgatacagggtagaggtacagctaaactaacttactcatgtctggatattcagtgatagaatggttttccttaatcatcctatgcttcctgatttgattgtctccaaaatcttaaatgcctttttttttttttttttttttttgagatggaatctcgctctgtcgcccaggctggagtgcagtggcatgatctcggctcactgcaacctccacctcccgggttcaagtgattgtcttgcctcagcctcccgagtagctgggactacaggcgcgtaccaccacgcccggctaatttttttgtatttttagtagagacggggtttcaccgtgttagccaggatggtcttgatctcctgaccttgtgatccgcccgccttggcctcccaaagtgttgggattacaggcgtgagccactgcgcctggccttgtatgcctttatacttgataagttttagtttagttcaatcagctggtctgtgagtactacccaaaatatacttttttcagtgtctaagatttttgctttttatggtcatgtaacattttcatttagagttctgattaatttattatcagattaaaaggaaaagaggaacagatgaataccatgaaggctgttttggaagagaaagagaaagacctagccaatacagggaagtggttacaggtgagaaattaaaaacaataaaaaatagcctttttatacttgactatcaatttaatttacacctattctttttaaggatcttcaagaagaaaatgaatctttaaaagcacatgttcaggaagtagcacaacataacttgaaagaggtatagtataaacaaattaccaacatgttacataaggaatgataaatctttgtttaaggcattagaaagtaaagatgttaatatgttctgagtttctttgccagaaaaattatgttgtaccatagttttgttgttgtttaaataagttagcttttatttctggcaagtcatacttaactgcttaatctgtcaacctgagcctacaagcatttccttatctctaccttttcaaatagactcttagttcatccttaactatctgtttaaagtattagtctttaatcttttaataagtatgaaaaattgtttaataaaactcattctgtccttgctttataaatgacccaatcttaaatttactgcatataattatgtttttgtttttattggtgggtgattccatatatatgttttagcacctacaacataacatttaatgctaacagcattaaaaatatgattctgtttctcaggcctcttctgcatcacagtttgaagaacttgagattgtgtaagtatgctttaagaccacattttgaagagaaacaaacgtctcattattttccagggtgtgcttgaatataatgatgagtttcctgtacatcattaactttattgttaagtggaaattataattccagacgcaaataggctaagtctctgttgggtaaaataaaggttatttaaatgctttcagatacctggagactttatcctttccaaatccatcaaacccattttttcaattattctttctgcaaatataggctggttttaagttattttttaaaacaaaatatgcaattattatagagattaaacttatttcaaatgaaaattagtatttgaattagatgttagtaacatctctgaattaaccaaaagataatcttagccataatcttgataatgaattttaaacctttctgtaattttaatttatttatagggaaaatggaacttgtcatattatcctgtgctgaataggaaaactgaatctagtcagcataagaggtgtcagtttctgtagatattaatcttagaaaatgttttattctagagagtctgttgtcttaaggtacagcaggttacaatggtgggaaagggtatctggacctgatctttttggccccctttaaaattgcttttaacaaatttttcttggtgataccattactctttattgatatttgttttaaagaagtgccccgttttaaactgtcaagatattgaggatatttattaggttattatctttctaaaagggagattactctgttcttggaagattactcatttgtacaattattgtttgtcttttggctatggtgtaactgtcgaggtgcttatctcttatttgcttggaaagcttagggcctcatttctggcctgtttatagtagagatatgtagaccattaaagtaggtaattttaggtatatttctgccttacattttttttttttttgccattttcttttttaaattaatagattttattttttgtggtggagaactttttatatttataggaaaaagagaaataccaattctccctattaacatcttgcattagcatggtacatttgttacaagtgatgagccaatagcagtacattgttatcgttgttattaactgaagttcatagtttccattaggaaactatgtgggttttaacatgtataatgacatgtatctatcattacagtatcatacaaaacagttttactgccttaaaaatctcctgtgttctacctgtgtatccctccctcccttcctccacatcccggcagcaccccccggcaaccaatgatcttactgtcttcagagttttaccttttccagaatatcgtagttgaaatcatacagtatatggcttttctggtttggctcttttcttttctttttttttgggacagagtctttctctgtggcccaggctggagtacatggagtgcagggctgtgatcatggctcactgcagccaggacatcctgggctcaagcgatcctcccacctcagcctttcgagtagctgggactacaggcacatgccaccatgcctggctaattttttagaaacagagtctccctgtgttgcccaggctggtcttgatctcctgggcttgagtgatcctcccaccttggcctcccaaaatgctgggattacaggcatgagccaccatgctcacccttggattgccttcttttacttagcaatatgcatttgagtttttccctttttatacatttatctcactcttcatgtatgctgttttgtcatttttttcatatagatttataagcatcttgaaattctggatcaaggtgtggtaaaaataagtgttcagctcaacgaatacttgagactctattatgtgctttctggcattggggataccgaaatggataagatttcctatcctgaggaaacagttaaacacatcattttgatggtggtgttatgctagcggtctattgcttaggatgaccagggcaattgagattcacttgggctagatagagtaagatttacgtcagcattgggtaagggaaaaacagattaaattatccatagcatctcttcagtacaaaggttagacatattttgtaatttccagggtcaacaaattatgactaagattcttgggggcaaaactccttgcttttgaagtggtaatttttgcaacaatttgataaaatatagttttgttcttagtttttgttttagagtttcttcctagataaagccacatttgcttaagaaatgttaagtatgactgagtagaatgatcctagaaatatctttttaaacaaacttctaagttggtataatatgggggaaaaaaagctggtatgtattgtttctgccatcttttttcttaggggtgatattggagtctggttttccttttttatgtactttagttaatgcagatctttgtaaaaaattctaggttgaaagaaaaggaaaatgaattgaagaggttagaagccatgctaaaagagagggagagtgatctttctagcaaaacacagctgttacaggtgaatatggtgacttaaaattaattattttgtaaattattgtctttgcatgctttaaaataatttttaactgctgccaaaaaatagagtacagaatgagtctccctcccacccagatactaggtgtcattattggcatgttttttgagtaagtacccatgcataaaatgtgtgtatgtatgtatacttgtttattaaatactctgttgaactatactaacttgtatattttgctttcttcacaattaacagtgttttcaagatctttccatataaagcacatttctgccttaacttttaatagttttatgatattggatggttatatcatttattttatttttatttttgagacagagtcttgctgtgttgctcaggctggagtacagtggcgtgatctcggctcgctgcaacctcctcctcctgggttcaagccattctccttgccttagcctctagagtagctgggactacaggcatgcaccactatgcccagctaatttttgtattttttagtagagatggggtttcagcatgttggccagactggtctcgaactcctgacctcaggtgatcctcccacctcggcctcccaaagtgctgagattataggtgtgagccaccgcagccagcatatatcatttatataaccaattccagttgatggatacctagattatttagggctgttttttctgcacaaacagtgcagcagtgaatatccttgcacatgttttgaatacttttactagtgttatctgtatcctagaagtgaaattctggatcaaggcttatgtagcttttttgtttgttaaaagagatagttaaatagaaaatcaatatcttaccttcatgcagttagtattcaacttacttacagaagattgatttgaagtcatagcaaatgtgtagatgcctacattgtcttggattaatcttgctcacattacatgcttcaaggtttgagtctaccacattccttctccctctcatgtaggttcattttaaattttgttagacaatgctagatagacctgcaaaagtgttttcactaattgacactctcaccaactaagggccatttcaccttcttcctttccaacattgacaaggataaaaatttttgatattatacttgaaagatggtaagattatttttaatttgcatttgactgcgagagaagttaagcatttttcgtatgttcaagccatttttatatgaattgtcctttaatttttcccacactttttccactgagttgacgttttttttttttttactaatttgtaagatcctttttatgtaataagggaaattaaataaccttttgttattatatgaggtgatttattttccccattttttcttctgacttcatttgtgtttttcccctttttgggaaatttgaaacttttatgtactcaaatataagtaatttctagagttttaagtctctggaagaaaggtatctctctacgatcataaaaatgtattcggctgggtgtggtagttcacagtagtaatcccagcactttgggaggctgagacaggtggatctcttgaggtcaggggttcgagaccaaacatggccaacgtggtgaaaccccgactctactaaaaaaatacaaaaattagccgggcatggtggcaggtgcctgtagtcccagatactcgggaagctgagacaggagaatcacttgaacccgggaggcagaggctgcagtgagttaagatcacaccactgcactccagcctgggtaacacagcaagactgccatctttaaaaaaaaaaaattacattttcttctaatgtgtttataattctttttgtttgtttgtttgtttagcttatttagtgtaacttatttcagtaagctgtaacaataacattgtaaccattaaaaagagaaggctagccacattattaaataatccatcataacagtagtaattccgttccccagggggacatttgtcaatatctgaagacatttttggttgtcacagctggggcaggcgggctggggcatctagtggatgggtgccatggatgcttctaaatgtccagcagtgcataggataaaacccccacaacaaagaaaaatatgaaacccaaaatgttactagagttgaggttgatttgaaatgtcacttcatactaaattcttagagctatttcggtatatttctggattctattttgttccattgagacatgcaaactccgcagctagtactaatataaatactctaatttcatcatatgttttaataaagagcttattacaccctttaaaattattgctattttggaatttttctagcttgtatgatctgtttctagcttgtatgatctaagtttatgtggaaaaaatctgtttagatactgatgtttaatttttatttaattaggatgtacaagatgaaaacaaattgtttaagtcccaaattgagcagcttaaacaacaaaactaccaacaggtaggtattattagatgtcttgcctttcacttacgtggcaaaaaaattatataaccagtgacatatgagtatttttgccatttctgcattttcattgagaatgaagtatgttttatttatgtttatcaaattttatataaaagaaagcaacttgctatgtcatatccaaagtaaaacaaatctataaagtatacacaaataatattattgccggtattccagctctgttttgtattcatgtgtgttttctgatcctagaattcttagcaagtcagtttaaatactgtagaggttgggttaaagatatgtgtacacactcttatctcccctcttcccaaatgaaacattagtaactggagagaaactaacaaatgtatcataagcaatagtctactactatttaaaagaggttttcaagttataattctgcttggtaaatcaaaagtgtgtttttataaaagatgctacccaaaatagcctgtaaattaatttatgcatgtatatggatagacttgatagtattttgagaaacaaatgaattggagtccttgcaaacaagaagcttgagagattattgtcaccaaggaataaataccatatatgaagggctgtgtacctttgcatgttgatgtataaataactttgttaaacgtgaggaaacataacttgtcctagttttgcttttgatttctgttttttttttttttttttaacttggaagcttaacagttttatgtagtcaaatttgaattgtgcagtttgaaaatgtaaggtgtgcttccatgcacatagtgggaaattgataaatacttattaaatgaagagttcaagtacgttgcgacagtagagattggatttagcattccatacattttacagatttgtacatgtttttattaaaatcacttgattaaagtcagggttactggcatatgaaatatatactatttttacttttgttgttttcttaatttatatttgagaaaagcttcaatgtttttaagtctcctgaaaagttttgttctgaaataacatttaactcttttgataggcatcttcttttccccctcatgaagaattattaaaagtgtaagtaataagtttgagtcacagtttataaagtcgtaactatttttatgtggtaaaccattctcaaataagcaatttagtgtaactgcaaatggcacctgatttttacagttctatttggatatcttgaattgcagtttagagttgagtagtacctttggctaagatgctttttttatggtatttggatttgaatattttgttgagggagatgtttgtttttgtttttttaggcattcagaaaacatcaaatcaagttaaactatactttgcagggttttctaaatcaccttctattatgtcagttatcttactgggtcttctttcttctagatgtgattgtgtaattgaatgatgcaaattttgtcttagcttcatttttta

SEQ ID NO: 3536 - DNA, 1149 bp, Homo sapiens
ttatgaggcacttgagagtgtggttaagatcctgagctctggagtcagacttcccaaattccagtctggactctgccacttgcagctttgtggccttagataagttacttagcttcagtgactcagttttcccatggctaaaatgggaatgatcaagttttgagaattaaatgctagtgcatgttaggtgctataaatagcatataataactgctgaaaagtgtaaactattattgtaattattagtaagaaaatgtttaattattaattttttatcattgacctttaaatatacttgcttcagttatattttaaactttaaattattaacaatttgggccccatgctgtgtagcaggaggaactactgttataccacttaaatttttttcctagcttctttcttccaccagtctcaactttcattaataatagtttttctgtttgtcagatacttgtaatatttaacatcttttctgtgattataattttcatgttttagttttaattttatagtttaatggtgggtccagatctcaatgttagtacttttgtcatagcttctttattcatctcttggttagctgaagttgtttttcctgggattttgtcaaaaaattttcgaaattttggcaagttaacatgcttttcttgtatttgtactcaaataatagtttggtggggtataacattccagaatttcatttttttttccttgaaacattttatgcatttgttgtttcactgttctctttattcatattgctggtagaggtctgacgccagcctgcattttgcacccttttcatgtatttttgttaaactgcactctcacaataaaacattctttgaataatcaatcacgtgtttattatttactggatttttttcagtgtctgacctactctacacacatcaagggattcaatttctttggcattcagtaattgtactataatatggcttgacattgactgctctgttaaacttcccttggacacagtatgccttttcagtcattagattcaagttagcttttattactgggaagttatatataatgttcttgaaataagtaaaataatggagatcagttaaatacatatgggctctccactgcctaccttcgttgtcttttcatatctttaac

SEQ ID NO: 3537 - DNA, 3327 bp, Homo sapiens
cgcgggatctcgagctgggatcgccctcttgggcttcggtgcgatcggcggcgggaggtgagagtgggcccggcgggctccgggaggaggtggccccagggaaggtgtggccgcggggaagtggcggcgaacagccccgacgcgaggacggggaaaccaaggcggcagccagggagaccctgaccgaggtgacctctgtttagggcgacaaccgggttggggctccccgcagtggccactggcccggcggtcccgcacccccagcccgcctctcctccaacaaaagaatccaggaagacggtggggcgggcgggaggcccggtgtgcggtggcctggcccccctactggtggagaggagggagcgcccttccccagacgcgggggaggggaggggtcatggccccacgggctgcccaccccctccctgtgccccagtgctgggcccaggacccccagtgaggccactcctctggcaaacatctgtgatctcttcccccttcctgggccccccctactggaatggcgtctctccccatccaggggcctggcttgtttttctccataacccttagcattaccggtccttatgttatctcttatttcactaattattctttcattaatttattagtatttattttgtttgcctacagtgtgtttccccctgtgggaatgtaggctccaggagggcgggagacttcgatttgtccactgatgtatccccattaattcaacagatccctcctgagggcctctctgagccctgcacggtgctgggtattggggttctcctgggaacttagctgagccccaccctagacattctggggctgggaacagtgctgtaaacacatatgacatcgtcgtgggatgaaggaaacaaaccagaaatgggggggtctactggtcaggtgaccttaggtcaggccaccttggtggtcagggccaccttagatgatatggtgatcatggaaggcctcccagattaggtgacttcagttaaagccaggaagtgctagaagggaaaagctaggaaccatgagggcatgtgtagctctgacctggactcaggcagggagctggggtctgaagagtaaaggtcaagacaaggggacccatccccttaagctgctcaggggttcctggctgggtggatgggtggggggattctcaggggtcagggaaggcttcccggtggaggctgtggtttcattaggcctcgaaggtggagtaggagttctcattctttgggataagctgactgggcttgagaattgttttgcaggttccctgggaaccaggtggtcgaagggctgagctgtgtggccagacaagaggtccctgccctcccccagtgagccctgctggtaagtgggtacagtgtgagggatttgggagacgaagctctgcgtctcattggccatgtaaccttgggcaagttcccctcactgcgctgggccttggttttccatgagtaaggacagctggactaagtgccgttcatgatgctgggggcacccacattcaatggctgtggttagctcttctcagctgtaccctgggtttgtgccacactcttgtgtacagagtagctccccatctggccctgaaggctgcagattgagacagaaaaataatgttttatctgaggaattggagcccctttaaataatcaggcccagacatactgaaacgcaacagctgtcaagtcttactcctcccttgagctaaagaattatctctttttctttttttttcttttcttttcttcatgtcagatcggtaatgtgcctacatggtaacaaggttcgagggtggcacagctcacacatgcatgtgaacacccaatcatcacgctcatgaactacaaaaggatcaagaattacctcttgaagccacttgctatgtggctctagagtgacaccaagtagccataaaatgctgtacactggacaccctatagttcataccctatagttcaacaatgtatagccaatcactaatcaatgttatttctttttttttttttgagatggagtttctctcttgtcacccaggtggagtgcaatggcacaatcttggctcactgcaacctctgcctcctgggatcaagcaattctcctgcctcagcctcccgagtagctgggattacaggcacccaccaccgtgcctggctaatttttgtatttagagacggggtttcaccatgttggccaggctggtctccaactcctgagctcaggtgatccacccacctcggcctcccaaagtgctgggattacagatgtgagccaccgcaccccaccaatcaatgttatttctataaaccaaggagaattcctgccaaacaactttgtcatccttgcccccttctgcctataaaaacctgtaggaaaggcccaacgcagcacaccccacggcaacttagaagtttgttctgggcagttatccttactctcgctcaagtaaactctttaaagttatatttgtgcctcagcttctgcctgtaggtcaataagattcaacagctatatgcaaataagaggccagtagaggcccaggagggtcatggaaaccctggaagcttggcctcagagttggagttgagaggaccccagatgaggggatagtttaagcacagtggtttcgatgggtctggggtccatttcagctcagctggggcctgtttctttggattttagaaagccgtgcccaggtcctgccatgcctcctgtctgatgcaatctcgttattcttttctcgaagtccgccagtgtccagttttttttgcatgatcctcacgacatccctttgagagaaaaggaaggaaagacgagcccacttctcaggagactttagggaccttagggacacagcaagcgagtaggagtcccagggctggggtccaggttgcctctggagccggtgctgttccccaggagggcacggaaccacctccctctctgatctgctgccatctctcttgcctcacagttcccgtgggagccatgaagctgaacgagaggagtgtagcccactatgcactcagcgactccccagcggaccacatgggcttcctgcgcacctgggggggcccagggaccccaccgacccccagtggcactggccgaagatgctggtttgtcctcaagggcaacctgctattctcctttgagagtcgcgagggccgggccccactgagcctggtggtgctggaaggctgcacagtggaactggccgaggctcccgtgcccgaggagtttgcctttgccatctgctttgatgcccctggagtgcgcccacacctgctggccgcagaagggccg

SEQ ID NO: 3538 - DNA, 135 bp, Homo sapiens
caggttcaagcgattctcctgcctcagcctcccaagtagttgggactacaggcgcacgccaccatgcccagctaatttttgtatttttagtagagatggggtttcaccatgttggccaggatggtcttgatctct

SEQ ID NO: 3539 - DNA, 768 bp, Homo sapiens
ttatatataatatgtgtatctctgtaataatagagcccttcttttgaatcaaaattacatatggactttggaagattgctcctatttcaacaaatagttgctgcaagaatttttaatatgactctataaaagctctttagtacaattgtatggtttcttgatgattctgttttgcaataggtagcctagttgctttatatgctttaccttctaggtcttaaaatcacacattggaaaatgacaatatcaacaaaactgtattcttatgaaaagaactatttgttacaatgagaaaggttttgtgagtaaaccctactggacagtgacataaaaggcaatggaattttctataaacattttctcatgtaaacatgctgccaccttttcttctttctcagagaactcaaatttgctatagtttgtcatttttgcttacaaataatataacttttcaaccttctagttatatttatccaataaagtcataatcgggattccatttgtgtaaaaactagggtggtaaccggaaaaaaatattgtcagtatttcaagctgtgttcctttcttagtttgatatggttacttctatgttgaaataaaatttaaaatcacatgcaaaaaaaaaatcagcaaaataataaaatgaacgaaaaaaaatgacacccagggagttcccaaccccagtgtaaatgatatttaccagtgatctagcatatgtaatcttttttaaaggtattgttaataaatattctgtcatttgtaaagata

SEQ ID NO: 3540 - DNA, 768 bp, Homo sapiens; identical to SEQ ID NO: 3539

SEQ ID NO: 3541 - DNA, 768 bp, Homo sapiens; identical to SEQ ID NO: 3539

SEQ ID NO: 3542 - DNA, 768 bp, Homo sapiens; identical to SEQ ID NO: 3539

SEQ ID NO: 3543 - DNA, 768 bp, Homo sapiens; identical to SEQ ID NO: 3539

SEQ ID NO: 3544 - DNA, 768 bp, Homo sapiens; identical to SEQ ID NO: 3539

SEQ ID NO: 3545 - DNA, 768 bp, Homo sapiens; identical to SEQ ID NO: 3539

SEQ ID NO: 3546 - DNA, 384 bp, Homo sapiens
aatgcacttgacatgtacagtatgtttcccatgccgttgtgattttgacatgtacagtatgttttcatgccgttgtgaattttgttgttcaacccaacttgagatggtttcaggaatggctgcaatctcaaaagctcaatgtactgcccaagaggcaccttgtgcaatattcccatccctgaatttagcattgtacaggaagattttcttttcactcaactgagttagcattgtctttgtggtagcattatcttagacattaaatttgaagtaacatatatcctgtagtaacatagacccaaagttactatagtcaaccaagtctttcaaaggataaaagatcattttattatctttaactgtatctattttgaatgtaaattt

SEQ ID NO: 3547 - DNA, 384 bp, Homo sapiens; identical to SEQ ID NO: 3546

SEQ ID NO: 3548 - DNA, 384 bp, Homo sapiens; identical to SEQ ID NO: 3546

SEQ ID NO: 3549 - DNA, 384 bp, Homo sapiens; identical to SEQ ID NO: 3546

SEQ ID NO: 3550 - DNA, 384 bp, Homo sapiens; identical to SEQ ID NO: 3546

SEQ ID NO: 3551 - DNA, 384 bp, Homo sapiens; identical to SEQ ID NO: 3546

SEQ ID NO: 3552 - DNA, 384 bp, Homo sapiens; identical to SEQ ID NO: 3546

SEQ ID NO: 3553 - DNA, 980 bp, Homo sapiens
tggacatcttttgttagagttatctttttgttttttgaaagagtgtcactctgtcacccaggctggagtacagtggtgctcagtgcaacctccgcctcctgggttcgagcgattctcctgcctcagcctcccaggtagctgggattacaggcgcccaccatgatgcccagttaatttttatatttttagtagagacgaggttttaccatgttgacgagggtggtctctaactcctgacctcaactgatccacctgcctcggcctcccaaagtgctgggattacaggcatgagccactgtgcctggctgatttttttgtgtgtgtgtgagacagagtcttgctctgtcacccaggctggagtgcagtggcacgatcttggctcactgtagcctcagccttctaagtaggtgggattacagaccagtgccaccacacccagctaatctttatactcttagtaaagatggcttttcaccatgttggccaggatagtctcgaactcctggcctcaagtggtctgcccaccttggcctcccaaagtgctgggattacaggcatgagccacagtacccggccctgtttgatttttttagtgctattataaatggaattttataaaaatttcagtatttgatttttccttgctaatttatagaaatacatttcatggctggatcgtgcgctcatgcctgtaatcccagcactttgggaggctgaaggaggatcacctgaggtcgggagttcaagaccagcctggcacaagatggtttagtagaaacccacatctctgctaaaaaaatacaaaaattagctgtgtgcggtggcacacacctgtaatccaagctacttgggaggctgaggcaagaggattccttgaacctgggagtggaggttcagtgagccgagattgcgccattgcactccagcctgggcgacaaggtgagtctctgtctcacaaaaaagaaaaaaaaaaaaaaaaa

SEQ ID NO: 3554 - DNA, 451 bp, Homo sapiens
atcacttgaggtcaggagttcgagaccagcctggccaacatggtgaaactccgactccactaaaaatataaaaattagccagacatggtggcgggcatctgtaatcccagctactcgggagactgaggcaggggaatcacatgaactcaggaggcggaggttgcagtgagccaagattgcgccagtgcactccagcctgggcaacagagcaagactccatctgaaaaaaaagaaaaaaagaaaaagaaaaatctttgcctaacccaaatcctcctatgttgtttcctagactttttttttttcttttaaataagagaccaggtctctctgtgttgccctggctagtcttgaacttgtgggctcaggtgaccatcccacctcctctgcttcctgcatagctgggactctgctctcagttatcctaggctttcttttctgtttttgaaagagt

SEQ ID NO: 3555 - DNA, 239 bp, Homo sapiens
gcggatcacctgaggtcaggagttcgagatcagcctgaccaacatggagaaaccctgtctctactaaaaatacaaaattagctgggcgcgtggcacatggctgtaatcccagctactcgggaggctgaggcaggagaatcgcttgaacccaggaggtggaggttgcggtgagccaagatcaccccattgcactccagcctgggcaacaagagcgaaactctatctcaaaaaaacaaaaa

SEQ ID NO: 3556 - DNA, 4236 bp, Homo sapiens
ctgagcactagagagagcgtcttgtggctgcggcctgcccctcagcctcctccgcgcggttacccctgtacccgccgccatccgtcctggcgctccggatgagtcaatgaggggcagggcccgaggagtggtcttcccaagaacccctggtggcctcccaaggccggtgctgtgtacctcctccccgacaaaaggggaaactgaggccccgaggggagtgggaagagccggctggacgtcaggcccagccgctggtgcagtggtccgtcccctctgccggggtgggcccctcgggtttcgcgtgtcctcgggaaagagactggcgggtgagccgcgccctcggccttcgctgggctaagccgaccccatgcagacgtcaaacccccctaggtcggcacagcctctctgcggggaggcttagtgcccccttgagaaacggcttggcaacgctgtgcccggggccttgcacgcgggctgagggggctagagacctcgcgacttttactcccccgaccccgatctccgactcctgactttggaagcccccaaagctgcttttcggttgcctacaaagtgtcggtcattgtgccacgtccttggaaccgtgaactcattttctcctcaataacctttaaaaagtagctgtaaaacctccattttacagaccagttggctgaggtttaaatggaggacgctcccagggccccagaggggcgaattccagactcctttgccaggaccttgtactaagccccttccctacgcttttccctgcctaggcctcgtgggctgtgcggctatcctggagacagatgacagctctcccttggatggctttgctggttccgcaccagccagcgcccccatttttcctgcagcaccctgatctgcactccctgaggggctcccactgtccgcggtgtgaggatgtccctgggtaagtggtgctggtcatgagcactttgggggacccttcaaattcccttctgggggaccccagcggagggcatggtcatgaattccgagaactgtatggcaaagccgggtgcagaggagagcctggctaagttctttcattctcctgagcttgactttctgtaatgtagggaaactgcgaaagctctgtaagtggggagatcttgcacgtttttcttgcttttgaacccatgatgtctggctacttgtagatactcaatatttgtgggatgaatgaacaatttaagccttttttttttttaaccagaaattggtcttctgtgactttcttgatgggggcagatgagatctttgtactgcattaagtggatagcgctcaggtcctttgggcttggcgctttggcaatctccaggcagctcactttggcctctgttcctggatcccctttgctcttttctgcgcctgcattcgtaagtgatcacgggctgcccgtgtcctggtcattggtagtgcaggcagaggaaatgcgggaaaggttgctgtgtttggagggtccacatcttcaccctcctgtcccaggagctttcctacactcctccttctcaaagctgcacacacctggggcctccaggggattgggggctgccgtgtgtgttatatcatgattagagctttcacttcctgctccctgctgttgggaaccaggctgtgtgtgttgcttaaattccccttgatgaccagcagagtcactgccactcagccatggcacactgctgtaaacctggttttgatctcctttcaatcttttgctgattaactacacattgatcagtgttggccaccctcaccctgccatagaccatccgctgtcttcctctgtagagttaactattttctcttttatgaggaaatagtgtgtttgcttaggagtgtttactgtctggtaactactgtgctaagccctttcctgttgcctgccatccctgctgcgagcagggacaagctgggtgctcactcatggcatcttatctgttgcagatagtccactgtgtgcagaggcatgggagttgtcatgttgggaacatgctagacctcagtatccttgaggtaagatctctggttcattctctggaatgttggttccttgtatctagtacagttctgtacatgttcccaggggctttggggttggtgtaggggagctgagaggtgagatgagaatggcactgtgggtccccagatccgctgtccacccagccaacccagatcacctctggcctttcctgtgccttccgggcttgctgctggggggaaacctccagagtcccactttggtaataagaggtctctgccctttctccctgggcagcaggatgttgtaatggaaaatgagtggacctaggcttcagagactctggtcccctggctttgaatccccttctgccactatcccagtcaaggactgattcagaacctaattttcttcatttggaaaataatgttctgatagaggtgacttttgtggtacttgagaccatatgattcctatcattaccaaccaatattttccgattgtttttgccccatgtgacttctctgtgattcctcctggcaaggaagttttacaggaaagcagggccacttttgggatcctgtgctgggctggatcattttcctggactggacctagtccacaagctgctggcatctgtttctcctcatggatctctctctgcccttgtatacacctgcattcaaaaatgatcacgggctgcctgtgctctggtcatcaataacgcagggagaggaattgctgaaagccgtttcccgtgtttggagggttcacacctgtccctttcaaatgctggcgctttcacacactccttctctcctgccagcaccttctggtctcaggagcattgcaggatgttgtgtgagtgagtgatgggagacactttagtatggcttttttcagcttagcctcctgttatcagagagcagtctctttcagtgtcaaggtttgagtactagatggtggagaaagcctgtgtgaattatttttaatgaataagtgtgatgatgggtggcatacagtcactgccttaagattttcaaagagaagcagccttttggaggtggtgggcctgggcaggtctttcaaggagtgggatgtgatgggcagtagaaaggtattccagggaggggtagcaacatgagaaggtctttcaaggattgggatgtgatgggcagtagaaaggtattccagggaggggtagcagcatgagaaggtctttgagtctgggatgagcaagagtgtctagtcccaccagggagacagatgtgtaggcaagtaatgacagcatggagggatggctgctggggtgatccttggctcccagcacggcgaggtggacatctatgggaggggccctgagaggtctcttgagctgtctttctgccagttgcacatctgctcagttgcctgttaagactcttaagacagttttgctggactcttaagtttttattttgatattctttgggagcattgagattcctttttgagatgagtttggtatgaaagaaactggcaactcatacctgattgattaactgggggcattcccattgacatcagcttgaagaaagacgacagaacactggagaccaagtacttacagccttctgctctgtggcccctcctcactccagggatgctgccttgggtctggaaactgttagaggaaaccccaagaggtgcaggcactgagcctctcaggacaatgacctggggtcccagctcccctggaggggcctcctcatggtaagtgaatgccaagaggttaagttggcctgtgtttccgaggtggaaattccaggtcgctggcttcatttgtcttctcttttagattgtttgggggttgatcacagaccaagagtgacgagtgatgtcaccctgtgactcatggctggaccttcttgcccctattgtctcagcacaacattattcgacttttccctcagcgtgggtgggcagaggaaaagccctgtggctctggggacttgggatccagagttgaagacccttcagctggctctgccctgccagtgccacagagtgccatggcccaggaagacaggttttcttccatctaggccaggccatccagtggccatcctccgtgtcctcccgcctcctcctggtgtgacttctgaaaaccaagaatttgttcctgttgactttttctgtgctatggaccattgtcctctcacccactcaataaatcttgaaacatgcc

SEQ ID NO: 3557 - DNA, 4237 bp, Homo sapiens
ctgagcactagagagagcgtcttgtggctgcggcctgcccctcagcctcctccgcgcggttacccctgtacccgccgccatccgtcctggcgctccggatgagtcaatgaggggcagggcccgaggagtggtcttcccaagaacccctggtggcctcccaaggccggtgctgtgtacctcctccccgacaaaaggggaaactgaggccccgaggggagtgggaagagccggctggacgtcaggcccagccgctggtgcagtggtccgtcccctctgccggggtgggcccctcgggtttcgcgtgtcctcgggaaagagactggcgggtgagccgcgccctcggccttcgctgggctaagccgaccccatgcagacgtcaaacccccctaggtcggcacagcctctctgcggggaggcttagtgcccccttgagaaacggcttggcaacgctgtgcccggggccttgcacgcgggctgaggggggctagagacctcgcgacttttactcccccgaccccgatctccgactcctgactttggaagcccccaaagctgcttttcggttgcctacaaagtgtcggtcattgtgccacgtccttggaaccgtgaactcattttctcctcaataacctttaaaaagtagctgtaaaacctccattttacagaccagttggctgaggtttaaatggaggacgctcccagggccccagaggggcgaattccagactcctttgccaggaccttgtactaagccccttccctacgcttttccctgcctaggcctcgtgggctgtgcggctatcctggagacagatgacagctctcccttggatggctttgctggttccgcaccagccagcgcccccatttttcctgcagcaccctgatctgcactccctgaggggctcccactgtccgcggtgtgaggatgtccctgggtaagtggtgctggtcatgagcactttgggggacccttcaaattcccttctgggggaccccagcggagggcatggtcatgaattccgagaactgtatggcaaagccgggtgcagaggagagcctggctaagttctttcattctcctgagcttgactttctgtaatgtagggaaactgcgaaagctctgtaagtggggagatcttgcacgtttttcttgcttttgaacccatgatgtctggctacttgtagatactcaatatttgtgggatgaatgaacaatttaagccttttttttttttaaccagaaattggtcttctgtgactttcttgatgggggcagatgagatctttgtactgcattaagtggatagcgctcaggtcctttgggcttggcgctttggcaatctccaggcagctcactttggcctctgttcctggatcccctttgctcttttctgcgcctgcattcgtaagtgatcacgggctgcccgtgtcctggtcattggtagtgcaggcagaggaaatgcgggaaaggttgctgtgtttggagggtccacatcttcaccctcctgtcccaggagctttcctacactcctccttctcaaagctgcacacacctggggcctccaggggattgggggctgccgtgtgtgttatatcatgattagagctttcacttcctgctccctgctgttgggaaccaggctgtgtgtgttgcttaaattccccttgatgaccagcagagtcactgccactcagccatggcacactgctgtaaacctggttttgatctcctttcaatcttttgctgattaactacacattgatcagtgttggccaccctcaccctgccatagaccatccgctgtcttcctctgtagagttaactattttctcttttatgaggaaatagtgtgtttgcttaggagtgtttactgtctggtaactactgtgctaagccctttcctgttgcctgccatccctgctgcgagcagggacaagctgggtgctcactcatggcatcttatctgttgcagatagtccactgtgtgcagaggcatgggagttgtcatgttgggaacatgctagacctcagtatccttgaggtaagatctctggttcattctctggaatgttggttccttgtatctagtacagttctgtacatgttcccaggggctttggggttggtgtaggggagctgagaggtgagatgagaatggcactgtgggtccccagatccgctgtccacccagccaacccagatcacctctggcctttcctgtgccttcagggcttgctgctggggggaaacctccagagtcccactttggtaataagaggtctctgccctttctccctgggcagcaggatgttgtaatggaaaatgagtggacctaggcttcagagactctggtcccctggctttgaatccccttctgccactatcccagtcaaggactgattcagaacctaattttcttcatttggaaaataatgttctgatagaggtgacttttgtggtacttgagaccatatgattcctatcattaccaaccaatattttccgattgtttttgccccatgtgacttctctgtgattcctcctggcaaggaagttttacaggaaagcagggccacttttgggatcctgtgctgggctggatcattttcctggactggacctagtccacaagctgctggcatctgtttctcctcatggatctctctctgcccttgtatacacctgcattcaaaaatgatcacgggctgcctgtgctctggtcatcaataacgcagggagaggaattgctgaaagccgtttcccgtgtttggagggttcacacctgtccctttcaaatgctggcgctttcacacactccttctctcctgccagcaccttctggtctcaggagcattgcaggatgttgtgtgagtgagtgatgggagacactttagtatggcttttttcagcttagcctcctgttatcagagagcagtctctttcagtgtcaaggtttgagtactagatggtggagaaagcctgtgtgaattatttttaatgaataagtgtgatgatgggtggcatacagtcactgccttaagattttcaaagagaagcagccttttggaggtggtgggcctgggcaggtctttcaaggagtgggatgtgatgggcagtagaaaggtattccagggaggggtagcaacatgagaaggtctttcaaggattgggatgtgatgggcagtagaaaggtattccagggaggggtagcagcatgagaaggtctttgagtctgggatgagcaagagtgtctagtcccaccagggagacagatgtgtaggcaagtaatgacagcatggagggatggctgctggggtgatccttggctcccagcacggcgaggtggacatctatgggaggggccctgagaggtctcttgagctgtctttctgccagttgcacatctgctcagttgcctgttaagactcttaagacagttttgctggactcttaagtttttattttgatattctttgggagcattgagattcctttttgagatgagtttggtatgaaagaaactggcaactcatacctgattgattaactgggggcattcccattgacatcagcttgaagaaagacgacagaacactggagaccaagtacttacagccttctgctctgtggcccctcctcactccagggatgctgccttgggtctggaaactgttagaggaaaccccaagaggtgcaggcactgagcctctcaggacaatgacctggggtcccagctcccctggaggggcctcctcatggtaagtgaatgccaagaggttaagttggcctgtgtttccgaggtggaaattccaggtcgctggcttcatttgtcttctcttttagattgtttgggggttgatcacagaccaagagtgacgagtgatgtcaccctgtgactcatggccggaccttcttgcccctattgtctcagcacaacattattcgacttttccctcagcgtgggtgggcagaggaaaagccctgtggctctggggacttgggatccagagttgaagacccttcagctggctctgccctgccagtgccacagagtgccatggcccaggaagacaggttttcttccatctaggccaggccatccagtggccatcctccgtgtcctcccgcctcctcctggtgtgacttctgaaaaccaagaatttgttcctgttgactttttctgtgctatggaccattgtcctctcacccactcaataaatcttgaaacatgcc

SEQ ID NO: 3558 - DNA, 4237 bp, Homo sapiens; identical to SEQ ID NO: 3557

SEQ ID NO: 3559 - DNA, 397 bp, Homo sapiens
tttttttctatttttttgcttggagaggagggtgtgtggacaccaagctggccatggtccaagctgacctatttgccagccgacccctgtctgggctgccataacaaagtgccatcatgaactgggtggcttataaacaacagaaatttatttctcacagttctggaggctaaaagtccaagatcaaaggcaccagtagatttggtaaactaggaagcggtgagggcccacttcctggtttatagactgatggctgtcttctcactgtgtcctcaaatggaagctgatgtttcacaaatattttctgggtaaatggatgggtgagtgaactcatgaagggatgctccattagatgaacgcttggataaagggcgttagtggagggacagaattgcag

SEQ ID NO: 3560 - DNA, 397 bp, Homo sapiens; identical to SEQ ID NO: 3559

SEQ ID NO: 3561 - DNA, 397 bp, Homo sapiens; identical to SEQ ID NO: 3559

SEQ ID NO: 3562 - DNA, 9142 bp, Homo sapiens
ggccgtttctgccgcgtccaccacaacctctgctgtatcagagggggccttcgccgccgccgcccccaccaccgcccctgccgccatcgccacctccgccgctgccgccttggggccctcctccttcaccgcccccttcaccacctctacacgttctaggccttctgtcctggagaagaagctatagtcgttctcccttgtgggcccggggcgcagccatggcggacggcggcggcggcgggggaactggcgcggtgggcggcggcggaactagccaggcctctgccggggcagcgactggcgctactggggccagcgggggcggtggccccatcaacccggcctcgctgcctcccggcgacccgcagctcatcgctctcatcgtggagcagctcaagagccggggcctttttgacagcttccgccgggactgcctggccgacgtggacaccaaggtagctgcggccgcctgggcgttggggagcggggctgcacgtgaggcccgccgggtggcagctttgattttcgaaagccgagagcaaaacaaaagatagcttagaaatctcagcggtgaggtcttacaccgcttggggcagtacggagagctttctgagcgatgcacacgtgggttcctgcctgatacatttactactagttgtgattttacccagtcccttctccgaacttggggtttcaatgtgggttttagagcctagaccgtatcattcccaagatggaactcctctgaggcccttaataacaaacttcgaaaccaagtagataagcaagcgtgctttagaatttccacctgttccgtactcaccacggagaagctggcattaaacacaatgatttgaacacacagtcatcaccattttatagctgtttattccttttctctagctcattgttttgcagactagtacggcgttgaattaagataaattgtagaaacagcacccttattttgcacttcatcattgataaaaggagatttggtgcctagtttagatcctaatgccattggtcagtcccaccagtaaaacgctatttcactttacctactcgtcagggtggtttggattcaatgaaataatgggtgttaagtatcagacatacagtagttgctggaatgttcattttcttccttttcaaaacttgtctagccacgactgtggttgtaggttaggagaccctgtcactggactcctgcagggtagtgatttctcctaccagagcctgtcatggaaacattttgcttacctcacagcaagattgtgagcttagaattagaccttaagatagggaaaaacgtagtctgtttattcgttgaacgtttattggcctctagttgccaagctgtgcgattacaggaataagtcactaccccatcctcaaaacttatagtctaggttagaaaactgacatgtaaataaaccaggtggtaaatacggatgtagagagagaaagtggtatacactgttccttctccaagatgaaaagcccaactagaagtctgtccttgaaacaaagtaatttaatacatatacatcccagatctgtattgacagagctttcacctttcctaggacaagttctccattcatatttcttatattccgttaggttttgtgtgtgattttaaaacaaaagcgactacagtagcccgccccatccgaggttttgctttctgcggtttcatttacccaattgttgcggtatggaagtacttgtgttcaggtaacccctattttacttcataatggccctcaaagacattcatgcgtagtgtatatagggttcagtactacctgaggtttcaggcacccactggggatcttggaacgtatcccctgacgggggaggggactaccctcttgagcggctggtgagggagagtggttggaaccttcccatgtacagctccttagctgttccttctgagaattccaggttgttttagttcttgaagatagtgttttttcaggcatatcttatctgagacctttgttgcttcagcccagtggttctcaaagcgtggtgcttggattaacatcagcatcacctgagaacttgttagaaatgcacattttgggccccaccccagactgctgaagtatttaggggaaattgaacagatgtctgtaatttactttgcactgtaatttactttgaactgataagtgaacaggtggaggggttggtagtacagtaaaacgttatgagtgggctcatgagttgctttgacttcttgaactgagatgattctgtatcgcctgggtttgttacgtgttttggtggtgatgttcactgtcctttgtcctttttcggtaaacagttcgtatcatctcaaaccaggtgcgttattttgagtagacggtatggcatcaggatttatgcttacaagggacaaaaataatcctaactgctttatgcaaaggggagaatctattgtcttacggaatccagggaaggattgaacgaacaaactctcccagagggtggtaggcgtgcgtttggaaccagatattccccattcgttctgtctttcatctctgttgatatctgttttactgttggttcagagtggagtcatccatttggttactagtatctcttgattacattttacagcttcttcctctagagagaggctgtcagctccaatctgggaaatcccagggaatgtctgcattgtcttagcgtggctcaggcacccactcctgtggcaccctctgccctacccttgtgaagagaggaagacagttactagaaagaaggcgttactaggcagatagcacatggtatctgtgaattttactcctctgcccccatttccttgcctttctcttttccaggtttagtggagtctttgagtttgctctctcaaccttttggaagaggccagtcatggaattgaggcctgctggttcctttgtcaacttcatttccctgactgttagcaaactttgccgcagtaatgctgcatagcaaactgaatctcagcagcttataaccagcacttgttcacatgttcatggggcggcaggtctaccaaagttcagctgagctaggaaggcttcagctggtggcttggctgcaggctgcccaggtgtgggtccaggctgtgggttgatgtcaggcctgctgcatgtagagttacttaaaagcaaatggaataatataagtaaagcgcctggcattgtgcccacccaccatcaggtgggcacttgtgttaaccattaattcctgactgccacattgcatggtgatcttcatgcacagtggaagtgtatttagacttaataacgtttctgtgaaaagcagtgttctgagagactaagttcaaaactttggtgcatataacttctgaccttgcctcctctttttaacattttagccagcttaccaaaacctgaggcagaaagtggataattttgtgtcaacacatctggacaagcaggaatggaatcctacgatgaacaaaaaccagttgcgaaatggtctgaggcagagtgtggttcagtaagtaagcagaatttaaagcttttgaaaaggcagtcatcacaagtgtgatgcacaagaaggttgaggtctctgtttagtcaaggttgatgggactttatatcaagtatcacttaggagttgcagcagtctgctcttttgttataattaaggttaaaggaagcaaagtactcagttgaaattccagtttctgcagcctgtgaaggcctcctgtgtgcatctctactgggtgcatcaaaaggcattccaaatcgtgagacattttccctgctctttgaagtttcagtgttgtccaaacatatatgtgagttttataccaagatatcagggtttggatcttgggcaagaggagttggatctttattctcacaggtgaatgtgaactaaataaattctttgagtccaccaggactgccacctctaaagtgtaatggtgacagctttcaggaaggcatagtcttaataaagtatcgtacttcacagtaacaaactgaaccttagttaataaaggtgctattgatagcttatctgagtgacgcacaaaagtggaggtggaggagggtacagaaatgggagaacacattagtgattgcctggggttacggatgggaggagggggtgagtgtgacttgcaagtggtagcacaagggggagcttgcaatggtgcagttaagtgtcactgaattgtgctgtgctcacgtgcaacagctcgtatggtaaagtcgcacggagctacacacacaaataagtgcaagtgtaactgaagtctaaataaggtctggattggaccagtgtcattttcctggttttgatattgcactagttacgcaaggtgctgacattagagctggctgggtgaagggtgcgtgtggaactccctggactcttcttcacaacttcctgtgaatatgcagcgattttaagatttctaaagtttttaaaagtgttttactaacaagctagtacttccaatatggctgaatgctgggaagaagcctgatagcagaagatgcccagtgccttgtcattctggagtcagtaccgagtgcctttccctttctccagagaacagactggtggcaccgggctctttcagaaagaaggggacagtagctgccccttactgagcaactctttattacatgtctggcactggtctttacatatatcactcatcctcatgaaaagcctgtttcacagctaaagtcacttgtgtttaccctgtcttgagtaaatcaaaacactgaacattctgaaatatttggaaagttgccatgattgtatgaaggctgttaacattgctttgatttctgtaatgagcatggatgtcattctagaggtatgcatgtggcgcttcctcttgcatttctttagtaggaattgtaatacggaaaagtgcacagaagttcagtgaaacagataattagaacatcccttgatcacccagatcgagaaatggactcacacccccgaaacagcctagctccggatgtactttcctcctttcggaagtttgccatattcctgacttttatgctaatcatttcctctcttcatagtttttaccacctctgtgaagttgttgttgtttttttttcccctgctttttgatttgacttagaatgtgtttaacctgaaaacatgaacttggctttaatactgggacatttctccacaattcttgctagcattttgaatttgaggcaaaatctactggagtttcgaaacgcagactttctgcttgcccccaggtgctctccccaggtggacactgcaggccttcagagcattggctcactggcctggctgttctggcccagatgctgtaacccagtgccacagcctagagggtttaacaggaaattagcctgtgctattgcactgaattatgacgaataactcttgtaactgtacaatatttgttttttccatcttgtacattgggctcctgacaagattttatgttttcctcaacagtttaagaatctccaggaaagtgagctgcactcccttggtactttgtttcccctgatcaggggttttggtcagttggggatgcttcaacaaggcgccgtagactaggtggcttgtaaacgatggaaatttacttctcaccattctggaggctagaagtccaagaccaagatgccagcatggtcaggttcaggggaaggccttcttgcaggcagcagactgccaactgcttgttcttctcatgtggtggaaagagagctcgctaacttcctggggtcccttttgtaagggcataaattgcattcgcggaggctctgcccccatgacccgatcgcctcccaaaggccctacctccaaaggccatcacattaaggattagatttcaacataggaagtctgggggacacaggcatttagttgataatatcaagcttttacatctggtaaaggaccctgtgaatccgactcaggaagtggtttggtaaagttggaaaggtattggcttgtgactgaggagaggtggctttcctttgttagcatcccatagccggatgctaactttgctgtatttaacgatgctcatcactaagggccgatactgtctaatgcctggtctacctgaaaatgtgcccttcagtgctctagtggtggtgtatttacatctaggcttcctgtcgataagctgttagttaccattgaatccagggagcactttacacactaatcatctttcccagttcacagcctgtttcttatcttctttgtcatgatgtacatttactcatgtctttcctttgctgtaccctgacagaccatttgcccacttgctgcccagcctatttttacccgaaggcttaaatggcctctgaagtctcaagtctacgggaaaataagtaaaacctgcccacatgcttgtgatggtattggaatatttcagtcctttgagaagaacacttcactttgaaccttacgggctattttccagactgtccaaatatgatttgtttcctctcaccatcatttccagtaccctgtcccaagtgtttgaatatagacattgatatgccctgatttttgctctacttcagaaaggatcggggatgtagtttagccctctaggagcttggaactaatttgtttgtctatttcttgtttgcttccaagttgcttattatgtgttacaggtagcagctacagctgaaggccatggtgaattgctggtgatgtaaatactcccagccctgactgatcggccttgtttaaattttaaggattagtaaacaggttgctgctggagctacttctgcttaggctattaggagaataaatgttgaaggaaatggagtccaattcggggcttactggctttgacagtacgaggaagcttttcagtgccacacgtgtcaaactctttctcaccatgctgtcatttgtttgttgttttggagcaactcacttagttttgtttttgattcttttgtacaaggttgggtgattgtgggtgagattgtgcagtaggaataacagctgctggttgagaattacccctcaaaagtgaaaatagcgtgagctgtatatggtaagtggattgacctctaaactccctagaagggctgtagctttgaaggtggacatttattgggctcgcacgtgacacttattggggctaaagatgaatcccgaaggaactaaataacagaatgatctgtttgtctccacaaggtcagggatgttggaagctggagtagacaggattatttctcaggtggtggatccaaaacttaaccacatcttcaggccacaaatagaacgagcaattcatgagttcctggcggcccagaaaaaagcagctgtgccagcaccccctccagagcccgaaggccaggaccctccagctccatctcaggacacttcctaaggtccagtatcctatcttctgtccaggagtatgcatctctggcttgtagatatgtaaaatggataggaatggggtaggccgtaattgaggatcattcaggaagtatttactgcagatggacttcacctactgttataagtcactttttactgagaactaattagtagcagtttcctgtgtcagtgactgattttctgttccaccagcgctaaacatgtaagctatggatagatgcttcattagaaatcagctgggatgattggtgtgcataaaggggattcaaatgaaagtcttattttgctgaaatgtttaaatgagtctctcctggacatgagttaacttaggcttgcaattttatttaaaatcaagcagtgccttctgaagtgatatcctaaatgggattcagagtctgctttgagtgcgactcgatttccatgaatttagaaggagtttgtttaccactatcaattaccatgggattcttctgttaggaacactccccctttttaaattaaatttggaattaaatgtaattttaaacagctgtagatgtacaaaagaatgctttttgcaggttttgggagacattagtaggagcagcgatgaagttagcagtggacttttcgccgttgttggtgactgctgggatatgttttatcccttcattctgatttggtgttctttttaagattctctgagatgcctgttataatcagtaagtgaggtgaattgactagggcgttttgagcgtcagtgatgagcaacgcaagagcatcaggactgtctttttgttcctctattgagagaagcccttgagtccaatatggagtgtaaaacattcattttaagtctttctttttaattgtaaattcctttaggaacataaaagtgaatatagtctgttatcaataaataacattttgatatgattatctttcctttttagaatacgccagacaccttttgaaagctaatttttggtgaagaaatggattcggttacataagagtgcaacttcagactgaagataggccaaggtcgtcactgatctcaagatttcaaccttgaccatgggcagtgaccagattgaaaggggagcaagttcggcagtgggagagttgactgtgtcaccccctgcattgtgctgccatttggccagcctgtccaagggcatgacaccaagtagacactacagagagagaaacactacagcaacccagggttgtcctgaaacagacttttatacttgaacatggagactgcacatggactttagggtttgtgctgtgggataaacggaagctacagtgagaacatagccagtcccaaagacaatttcaaagaaaaatgacagtaaagattagctgggagtagtctttgacagtgcttatttgatactgtctctcagagtttgcaaaccagattgtacaagtcattagcgtcagatagctttaaagttgtgaccttcttgtacatgaatcttctagccagtttcctttcctttgtaacgaaacatgaaatcctagaatgtatgagaagttcagacattaggcataaggaaactcgtttgcaggctctctgtccagggctgcttcctgtcctggaggggccagtgagtcttaggtatgtttattttattctcacatttgtgtttttttagaaaagtgaatggtcaataaatggcttatctttcataataaaattatttgatacttttactccgaa

SEQ ID NO: 3563 - DNA, 101 bp, Homo sapiens
gcttgaacccaggaggtggaggctgcagtgagccaagattgcaccactgcactccagcctgggcgatagagtgagactctgtctcaaaaaaaaaaaagaaa

SEQ ID NO: 3564 - DNA, 130 bp, Homo sapiens
tggtctttagttgaggtagtccgtggtatgtgtcagtgtttgtcatccttgtgtgtgcagaagtagcacctggggatttaggggaaaatgcatatttctgattaagaagttctggggtgggacctaagag

SEQ ID NO: 3565 - DNA, 17216 bp, Homo sapiens
tgcccaggtgatccaacagtatctgtcagggggtatgtgtggctatgacctggatggctgcccagtctggtacgacataattggacctctggatgccaagggtctgctgttctcagcctccaaacaggacctgctgaggaccaagatgcgggagtgtgagctgcttctgcaagagtgtgcccaccagaccacaaaggtgagtggaccaccatggctagaaatgagttgaccacagcagaggcattccagcagaagcagggatgtcacacaggaatataagcacagcttcagggccaaggcccagcctttttttttttttttttaatttttaaaacttttttagtagagacggggtttcatcatgttggccaggctggtcttgaactcctgacctcaagtgatccacccacctcggactcccaaagtgctgggattacaggtgtgagccactggacctggccgaggcccaggctttgggatttcctagaccagtgacatttccaagttttagaatattcccaaatatctattttgccatgtaaggactttaaaacaatgaccatctattgttgccatcattaacacccaaaactataagaatggcaataatctcagatgaaaaagcagtcctttaggaagctgcagtgagccaagatcgtgccactgcactccagcctgggcgacagagactccatctcaaaaaaaaaaaaaaaggagtcctttaaattgaataaatttagcttcataaaaaactcactacattattgttatttttctgatttatatggggacccagtgaaatcttactgtggaccaacccatccttgagcaagtatttgggtaccactggtgcaaatgatgtcagattcttgcttctctaattctgtatttaaaaaagataaggatggctgggtgtggtggctcatgcctgtaatcccagcactttgggaggctgaggtgggcagattgagcccaagagttcaagaccagcctgggcaacatggcaagagcctgtctctacaaaaaaaagtaaaaaattagctgtgcatagtggcatataccagctactagggaggctgaggtgagaggatcacttgaacttgggaagtcgaggctgcagtgagccgtgatcgcaccactgcactccagcttgggcaacagggctagaccctgcgccaaaaaaaataaggatagctgattcccttactgagaaaaagactgaagaacaagcaggagctgccacttccctcctgccctcctctcagcagttgtaaagatccagtgaaatgatgtcataaagtctaggaacattcccacactcatctacaaatgttcacagagagcctactgtgcgcagagaccctgcggagctggggatgcaggaagcattagacgtggatgcacccctgagggttcagggtgcacagaacgtctgtcctcgggcataagtggctctacgggtaccgtgcacagagcacacagtgactcaggaagggggaggccatcaggccaaactgcagaaccaaagccatctcagatgtcatctagatccacccagtcatgtactggaaaagaacacagagacctaggcaggaagagtgactcgcctagaccacaattctggcctggggtgattatctcagtttggaaaactctaggtccggccctaactagctctgattgctctctggatgcacagtgcaatcatttggcctggactggaacgggcttctgaagtaggacagcctgacaagacttcctgctctctgttccctgcagttggggaggaaggtggagaccatcaccataatttatgactgcgaggggcttggcctcaagcatctctggaagcctgctgtggaggcctatggagaggtgaggggcaggggtggggaggaaggggacagagggaaggggaggaggagtagacccctctcctaggctgtcctgtgggatgggtgaggcaatgggggcagattctgagcctgctggaatcaagagtgattttgtttccacagtttctctgcatgtttgaggaaaattatcccgaaacactgaagcgtctttttgttgttaaaggtaagttgggaatttcttgtgataaagccagatggaaaagaggggtcaaaaacatgactgcggcagatggagggtcaaacagtgagccaaaagagggggtctgaggacatgttcagaagactgctgcccctgctagtgtgctggctcacgcctgtaaccccagcactttgggaggccgaggcaggaggctctcttgagcccaggagtttgagaccagcctgggtaacacagcaagacctcatctctataaaaaagttaaggaaatgagctgggtatggtggtgcatgcctgtagttccagtttctcaaaaggctgaggcaagagcattgcttgagtctaggagtttaaggctgcagtgagccatgattgtgccactgcactccagcctgggcgacggagcaagtctccatctcaaaaaaataaaaatagggctaggtgcagtggctcactcctgtaatcccagcactttgggaggctgaggtgggcagatcacttgaggccaggagttcaagaccagcctggccaatatagcaaaaccccatctctactaaaaatatggaaattagctgggcgtggtggcccacacctgtagtcccagctactcaggtggctgaagcacaaaaatcacttgaacccgggaggtggaggatgcagtgagctgagagctcactgaggctgaggcaagagcactgcttgagcccaggagtaaaaggctgcagtgagctatgattgtgccactgcactccagcctgggtgacagagcaagactctgtctcaaaaaaataaaataaaaagaacactgcccttcacatacgcagactactttacaactcacagagctttcagtatttataatctcctttgagccacccagcctgatgagatgggaagagaccatttgattatatccactgtaaagatgggaaggctggacctcaaagatgcccatgctgagctgcacaccctgggctgcctatgtgggctccagagccctggggaacatgtggcccagcatgggctggcaggagggtagcaggtgctgcagaggacgctgttagggacagactgggcactgctcccagcctcacattatctggtctctgttccagcccccaaactgtttcctgtggcctataacctcatcaaacccttcctgagtgaggacactcgtaagaagatcatggtcctgggaggtaagtggtccagactgttctcaactccaaaggagggtctgtagcctaaatcgggtccagctttaggggtgtggccgtagccaccagggtgaaagctccctctgctagtttgggagcagtgggacccaggagcaagctggggtggagctagtgccttcttctgttttcctaagaactctttctctcagacactctagaagcaagcactgggtccattattgtagattcaaagatgaatgagactccagtccttgccctcaaggaacttacagtataacaggagacagaagacctagaaagagaggctgggtgcagtggctcatgcctgtaatcccaacactgggaggctcaggtgaaaggatcacttgaggccaggagctcaagaccagcctgggcaacaaagcgagaccctgtctttactaaaaaataaaaaatagctgggcataatggcgtgcacttgtagtcttagctatttggaggcttaggcaggaagatcccttgagcccaggagttcaaggctgcagttagctatgatcatgccactgcactgcagcctgggcaacagagcaagaccttgttttttaaaaaaagacctagagagagaaagctatgatataaactagaaaagacagtagactagtcatagagagggtgccatagaagttgcaggagcaaggttgctttcagttggggaaaactaggagcagcttcatttgacaagcacatagtatgtgccaggcctgagctactgccaagactacaaagatgaataagacagagtcctggctgggcacggtggctcatgcctgtaatcccagcactttgggaggccgaggtaggcggatcgcttgagcttaggagttcgagaccagcctggccaacatggtgaaaccccatctctgctaaaaatagaaaaattagccaggcgtcgtggtgtgcacctgtaatcccagctacttgggaggctgaggcaggagaatcgcttgaacccaggaggtggaaggttgcagtgagccgagattgcaccactgcactccagcctgggcaacagagactccgtctcaaaaaaaaaaaaaaaaaaaggggtcccttgaaggtcttttggcctctctgggaaagcagacacaaacaaatctatcagtatgctgtggtaaatgtacagaaggggaaaccacaaagtgcatgggagcactcagcgggagcacccactccacctgagctaggaagggggtgatgcctacctaagctgcgtgctatggaatgagtaagagtctgccagatggagcaaggcaggaagctgcttggcagaaagaagagcattgaacaaagaccttacatagcatggcagaggcagctgttatagaatgtgaggcagggtgtggcaaggtatgaggctggagagggaaccaggagtcaggccccagagaatcccgggcactaggttgaaaagctgggatatgactctacaggccactgggaatcagagttttcagcaggggagtaccacaaattttaaaccaagacacagtactagcaagattgcgaaggctaccagtttgcacgagcctctgtctctacaaaaaaaagtaaaaaattagctgtgcatagtggcacataccagctactagggaagctatagatttgtttgtatctgccttcccagagaggccaaaagaccttcaagggaccccctttttttttttgagacagagtctctgttgcctaggctggagtgcagtggtacaatctcggcacaatgttgtcacagtccacgcaagaggtgttgcaagcctgaatcggggaattggcaacagggatagagaggagaggatggatttaagaattatttagggccaggcgcagtggctcaggcccataatcccaaacactttgtgagtgtttgggaggcccaagtgggtggatcgcttgagcccaggaattccagatcagcctggacaacatggtaaaactccatctctacaaaaaatacaaaaattagccaggtttggtggtgtgtgcctgtagtcccagctacatgggagggtgaggtgggaggatcgcttagcccaggagttcgaggctgtggtgagtcatgatgggtgccactgcactccagcctgggcaacagagcaaaaccctgtctcaaaaaaaaaaaacaaacaaaaaaacaaaaaaaaaacaaaaaaaacttatatagaaagtaaaacagcagaactcaattgactagatgtaggaagtaagggagaaagctagaatgagctcctggtgtctggcagaggtgactgagagatggtgacgcattagttcaactggggaaaacaaaaaagcttgaagttgagcttgaggagtctgtgagatataaaaatgttgggaatacctgagtttgaagcttaggagaaaactctggtctggagatttgggagttatcaaataacagcagcagctaaaaccttgtcagtacgtaagactgcctacggaggaacagaggcagaaccctggggaacatccgagctcaagagcaggcagagaaagcgaacccagcagggagactgagaagtgattaatgaggttggcagagaagcaagtcaacagggaatggatatgcagggaagtaggggcaacatcagggtacaaggaaaagtgtgacccaaaacccagcaaagaggacacacaggcatcaagccagccagggacaggcaggagttcagttttgctgaagtggagtggagggagaaaaggctagaaaggtagattgggcatccaggtgtggtggctcacacctgtaatcccagctactcgggaggctgaggcaggaggaccacttgagcacaagagtttgagaccagcctgggaaacatagtgagacaccgtttcaaaaacaaaacaaaaaggtatattgggacaggctcatgaaagggtgaatgccacctatggcactgaactttgggggtaggtaagagggattctgaaggcttcacaatgttcatcttttggtgacacacgagaattggagattttccaaatgtatgctagtgagacccggggagtgaagtgaactcatcagggaagtgtaggacttctgggttccagacttagctctggcagcaacaagctcaagctctgttttttttttttcttttttaaatttaggtccccacaaaagcattcttttttcttttttgagggagccttgctgttgctcaggctggagtacagtggcgtgatcacggcttactggagcctcaatctcctgggctcaaatgatcatcccacctcagtctcctgagcagctgggactacagccagcacacccacctaaatttttatttttggtagagacgggagctcactatgttgcccaggttgatcttgaactcctgggatcaagcaatcctcctgcctcagcctcccaaatcactgggattacaggcatgagccactgcacccagccagctctctgctttttgttgcctcagttattctctctgtaagatgggaagaatcctcctggccttatcccaactctccagctggactgggggaagaactataaaagctgagcaagaggtttttatgatttttgttttttctgctgctaccacccaccatgggcatgagacggtttggtttcctggcagcagagctgtgtaggaggttcagtctgttcccctaccacacctaaaactctttcaaccaaacctgcctcaggctgggaagatacagaattttcaacagaggggggagattcactcgggctggtcactggagcttagcagtgcagattaaatcaccccaagaccacagacactgtgttcccaggagttgcatggtctttggtccctaaaaatctgagggctggcagactctggacagtttctgcgggtctccagccagcatgacactggcttgtaccccagggcctggagctgctgcctatatatgctctatatagtaggcataggcaggttttagtatcaaaatattgtacctggctgatatttgtgaatttggattggtgaagtggttcttagcattggctgtgctagagtcaaactctcctagacaggaaggagcttgggtattttaaaaaaaaaaaaaaagagccaaattactggtggctcaacagctgaaaacaatgggagcagaagtgaaatggtggctggggtaaagccaagaatccatttaaggggtgactctacagagatgcatttacttattaagtcacgacttagctgtaggggaaggtgggggaaagacacatagttctgccctcacagtgttcagtataatcaggacagggtatgtgcattcaggccttcctgcccgccacacgtgctgtttcctctgcatggaatgtccttctaccctttctttgtcccctctcctgctgtacttcaatgtatcacctccatggggtaataacatactcttaacgtgtataaggcactttatggtttaaaaagccctctcggccgggcgcagtggctcatgcctgtaatcccagcactttgggaggccgaggtgggtggatcatctgaggtcaggagttcgagaccagcctggccaacatggtgaaaccctatctctactaaaaatacaaaaaattagctgggtgtggtgtcgggcgcctgttgtcctagcttctcaggaggctgaggcggaagaatcacttgaacccgggaggcggaggttgcagtgatccaagattgcgccactgtactctagcctaggcaacagggtgagactctgtctcaaacagaaaagccttctcaagtacttagttcatttcactcccaccataaccaggcagggcaagaatgtcacttagctgttcagacacgagggcaggaaccagggtctcgatttctggcctggggcagagccatcctctggctcctgctgaaccccctgcagtactatgcatgcactgtgtgctcctaatgcaggaatttgaggcggggtgttgtggggtgcaatggatgggttttttctgcctctttagtgtagaccactagggttatggcgaaatcttacctagtgttgagatacatctttatccttccttccctctcctgccagcaaattggaaggaggttttactgaaacatatcagccctgaccaggtgcctgtggagtatgggggcaccatgactgaccctgatggaaaccccaagtgcaaatccaaggtatgagccgccagaggctagaggtgaacagggatgcctggctcaaatgcacattccagttcactccatgccatgcttctagatcaactacgggggtgacatccccaggaagtattatgtgcgagaccaggtgaaacagcagtatgaacacagcgtgcagatttcccgtggctcctcccaccaagtggagtatgagatcctcttccctggctgtgtcctcaggtaggggcctgggcccttccaggagacccgagctttcatctataggtcctgataggtgggctggaataggagaagccctggtgccaggaccccggagagggcacacacagacagaattatgtctcaattggtgatatcccctgcaggtggcagtttatgtcagatggagcggatgttggttttgggattttcctgaagaccaagatgggagagaggcagcgggcaggggagatgacagaggtgctgcccaaccagaggtacaactcccacctggtccctgaagatgggaccctcacctgcagtgatcctggcatctgtaagtatctctgccttggcaatgccttgaagccccatgtccagctttctgcctgtgaggttcctcttcctccatggatttttggctctgagtgttagaactagaagtggaatgccatcagttcaatcctctccttgtatagatgaagaaatctagccttggagacttgtttatggtgacccaactggttaacagcagggtgggactttgatctcatactcctaggtatgggtgagtcacagtcctaggcgatcacaggggttcaacacgtctgctttctggtccaggtctaactgggtctgtgactggacagatatttcttggggatgctccttcccagaggtcacagagacagaactggctgggtgggcatgggatcacaaggtaagcagatgctcaaaagtgcagccttcacccctgagtttcactcatctcccagctgaccaaagaatggacacagactatgagcaggcagtttacacaagaatataagaatgggaaacagacatttgaaaaggtgcttaatctctcttaactttgtaataccattaaaattccccttgactcagcaattctacttgtgaaaatttatcctacagaaatacacaaatactcaaagatacaggaacaaggatattcccggtagcctgggaaactggcagtaaaccatatgaccatgataaggtctgttaagtaaattacagtccatccatacaatgttaaagagaataaactgacatgtaaactgtctgggacatgttaaacaaataagcatgaaacacagcatgtatggtatgtacttactttggttaaggaagtgtgtacacagaaaagaactctggggaaatttatgctaactctaacagtggttatctctgggatgataggatgtttatggagggctttcatttttacagtatttctgcaaatatattttatgatgactacgtattaatattacatttataagcagaaaaaccatacctacactcccttcaacacccacaatcaaatctccagtttctttttgtcagagccaatggaaaatcaatcagagcaaaggctttatcatcagagctgagctggacttgactaaaggctagctccatggcctttggcaagtgacaaaacctaagcttcggtttccggactgctacactggggtatctcacagggatacctgatgatttgatgtgataggttctgtgaggcacttagcataatgcctggcatagagcaagcactcaatgcactgcagtcaccactattattgttaggacaaggcctgtgggagaagggccatcctgcagacaatgccgggagatgggagaagccctgtgccccatttctacggtagtaccagcactaccaggagatctgaactagcctcacagatgtcttggcctctctgcttgtctacatggtcacccaacctgagattttgcctccttcctcacatcccaggcacccttcatctccactgccccctcctcacagatgctctgtggtaccatatagctcctgggggaggcggaatattcttattagtgagcagccgggtcctgggggagaaggtgtatactgtgtgcttcagcaagaacaaggcttagcaccagcccagacaatgtcacccacagaggagaaagcacttaatacatataagcttgaatttttttgtctgtttctttgtttttagtagagacgaggtatcgctgtgttgcccaggctggtctcgaactcctgggttcaagcgaccctcctgccttggcctcccaaagtgctgagattaccagcatgagccaccatgcccagccttgaattatttttttaatggatggggaagctggggcatagagaagggatgttctcccataaagtagcttatgtagacatcaagacagaagacatcagagaatcctagagtcctgatccagaacctcttggccattgactgtcctggatgtgtcagagagtgtggaatcccagaccagggaagtaattgacccaaggtcacagagcctgtaggagagccccaaaccattttccagcatctgcccattacccctctatcttctctttagtatctgaaggacattgcccaagaagggaacatgaaccttttaacataatcaggcttgggcttgcaaacccccaaatttattttagttccttctggatacattcccaaccagaacctttacctgcctgcagggtcttgtctgggatctgctccttgcccattcccaagaggagcagaggcaggccacaggatccattcccccttcccaggtacaaagacaatgaagttggaatcagctgttacctggtgccacagctaaggttagatgtgagcccagagagaacccagtattagcttgcaagctcatctgcgggagggcaatgcccttggagaaccaggagacccctggaaagcagaacagtcatccagtggagaaattaaaactgtgccagcctccaatggcaagagcacattaaccttccccaggcttctctggtccttatcccagtgcactaaattaccaaggaggaaaaccaaagtttgaattgatttcgcttttgttttctcacctaatatttaccaagggcctactgagtacagaatactcaactaggaatgaaaagattcccaaagaaagatctggactttgtccactagaagtgcacaatgtggtcagaagactggaaacactatagaaagggtgagcagtgctgtggtgaaaagagcccagccaggcaccaggaggcctggtttctgagtccagctttgccaatgactctcccagtgttttcagcaagtgtctctattaggtttggttttccttctccttaaaatgacagaagtgatggccgggcgtggtggctcatgcctgtaatgccagcattttgggaggtcaaggtgggtggatcactcgaggccaacagttcgagaccagcctggccaacatggcaaaaccccgtctctactaaaaaatacaaaaataagctgagtgtggtggcgcatgctggtaatcccagctacttggcatgagaattgcttgaacccaggaggcggaggttgcagtaagccaagattgcaccactgcactccaacctgggtgacagagagagactctgtctcaaaacaacaacaacaacaaaaagagaggagtagaccagagcagatcttaatgtggggtcccccggagcagtggttctaaatcgtaaagaccaaacacttcctctttacagcaaatagtgtctaaaatgtcccctttactattctgaagtgaaattcaaaatacagaaattctgaatattatatcccaataatataacccatcctacctacacatgtaatttaaaaatcaatataatctcctatggtaatagaaaagagatataaaagggaactaatttagaatatatattttttcaatacatgaatgagagggtaaggttgtacctttcccattgggaaccatggccccagaggttctacagtgggctccaggaaatctaaaattatgtgcctttttttcttttcttttcttttctttttttttttttgagacagagttttgctcttgttgcccaggatggaatgtaatggctcgatctcgactcactgcaaccttcgcctcccaggttcaagtgattctcctgcctcagcctcccaagtagctgggattacaggcatgggccaccacgcctggctaattttgtatttttagtagagatggggtttctccgtgttcgttaggctggtcttgaactcccggcctcaggtgatccacccgcctcagcctcccaaagtgctgggattacaggcgtgagccaccacgcccagccaaattgtgtgctttcatcagattctcaagggggtcagttacccaactaaagttaaggagccttatcctggagggtgtctgggggctctgtgagtctatgattagtgtcaaaatgaaccatgcagactctggagctgcaatgactccacttccctctggcctgtggttctctgatcaacccctttcttgtttctgaggccaagtatcttgctaggcagggccattatcgacctagtacttggtgcaatgaatgcaaaggacctctcctccagcatggctgattctggttgctaagactctatcatccagggcagagatgaagcttcactcttgccagagggactattggctctgaaagacctctagtacaggggaaaaatagatgactaacaccttcaccatgaggaaagagtgggtggtgtgtctaccctttgtctaaactatgcattttgtccagggtcaggaaaaggttaagtcttaggattaaatacaggatattttttttcttgctgagaacagtgagagaagaccgggatagggatggggcagaactagtgtttttgttttcacattcagttctcctgaagcggtgtttggctgaaatggaacaacttctcaaagaaacagggttagattaaaagcagcctgttcctctgccaaagtgtggaagctttctctgccaagtgcatgcccattttctctttccagaggaaaccactgctaatgtctattatcctatcaaatatcttccatctagaagcattacatgtttccataataaacagggcatacagtgctcgctttgtcagcacatacactaaaattgaaacaatacagagattagcatggcccctgcgcgaggatgacaatcaggttatcttaaataaataaatagaaaacaggacatacacaaacacacacacacacacacacacacacacatattcacaggaattgtctgtcattcactgtatgtttgaaggaattttgaaactgtcaaactcatcgcaggatttcaggaaactttcccattaggacaagcaccagagtggtatcatcagagaatctgggagtctaagcagacaaagaagtaaagccaaaagtatttttacctatgtagttacaaaaaagttacaaactgtttacatactgttctgcaacttgttttggcctcaggacacattgtggacagtttcctgtcacttctgtggagctaacctcttttttaaaaaatatatcagtattctatcacatggattacaacataaaattgttgaagcaattctcctttgatgaacatttgagttttcccaatctcttattattacaaatagggatgcaacgagcatctctgtccatttacctttttgcaggataaattcctggttcacaaagtttgcacattttaccttttgtcagaaattgaagagggccaggttttccagggtccaagtcaggcagaacaaatgcagcaatgtggaacagacggaaactccagctctgtcatttcctcactgtgtgtcaccagagtcacaccacctcctttttatcagctataaaacaggactactgctgaactcgtagagttgggggaaagagtgagataacatatagattaccaacccagtgctgcgacacacagctattattgttattacaactgctactgctgctgctaattctcctccctcctttcaaagtccagttcaagctctaactcctttaaaaagcgtttcacatgatttcagtctaccaggccctcttcttccaagctggtacagacgagatggtctctgtcactcatctggcacttggcatgttctgcctatttttttctctccatgaatgtcttgtcaaccccgctagattaagtttcagaaggtcaaggatcattacctaggctaccttcatccccatgacctgccacactgccttgctcagtcactaaacatcaacaaaaatcactgtccccaagccctttgccagaactgcctgaatgtctgtctggtttctgccttccctcagatgtcctgcggtttgacaacacctacagcttcattcatgccaagaaggtcaatttcactgtggaggtcctgcttccagacaaagcctcagaagagaagatgaaacagctgggggcaggcaccccgaaataacaccttctcctatagcaggcctggccccctcagtgtctccctgtcaatttctaccccttgtagcagtcattttcgcacaaccctgaagcccaaagaaactgggctggaggacagacctcaggagctttcatttcagttaggcagaggaagagcgactgcagtgggtctccgtgtctatcaaatacctaaggagtccccaggagctggctggccatcgtgataggatctgtctgtcctgtaaactgtgccaacttcacctgtccagggacagcgaagctgggggtggcggggggcatgtaccacagggtggcagcagggaaaaaaattagaaaagggtgaaagattgggacttaacacttcagggaagtcagctgccggggagaaacttgctcctaaatgaacacataagtttagatcgcaatgaggagtagcagggtagctggttgctagagttacggtggggatcagaaactcttccaaacattttagcactgaggctggggtagcttttggcttttcccaggtctcaggaggtggcctgagtcagcacacatcttcccactcggtagacaggctggcctctccctcactttgagactttggcaactcctgggccacacggcctgcctctttgattactaatgattgtcagtgactcagagcttcctgggacttcgggtacccacccgctgttctccatgcaaacaaagcgccagggaaatgacccacagggatcgcagctgcagggagggccagggaggttgggggtgggagtgaatgctaaaagcagatcgtccagtgcccttttcagtgctaccggcctctcaccaagcagtcctccatgtgagcaaccccgagacaaaaatgctaagtgggatcaagagagcagcactcggagagggtgtttgccagtctgagtgtcccgcggtgcccgccaacccgcttcctgactgacctgagcaaggtcttactaagcagtcccatctctgtgggaggcatgcaacgcgtgcagggagttcaggtgccggtcggcgtagccaggcctggaggccccccaggcaggaggccgcccaaaggcggggccggcgtctcgcagactaggggctgggggcggccacagacggcctcgaaaccacagcccttaccccaatcccacgagccccgccaacgaaccacaggtgctgggctttagagaacatgggaaggcggccccagacctgcgggaacgcctttccctcagagccaggccccggccccgtctgggaagctcatcttgcgaagctgagggagctcagggcaaaggccaggctagcgcggaccggaaggggccgaggctgcacgggcctctgccagaacgctcaggacatcccggcctgggtttacaacgctgttaggaaaattaaccaatgaataaagcaacgttcagtgcgcagggagtgaaattcaatgcccaccgctaggctcctcgctgcctctcactcaagaggcccaaactcagacggcgtcagggacccggacccagcagccgtttcacgccaatagatagggcgcatgcgcagaaatcctcctcggctctctagcgtgagctttcccaaggggccacgcccagcttgccttctgattggtccagctggtgggttgtcttccgccatctttgatcagggcactaaggatgctccccacggccttcacagtgacggcggagaccctgccccgccagctgctcagtacgtgccgcgtagcccgtgcgagccaagtgtgagtccgggcgagcgcctgcggagctagcactgggcccagaatgagagggaggcggaggagcagcgatcacgtggttttagggactgtctaataattccacgccagcattgccggtgtttcagggggtgggaaccgctgcgttccccatcaacttttctcccacccaccaccctccccaacctacaagcccagctcagcttgaggtaactgctgaccggactgtcctatacagccctacaagacagaggcgcctagggctgaaagcgggggcctccgtagggagccagcgggggcctcaatagttactcattttctctacctttgatgaaaataagagctaattcttaataaggcctaccgggtatcacgcaaaaaccctgtgcttactattacactttgggttgttgcaaagattaaaggaaataagccgtgcaaagcgcttaagagcttggtat

SEQ ID NO: 3566 - DNA, 17217 bp, Homo sapiens
tgcccaggtgatccaacagtatctgtcagggggtatgtgtggctatgacctggatggctgcccagtctggtacgacataattggacctctggatgccaagggtctgctgttctcagcctccaaacaggacctgctgaggaccaagatgcgggagtgtgagctgcttctgcaagagtgtgcccaccagaccacaaaggtgagtggaccaccatggctagaaatgagttgaccacagcagaggcattccagcagaagcagggatgtcacacaggaatataagcacagcttcagggccaaggcccagcctttttttttttttttttaatttttaaaacttttttagtagagacggggtttcatcatgttggccaggctggtcttgaactcctgacctcaagtgatccacccacctcggactcccaaagtgctgggattacaggtgtgagccactggacctggccgaggcccaggctttgggatttcctagaccagtgacatttccaagttttagaatattcccaaatatctattttgccatgtaaggactttaaaacaatgaccatctattgttgccatcattaacacccaaaactataagaatggcaataatctcagatgaaaaagcagtcctttaggaagctgcagtgagccaagatcgtgccactgcactccagcctgggcgacagagactccatctcaaaaaaaaaaaaaaaggagtcctttaaattgaataaatttagcttcataaaaaactcactacattattgttatttttctgatttatatggggacccagtgaaatcttactgtggaccaacccatccttgagcaagtatttgggtaccactggtgcaaatgatgtcagattcttgcttctctaattctgtatttaaaaaagataaggatggctgggtgtggtggctcatgcctgtaatcccagcactttgggaggctgaggtgggcagattgagcccaagagttcaagaccagcctgggcaacatggcaagagcctgtctctacaaaaaaaagtaaaaaattagctgtgcatagtggcatataccagctactagggaggctgaggtgagaggatcacttgaacttgggaagtcgaggctgcagtgagccgtgatcgcaccactgcactccagcttgggcaacagggctagaccctgcgccaaaaaaaataaggatagctgattcccttactgagaaaaagactgaagaacaagcaggagctgccacttccctcctgccctcctctcagcagttgtaaagatccagtgaaatgatgtcataaagtctaggaacattcccacactcatctacaaatgttcacagagagcctactgtgcgcagagaccctgcggagctggggatgcaggaagcattagacgtggatgcacccctgagggttcagggtgcacagaacgtctgtcctcgggcataagtggctctacgggtaccgtgcacagagcacacagtgactcaggaagggggaggccatcaggccaaactgcagaaccaaagccatctcagatgtcatctagatccacccagtcatgtactggaaaagaacacagagacctaggcaggaagagtgactcgcctagaccacaattctggcctggggtgattatctcagtttggaaaactctaggtccggccctaactagctctgattgctctctggatgcacagtgcaatcatttggcctggactggaacgggcttctgaagtaggacagcctgacaagacttcctgctctctgttccctgcagttggggaggaaggtggagaccatcaccataatttatgactgcgaggggcttggcctcaagcatctctggaagcctgctgtggaggcctatggagaggtgaggggcaggggtggggaggaaggggacagagggaaggggaggaggagtagacccctctcctaggctgtcctgtgggatgggtgaggcaatgggggcagattctgagcctgctggaatcaagagtgattttgtttccacagtttctctgcatgtttgaggaaaattatcccgaaacactgaagcgtctttttgttgttaaaggtaagttgggaatttcttgtgataaagccagatggaaaagaggggtcaaaaacatgactgcggcagatggagggtcaaacagtgagccaaaagagggggtctgaggacatgttcagaagactgctgcccctgctagtgtgctggctcacgcctgtaaccccagcactttgggaggccgaggcaggaggctctcttgagcccaggagtttgagaccagcctgggtaacacagcaagacctcatctctataaaaaagttaaggaaatgagctgggtatggtggtgcatgcctgtagttccagtttctcaaaaggctgaggcaagagcattgcttgagtctaggagtttaaggctgcagtgagccatgattgtgccactgcactccagcctgggcgacggagcaagtctccatctcaaaaaaataaaaatagggctaggtgcagtggctcactcctgtaatcccagcactttgggaggctgaggtgggcagatcacttgaggccaggagttcaagaccagcctggccaatatagcaaaaccccatctctactaaaaatatggaaattagctgggcgtggtggcccacacctgtagtcccagctactcaggtggctgaagcacaaaaatcacttgaacccgggaggtggaggatgcagtgagctgagagctcactgaggctgaggcaagagcactgcttgagcccaggagtaaaaggctgcagtgagctatgattgtgccactgcactccagcctgggtgacagagcaagactctgtctcaaaaaaataaaataaaaagaacactgcccttcacatacgcagactactttacaactcacagagctttcagtatttataatctcctttgagccacccagcctgatgagatgggaagagaccatttgattatatccactgtaaagatgggaaggctggacctcaaagatgcccatgctgagctgcacaccctgggctgcctatgtgggctccagagccctggggaacatgtggcccagcatgggctggcaggagggtagcaggtgctgcagaggacgctgttagggacagactgggcactgctcccagcctcacattatctggtctctgttccagcccccaaactgtttcctgtggcctataacctcatcaaacccttcctgagtgaggacactcgtaagaagatcatggtcctgggaggtaagtggtccagactgttctcaactccaaaggagggtctgtagcctaaatcgggtccagctttaggggtgtggccgtagccaccagggtgaaagctccctctgctagtttgggagcagtgggacccaggagcaagctggggtggagctagtgccttcttctgttttcctaagaactctttctctcagacactctagaagcaagcactgggtccattattgtagattcaaagatgaatgagactccagtccttgccctcaaggaacttacagtataacaggagacagaagacctagaaagagaggctgggtgcagtggctcatgcctgtaatcccaacactgggaggctcaggtgaaaggatcacttgaggccaggagctcaagaccagcctgggcaacaaagcgagaccctgtctttactaaaaaataaaaaatagctgggcataatggcgtgcacttgtagtcttagctatttggaggcttaggcaggaagatcccttgagcccaggagttcaaggctgcagttagctatgatcatgccactgcactgcagcctgggcaacagagcaagaccttgttttttaaaaaaagacctagagagagaaagctatgatataaactagaaaagacagtagactagtcatagagagggtgccatagaagttgcaggagcaaggttgctttcagttggggaaaactaggagcagcttcatttgacaagcacatagtatgtgccaggcctgagctactgccaagactacaaagatgaataagacagagtcctggctgggcacggtggctcatgcctgtaatcccagcactttgggaggccgaggtaggcggatcgcttgagcttaggagttcgagaccagcctggccaacatggtgaaaccccatctctgctaaaaatagaaaaattagccaggcgtcgtggtgtgcacctgtaatcccagctacttgggaggctgaggcaggagaatcgcttgaacccaggaggtggaaggttgcagtgagccgagattgcaccactgcactccagcctgggcaacagagactccgtctcaaaaaaaaaaaaaaaaaaaggggtcccttgaaggtcttttggcctctctgggaaagcagacacaaacaaatctatcagtatgctgtggtaaatgtacagaaggggaaaccacaaagtgcatgggagcactcagcgggagcacccactccacctgagctaggaagggggtgatgcctacctaagctgcgtgctatggaatgagtaagagtctgccagatggagcaaggcaggaagctgcttggcagaaagaagagcattgaacaaagaccttacatagcatggcagaggcagctgttatagaatgtgaggcagggtgtggcaaggtatgaggctggagagggaaccaggagtcaggccccagagaatcccgggcactaggttgaaaagctgggatatgactctacaggccactgggaatcagagttttcagcaggggagtaccacaaattttaaaccaagacacagtactagcaagattgcgaaggctaccagtttgcacgagcctctgtctctacaaaaaaaagtaaaaaattagctgtgcatagtggcacataccagctactagggaagctatagatttgtttgtatctgccttcccagagaggccaaaagaccttcaagggaccccctttttttttttgagacagagtctctgttgcctaggctggagtgcagtggtacaatctcggcacaatgttgtcacagtccacgcaagaggtgttgcaagcctgaatcggggaattggcaacagggatagagaggagaggatggatttaagaattatttagggccaggcgcagtggctcaggcccataatcccaaacactttgtgagtgtttgggaggcccaagtgggtggatcgcttgagcccaggaattccagatcagcctggacaacatggtaaaactccatctctacaaaaaatacaaaaattagccaggtttggtggtgtgtgcctgtagtcccagctacatgggagggtgaggtgggaggatcgcttagcccaggagttcgaggctgtggtgagtcatgatgggtgccactgcactccagcctgggcaacagagcaaaaccctgtctcaaaaaaaaaaaacaaacaaaaaaacaaaaaaaaaacaaaaaaaacttatatagaaagtaaaacagcagaactcaattgactagatgtaggaagtaagggagaaagctagaatgagctcctggtgtctggcagaggtgactgagagatggtgacgcattagttcaactggggaaaacaaaaaagcttgaagttgagcttgaggagtctgtgagatataaaaatgttgggaatacctgagtttgaagcttaggagaaaactctggtctggagatttgggagttatcaaataacagcagcagctaaaaccttgtcagtacgtaagactgcctacggaggaacagaggcagaaccctggggaacatccgagctcaagagcaggcagagaaagcgaacccagcagggagactgagaagtgattaatgaggttggcagagaagcaagtcaacagggaatggatatgcagggaagtaggggcaacatcagggtacaaggaaaagtgtgacccaaaacccagcaaagaggacacacaggcatcaagccagccagggacaggcaggagttcagttttgctgaagtggagtggagggagaaaaggctagaaaggtagattgggcatccaggtgtggtggctcacacctgtaatcccagctactcgggaggctgaggcaggaggaccacttgagcacaagagtttgagaccagcctgggaaacatagtgagacaccgtttcaaaaacaaaacaaaaaggtatattgggacaggctcatgaaagggtgaatgccacctatggcactgaactttgggggtaggtaagagggattctgaaggcttcacaatgttcatcttttggtgacacacgagaattggagattttccaaatgtatgctagtgagacccggggagtgaagtgaactcatcagggaagtgtaggacttctgggttccagacttagctctggcagcaacaagctcaagctctgttttttttttttcttttttaaatttaggtccccacaaaagcattcttttttcttttttgagggagccttgctgttgctcaggctggagtacagtggcgtgatcacggcttactggagcctcaatctcctgggctcaaatgatcatcccacctcagtctcctgagcagctgggactacagccagcacacccacctaaatttttatttttggtagagacgggagctcactatgttgcccaggttgatcttgaactcctgggatcaagcaatcctcctgcctcagcctcccaaatcactgggattacaggcatgagccactgcacccagccagctctctgctttttgttgcctcagttattctctctgtaagatgggaagaatcctcctggccttatcccaactctccagctggactgggggaagaactataaaagctgagcaagaggtttttatgatttttgttttttctgctgctaccacccaccatgggcatgagacggtttggtttcctggcagcagagctgtgtaggaggttcagtctgttcccctaccacacctaaaactctttcaaccaaacctgcctcaggctgggaagatacagaattttcaacagaggggggagattcactcgggctggtcactggagcttagcagtgcagattaaatcaccccaagaccacagacactgtgttcccaggagttgcatggtctttggtccctaaaaatctgagggctggcagactctggacagtttctgcgggtctccagccagcatgacactggcttgtaccccagggcctggagctgctgcctatatatgctctatatagtaggcataggcaggttttagtatcaaaatattgtacctggctgatatttgtgaatttggattggtgaagtggttcttagcattggctgtgctagagtcaaactctcctagacaggaaggagcttgggtattttaaaaaaaaaaaaaaagagccaaattactggtggctcaacagctgaaaacaatgggagcagaagtgaaatggtggctggggtaaagccaagaatccatttaaggggtgactctacagagatgcatttacttattaagtcacgacttagctgtaggggaaggtgggggaaagacacatagttctgccctcacagtgttcagtataatcaggacagggtatgtgcattcaggccttcctgcccgccacacgtgctgtttcctctgcatggaatgtccttctaccctttctttgtcccctctcctgctgtacttcaatgtatcacctccatggggtaataacatactcttaacgtgtataaggcactttatggtttaaaaagccctctcggccgggcgcagtggctcatgcctgtaatcccagcactttgggaggccgaggtgggtggatcatctgaggtcaggagttcgagaccagcctggccaacatggtgaaaccctatctctactaaaaatacaaaaaattagctgggtgtggtgtcgggcgcctgttgtcctagcttctcaggaggctgaggcggaagaatcacttgaacccgggaggcggaggttgcagtgatccaagattgcgccactgtactctagcctaggcaacagggtgagactctgtctcaaacagaaaagccttctcaagtacttagttcatttcactcccaccataaccaggcagggcaagaatgtcacttagctgttcagacacgagggcaggaaccagggtctcgatttctggcctggggcagagccatcctctggctcctgctgaaccccctgcagtactatgcatgcactgtgtgctcctaatgcaggaatttgaggcggggtgttgtggggtgcaatggatgggttttttctgcctctttagtgtagaccactagggttatggcgaaatcttacctagtgttgagatacatctttatccttccttccctctcctgccagcaaattggaaggaggttttactgaaacatatcagccctgaccaggtgcctgtggagtatgggggcaccatgactgaccctgatggaaaccccaagtgcaaatccaaggtatgagccgccagaggctagaggtgaacagggatgcctggctcaaatgcacattccagttcactccatgccatgcttctagatcaactacgggggtgacatccccaggaagtattatgtgcgagaccaggtgaaacagcagtatgaacacagcgtgcagatttcccgtggctcctcccaccaagtggagtatgagatcctcttccctggctgtgtcctcaggtaggggcctgggcccttccaggagacccgagctttcatctataggtcctgataggtgggctggaataggagaagccctggtgccaggaccccggagagggcacacacagacagaattatgtctcaattggtgatatcccctgcaggtggcagtttatgtcagatggagcggatgttggttttgggattttcctgaagaccaagatgggagagaggcagcgggcaggggagatgacagaggtgctgcccaaccagaggtacaactcccacctggtccctgaagatgggaccctcacctgcagtgatcctggcatctgtaagtatctctgccttggcaatgccttgaagccccatgtccagctttctgcctgtgaggttcctcttcctccatggatttttggctctgagtgttagaactagaagtggaatgccatcagttcaatcctctccttgtatagatgaagaaatctagccttggagacttgtttatggtgacccaactggttaacagcagggtgggactttgatctcatactcctaggtatgggtgagtcacagtcctaggcgatcacaggggttcaacacgtctgctttctggtccaggtctaactgggtctgtgactggacagatatttcttggggatgctccttcccagaggtcacagagacagaactggctgggtgggcatgggatcacaaggtaagcagatgctcaaaagtgcagccttcacccctgagtttcactcatctcccagctgaccaaagaatggacacagactatgagcaggcagtttacacaagaatataagaatgggaaacagacatttgaaaaggtgcttaatctctcttaactttgtaataccattaaaattccccttgactcagcaattctacttgtgaaaatttatcctacagaaatacacaaatactcaaagatacaggaacaaggatattcccggtagcctgggaaactggcagtaaaccatatgaccatgataaggtctgttaagtaaattacagtccatccatacaatgttaaagagaataaactgacatgtaaactgtctgggacatgttaaacaaataagcatgaaacacagcatgtatggtatgtacttactttggttaaggaagtgtgtacacagaaaagaactctggggaaatttatgctaactctaacagtggttatctctgggatgataggatgtttatggagggctttcatttttacagtatttctgcaaatatattttatgatgactacgtattaatattacatttataagcagaaaaaccatacctacactcccttcaacacccacaatcaaatctccagtttctttttgtcagagccaatggaaaatcaatcagagcaaaggctttatcatcagagctgagctggacttgactaaaggctagctccatggcctttggcaagtgacaaaacctaagcttcggtttccggactgctacactggggtatctcacagggatacctgatgatttgatgtgataggttctgtgaggcacttagcataatgcctggcatagagcaagcactcaatgcactgcagtcaccactattattgttaggacaaggcctgtgggagaagggccatcctgcagacaatgccgggagatgggagaagccctgtgccccatttctacggtagtaccagcactaccaggagatctgaactagcctcacagatgtcttggcctctctgcttgtctacatggtcacccaacctgagattttgcctccttcctcacatcccaggcacccttcatctccactgccccctcctcacagatgctctgtggtaccatatagctcctgggggaggcggaatattcttattagtgagcagccgggtcctgggggagaaggtgtatactgtgtgcttcagcaagaacaaggcttagcaccagcccagacaatgtcacccacagaggagaaagcacttaatacatataagcttgaatttttttgtctgtttctttgtttttagtagagacgaggtatcgctgtgttgcccaggctggtctcgaactcctgggttcaagcgaccctcctgccttggcctcccaaagtgctgagattaccagcatgagccaccatgcccagccttgaattatttttttaatggatggggaagctggggcatagagaagggatgttctcccataaagtagcttatgtagacatcaagacagaagacatcagagaatcctagagtcctgatccagaacctcttggccattgactgtcctggatgtgtcagagagtgtggaatcccagaccagggaagtaattgacccaaggtcacagagcctgtaggagagccccaaaccattttccagcatctgcccattacccctctatcttctctttagtatctgaaggacattgcccaagaagggaacatgaaccttttaacataatcaggcttgggcttgcaaacccccaaatttattttagttccttctggatacattcccaaccagaacctttacctgcctgcagggtcttgtctgggatctgctccttgcccattcccaagaggagcagaggcaggccacaggatccattcccccttcccaggtacaaagacaatgaagttggaatcagctgttacctggtgccacagctaaggttagatgtgagcccagagagaacccagtattagcttgcaagctcatctgcgggagggcaatgcccttggagaaccaggagacccctggaaagcagaacagtcatccagtggagaaattaaaactgtgccagcctccaatggcaagagcacattaaccttccccaggcttctctggtccttatcccagtgcactaaattaccaaggaggaaaaccaaagtttgaattgatttcgcttttgttttctcacctaatatttaccaagggcctactgagtacagaatactcaactaggaatgaaaagattcccaaagaaagatctggactttgtccactagaagtgcacaatgtggtcagaagactggaaacactatagaaagggtgagcagtgctgtggtgaaaagagcccagccaggcaccaggaggcctggtttctgagtccagctttgccaatgactctcccagtgttttcagcaagtgtctctattaggtttggttttccttctccttaaaatgacagaagtgatggccgggcgtggtggctcatgcctgtaatgccagcattttgggaggtcaaggtgggtggatcactcgaggccaacagttcgagaccagcctggccaacatggcaaaaccccgtctctactaaaaaatacaaaaataagctgagtgtggtggcgcatgctggtaatcccagctacttggcatgagaattgcttgaacccaggaggcggaggttgcagtaagccaagattgcaccactgcactccaacctgggtgacagagagagactctgtctcaaaacaacaacaacaacaaaaagagaggagtagaccagagcagatcttaatgtggggtcccccggagcagtggttctaaatcgtaaagaccaaacacttcctctttacagcaaatagtgtctaaaatgtcccctttactattctgaagtgaaattcaaaatacagaaattctgaatattatatcccaataatataacccatcctacctacacatgtaatttaaaaatcaatataatctcctatggtaatagaaaagagatataaaagggaactaatttagaatatatattttttcaatacatgaatgagagggtaaggttgtacctttcccattgggaaccatggccccagaggttctacagtgggctccaggaaatctaaaattatgtgcctttttttcttttcttttcttttctttttttttttttgagacagagttttgctcttgttgcccaggatggaatgtaatggctcgatctcgactcactgcaaccttcgcctcccaggttcaagtgattctcctgcctcagcctcccaagtagctgggattacaggcatgggccaccacgcctggctaattttgtatttttagtagagatggggtttctccgtgttcgttaggctggtcttgaactcccggcctcaggtgatccacccgcctcagcctcccaaagtgctgggattacaggcgtgagccaccacgcccagccaaattgtgtgctttcatcagattctcaagggggtcagttacccaactaaagttaaggagccttatcctggagggtgtctgggggctctgtgagtctatgattagtgtcaaaatgaaccatgcagactctggagctgcaatgactccacttccctctggcctgtggttctctgatcaacccctttcttgtttctgaggccaagtatcttgctaggcagggccattatcgacctagtacttggtgcaatgaatgcaaaggacctctcctccagcatggctgattctggttgctaagactctatcatccagggcagagatgaagcttcactcttgccagagggactattggctctgaaagacctctagtacaggggaaaaatagatgactaacaccttcaccatgaggaaagagtgggtggtgtgtctaccctttgtctaaactatgcattttgtccagggtcaggaaaaggttaagtcttaggattaaatacaggatattttttttcttgctgagaacagtgagagaagaccgggatagggatggggcagaactagtgtttttgttttcacattcagttctcctgaagcggtgtttggctgaaatggaacaacttctcaaagaaacagggttagattaaaagcagcctgttcctctgccaaagtgtggaagctttctctgccaagtgcatgcccattttctctttccagaggaaaccactgctaatgtctattatcctatcaaatatcttccatctagaagcattacatgtttccataataaacagggcatacagtgctcgctttgtcagcacatacactaaaattgaaacaatacagagattagcatggcccctgcgcgaggatgacaatcaggttatcttaaataaataaatagaaaacaggacatacacaaacacacacacacacacacacacacacacatattcacaggaattgtctgtcattcactgtatgtttgaaggaattttgaaactgtcaaactcatcgcaggatttcaggaaactttcccattaggacaagcaccagagtggtatcatcagagaatctgggagtctaagcagacaaagaagtaaagccaaaagtatttttacctatgtagttacaaaaaagttacaaactgtttacatactgttctgcaacttgttttggcctcaggacacattgtggacagtttcctgtcacttctgtggagctaacctcttttttaaaaaatatatcagtattctatcacatggattacaacataaaattgttgaagcaattctcctttgatgaacatttgagttttcccaatctcttattattacaaatagggatgcaacgagcatctctgtccatttacctttttgcaggataaattcctggttcacaaagtttgcacattttaccttttgtcagaaattgaagagggccaggttttccagggtccaagtcaggcagaacaaatgcagcaatgtggaacagacggaaactccagctctgtcatttcctcactgtgtgtcaccagagtcacaccacctcctttttatcagctataaaacaggactactgctgaactcgtagagttgggggaaagagtgagataacatatagattaccaacccagtgctgcgacacacagctattattgttattacaactgctactgctgctgctaattctcctccctcctttcaaagtccagttcaagctctaactcctttaaaaagcgtttcacatgatttcagtctaccaggccctcttcttccaagctggtacagacgagatggtctctgtcactcatctggcacttggcatgttctgcctatttttttctctccatgaatgtcttgtcaaccccgctagattaagtttcagaaggtcaaggatcattacctaggctaccttcatccccatgacctgccacactgccttgctcagtcactaaacatcaacaaaaatcactgtccccaagccctttgccagaactgcctgaatgtctgtctggtttctgccttccctcagatgtcctgcggtttgacaacacctacagcttcattcatgccaagaaggtcaatttcactgtggaggtcctgcttccagacaaagcctcagaagagaagatgaaacagctgggggcaggcaccccgaaataacaccttctcctatagcaggcctggccccctcagtgtctccctgtcaatttctaccccttgtagcagtcattttcgcacaaccctgaagcccaaagaaactgggctggaggacagacctcaggagctttcatttcagttaggcagaggaagagcgactgcagtgggtctccgtgtctatcaaatacctaaggagtccccaggagctggctggccatcgtgataggatctgtctgtcctgtaaactgtgccaacttcacctgtccagggacagcgaagctgggggtggcggggggcatgtaccacagggtggcagcagggaaaaaaattagaaaagggtgaaagattgggacttaacacttcagggaagtcagctgccggggagaaacttgctcctaaatgaacacataagtttagatcgcaatgaggagtagcagggtagctggttgctagagttacggtggggatcagaaactcttccaaacattttagcactgaggctggggtagcttttggcttttcccaggtctcaggaggtggcctgagtcagcacacatcttcccactcggtagacaggctggcctctccctcactttgagactttggcaactcctgggccacacggcctgcctctttgattactaatgattgtcagtgactcagagcttcctgggacttcgggtacccacccgctgttctccatgcaaacaaagcgccagggaaatgacccacagggatcgcagctgcagggagggccagggaggttgggggtgggagtgaatgctaaaagcagatcgtccagtgcccttttcagtgctaccggcctctcaccaagcagtcctccatgtgagcaaccccgagacaaaaatgctaagtgggatcaagagagcagcactcggagagggtgtttgccagtctgagtgtcccgcggtgcccgccaacccgcttcctgactgacctgagcaaggtcttactaagcagtcccatctctgtgggaggcatgcaacgcgtgcagggagttcaggtgccggtcggcgtagccaggcctggaggccccccaggcaggaggccgcccaaaggcggggccggcgtctcgcagactaggggctgggggcggccacagacggcctcgaaaccacagcccttaccccaatcccacgagccccgccaacgaaccacaggtgctgggctttagagaacatgggaaggcggccccagacctggcgggaacgcctttccctcagagccaggccccggccccgtctgggaagctcatcttgcgaagctgagggagctcagggcaaaggccaggctagcgcggaccggaaggggccgaggctgcacgggcctctgccagaacgctcaggacatcccggcctgggtttacaacgctgttaggaaaattaaccaatgaataaagcaacgttcagtgcgcagggagtgaaattcaatgcccaccgctaggctcctcgctgcctctcactcaagaggcccaaactcagacggcgtcagggacccggacccagcagccgtttcacgccaatagatagggcgcatgcgcagaaatcctcctcggctctctagcgtgagctttcccaaggggccacgcccagcttgccttctgattggtccagctggtgggttgtcttccgccatctttgatcagggcactaaggatgctccccacggccttcacagtgacggcggagaccctgccccgccagctgctcagtacgtgccgcgtagcccgtgcgagccaagtgtgagtccgggcgagcgcctgcggagctagcactgggcccagaatgagagggaggcggaggagcagcgatcacgtggttttagggactgtctaataattccacgccagcattgccggtgtttcagggggtgggaaccgctgcgttccccatcaacttttctcccacccaccaccctccccaacctacaagcccagctcagcttgaggtaactgctgaccggactgtcctatacagccctacaagacagaggcgcctagggctgaaagcgggggcctccgtagggagccagcgggggcctcaatagttactcattttctctacctttgatgaaaataagagctaattcttaataaggcctaccgggtatcacgcaaaaaccctgtgcttactattacactttgggttgttgcaaagattaaaggaaataagccgtgcaaagcgcttaagagcttggtat

SEQ ID NO: 3567 - DNA, 694 bp, Homo sapiens
gggatgggatctcgctgtgtcacccaggctggagtatagtagcgagatctcagctcactgcaaccttcacctcctaggctccagcaatcctcccacctcagcctcccaagtagctgggactagaggtgcatgccaccacctgtagctaattagtttttttgttttgttttgttttgtttttttggagagacgaggtctcactgtattgcccaggctggtatgttcatctttgaactgtggtgtcaaggtctcaggattggatgtgagactgtggaggagataaactttgtgcaagggggaaggccaaatgataagaggatccggggttcattttcactgagaggacggaagacctttaagttgattataaccactggagtaaagctctcttgaccctgaagttacaatagctgcccccagctgccctgaactttgacctgctctcctcgcaaacctggggcctgtggtgccccagaagttctcagtaaaggctctcatgttagcttctgcttgtaggatggtctgagggttagctggagagatgactgagaggaactggccctatcatgggaatatgggaatctccccatccttggacacccagtcctgctaacctaaccctgaccagaactgtttccctgttacagccagaagcttcgacctgcagaagtcggaggccatgctccggaaggtg

SEQ ID NO: 3568 - DNA, 546 bp, Homo sapiens
gtcacagagacttagtgaagtgcacacattgctcacctgggtgaactgaggtccagcgggggaaggcttcctcctgttgtaatcactaaccccaactctgtctcccttgcccgattcattcattcgttaattaattcatccaacatcctgtccccaagaagctcagtctggggacatactgatccagttaaatgcgagtgcttcctagttatacatggcgactgctgagaagggactccagagtccaggcacctacctcccaggggctcaccgttcactcctctagcctcatttagagctcgcattaagagcacgggatctggatccacactgtttggattcaaatcacaacttcaccacttagcagctgtgtgttctgggaaaatgacccaccttctctgtgcctccattttctcacctgtaaaacgggctcccaggctggtgggagggtttcaggtgtaagacatggagagtcctttagcgaacatgtagactggcaataaactcaataaatggtgactgttataattaatcctcggaaccatc

SEQ ID NO: 3569 - DNA, 694 bp, Homo sapiens; identical to SEQ ID NO: 3567

SEQ ID NO: 3570 - DNA, 546 bp, Homo sapiens; identical to SEQ ID NO: 3568

SEQ ID NO: 3571 - DNA, 351 bp, Homo sapiens
gaagcttctagattctgacagcagtttacaggacatatggaggtagaggaacatgtgaaactacaccatgaggatacagtcagccatattcattatgtggggaattacagagctgtgcttttcagtatggtagccactaatgtgtggcacttcaataaaatgaaaaatcaggctaggtgcagtagctcatgcctgtaatctcagcactttgggaggccaaggtgggtggatcacttgaggtcaggagttcaagaccagcctgggcaacatggtgaaaccctgtctctactaaaaatgcaaaaattaactgggtgtggtggtgcaggcctgtaatcccagctactagggggg

SEQ ID NO: 3572 - DNA, 351 bp, Homo sapiens; identical to SEQ ID NO: 3571

SEQ ID NO: 3573 - DNA, 247 bp, Homo sapiens
cctgccccgatcagcctagtttaatctgcatctcttttaaataaccatttttgttaatttcttatgttttcttccagagttttttgttaaaaataaagatgtgaacggatgcacgtagtcttattcctcccaggcatatgtaatcaagctgagcataacctaaaggaaaataaccacgttataggtgttgcgatacaatacaacaggaactacacaattcaacttatgaagtatttttgccaagaag

SEQ ID NO: 3574 - DNA, 171 bp, Homo sapiens
aaaaaattagctgggtgtggtggtgcaagcctgtaatcccggctactctggaggctgaggcatgagaatcttgaaccagggtggtggagcttgcagtgagctgagatcatgccactgcactccagcctgggtgacagagggagactcagtctgaaaaagaaaaaaaaaaaa

SEQ ID NO: 3575 - DNA, 247 bp, Homo sapiens; identical to SEQ ID NO: 3573

SEQ ID NO: 3576 - DNA, 171 bp, Homo sapiens; identical to SEQ ID NO: 3574

SEQ ID NO: 3577 - DNA, 601 bp, Homo sapiens
ttgggctggtgcgtctactttcagtctgagggtgccttgatgctggctcatcacacattgagtatcttgggcattatcatggcccttgtgcttggggagtctggcacagaggtcaatgcagtcctctttggaagtgagcttaccaaccccttgctacagatgcgctggtttctccgggaaacagggcactatcacagtttcactggagatgtagtggacttcctctttgtggctctgttcacaggagtgaggattggtgtgggagcttgcctccttttctgtgaaatggtctcccccacgcctaagtggtttgtgaaggctgggggagtagcgatgtatgctgtgtcttggtgtttcatgtttagcatctggcgctttgcatggaggaagagcatcaagaagtaccatgcttggagaagcaggcggagtgaggaacggcagctgaaacacaacggacatctcaaaatacactagccaaggcttgctccagattatggattgggttaagtcagccatgggaaccaggttggaaatatgactgttacataattacacttataactaacttaggtttcaataaagggctaaatgtattgatcaa

SEQ ID NO: 3578 - DNA, 2969 bp, Homo sapiens
gagaatactccatggtagttgggaataagtgagaactgtgaagtgagtacaactggcatttgttttcatttgtggtgaccctgggtcctcctgtccctgggaggtttgatgttcaggcagtttagaaaggaactcgaaaaagattagtgctatttcttgttcctttgagaagtaactctttcaataaacacttatttctgctttccatatagcaatttatctaagtttaccccatttactataaagtgaggggcttacaggaagagacacgcctttgacattctgaacattagatcggggaattgggtcgcttaaacagaggggcataggagggtgagagtgaaactggcagtgagggggagggctacttactgaacctcctataccaactgtgccagaggtgcccaagaccactgccaggttctgtaattctctgggaagactcagtggactcagcatatagtcttacttatagttttgatttattatagtgaaaagatacaaagaaaaatcggtaaaaggaaaaggcacctgagacaaagtctagggtaaagcaagcacaagtttccagagtcctctcccaatggaatcacacaggatgcacttaattcccctagcagtgatttgttacgacatgtgaatgagttgtctactggacaaggtcactacagactcagtgcccaaagtttttactgaggacaggtcatctaggcaggctttccctggcagatagcaaaattcaagactctcaaaaggaaagcaggtgttcagcataagccatattgtttgcacaagcagttcagacacagtaagccagtcttatcagttaattgtgggagcccctccaaaatctaagttcccaaatgccggccagtggccaaccctgtaatcaggcctctccaaggatagcagtttaggcctgctatgttaactcttttctgcacaaaacctatagagttagggctttggatctgagatgaatgaagtgtgggtagatttactgagtcctgttatatgggttctgccctaccaggaaaactatgccagttctcagggcttttgtgcattaatctcctaggcatttgaggctatgactaaattccatagggatttatcatgtggattccactgtgcttgagatggcagtttagatttcagctctgctgtacatattgcaaactagagccaaagactttaaagtgtgtactggcctcagggggatgaggttaatttttttttttcattttagatactttcccttttagtactcctcctacttttcttatttttactaaaaaggtaccactctatgaacaaactaataaaacaaggccagtcttggaaggaaaaaaataataattcttagtgtgacagtctccaagagaagcaagaatataagcttagaacaaggggttaagaatccagaattcctgggttcttttaactaattttgctactcacttgccactttggagagctactcactcactttggataggttacttgtttcttctttgcctgagtttaaacctattgtgaatgaatgaaataccctgtagtatatttcataaatacattatgtggcattttattaatggaggtctttaatgtagggcttttatggaaatatgaagtatttatgtatttattgattatttatttttaccatgttattgaagtcaatggtgtttgattagctcagtgggtgagcaagcatatggtgctactggagtcaaggctggtcagtaggaagcatcagtccattccatggccactggtaatctaacgtaatgaatggtgtcttttgttgttgttgttgttgttgttgttgtttgagacagagtcttgctctgtcgcccaggctggagtgcagtggtgtgatctcaactcactgcaacctccgccttctgtgttcaagtgattctcctgcctcagcctcccgagtagctgggactacaggcgtgtgccaccatgcctggctactttttgtatttttagtagagacggggtttcaccatgttggccaggctggtcttgaactcctgacttcatgacccacccgcctcggcctcccaaagtgctgggattacaggtgtgagccaccgtgcccagccatgagcggtcttgaaaatgaaaaatggtcttggccacagaaaccaggtatgagggagtggttggaatggtataaagtcatcactgttagggaaacagtaactttaaatgcatgttaacagtgggtctttaaaaatgaatgtcatttggttaaagagttttgctgggcattgagataatctgacagcatctccacttcctgtttttggtcctaagctccactgtttttttttctatgatgagcgcccctaaaatgctggtaagcttctgtccaacaaaattgcggtcaaagtaggatgctggggaatgctgattttagcaaaagcttgtagaaaagagtggcctggcacatgagcttaaaaaaagaaaaaaagctggctcttgaattttggcacagtgcaacctgttccataccagacaaatgaacaggcttaatctggtaccaattctttttctctcttactcctcagaagtgaagggactgcagatcttgttgttttggggacactttcatggaactgtatgtaggtttttttgaatggtgagaaatctgaataattggtaaggggaagggaatccctcatttcagcttttcttgatgttgttactaataactatgaaaaaacttctgagagaacaatgtgaactgaagatgactcagcagttaagacaatgctaagttctgaaaccacaggtaaatgaagggctaattaatgtgtggtatacttggacaaaatgaagtactcatttgcactggattactgtgtaatgataacgaacactgttcaagaacgatttatatttccataagatttgtactaaattttataaaagtaaaacaactttttataaaccca

SEQ ID NO: 3579 - DNA, 573 bp, Homo sapiens
ctaattaaagattaatgtgttgtaattagcattaaaaatgcaattaaattgtgagtaaatggaccaggaatagaaaattgttagacgtctcactgcctggttttcatattctgccttttgtttttgcagcaaatagaggaagcggggcagccggcagctcccagactggagatgctctggggaaagcacttgcttcggtgaggaaatattgactttggactccatatgtaccattgtaaagggtgaactttaatcagaagtggacatttggaattttagaaaatgaatggcaaatagctttgatttttggaaaatgctagctttcttgcataacagtcactggaaaatttgagaaggctctgaagcttccagtatatagtctctttctctcatcctcaaaatggtactaagctgcactcaattatggatgtgggaatattctcctggtctttgggtttataggttttttatactgatgtcttatttttctctaaagtaatatgggtgcacattgaccagctaagactgtcttagcaaggaatagttctaaaacactttgaaagaggcatttga

SEQ ID NO: 3580 - DNA, 573 bp, Homo sapiens; identical to SEQ ID NO: 3579

SEQ ID NO: 3581 - DNA, 573 bp, Homo sapiens; identical to SEQ ID NO: 3579

SEQ ID NO: 3582 - DNA, 573 bp, Homo sapiens; identical to SEQ ID NO: 3579

SEQ ID NO: 3583 - DNA, 490 bp, Homo sapiens
gtagataaaaataccagtgtttaaggcagtagagataagcttcatgaatatgtagacttactttatctctggaattcgaggccatattgacttttagtagcataccagttcactttttttagtgtgaacacagacttttaaatatgtggagaatatatgttatttaaaacattaaaaatattttctctccttgttagccagacctgttgtggaaatttttgtttgtttgtttggtgtactgtaggactgtgagacgaataccccgttttgctatgtatcaaatttctatttatttgaaaacagatggaagttatttgtgaagataattccatttactataaaataatataaagaaaagccagactctgaggactccagagacctgaaagtagtctatacttgtcagcaatgaccgtcacatagcttgctacattcaccagctcatcaacagcaaggggaaagtcatagcaaggaaaccactttatcttta

SEQ ID NO: 3584 - DNA, 490 bp, Homo sapiens; identical to SEQ ID NO: 3583

SEQ ID NO: 3585 - DNA, 490 bp, Homo sapiens; identical to SEQ ID NO: 3583

SEQ ID NO: 3586 - DNA, 490 bp, Homo sapiens; identical to SEQ ID NO: 3583

SEQ ID NO: 3587 - DNA, 864 bp, Homo sapiens
gagttcccctgaccaggactgggacttagctgagaggaatgagatgcccagggcaaaatgtaaggaggcgctgatgctcagggtcctgcggtgccacctgaagatgagcgcctcctgcattttccttccctaggtgcctcacctgactcaccctcatcctggccccacctccactctgaaccaggcactattctcaattctggggaagtaacagtgaaccaaacaggtagagctccctgcctacacggaccttccattatagaaggggaggcaggcagagctagtacccactgaggctcccacgggcgcagtgactgccccaggcatagcagcagccaatgctcaaggctttgaccctcctgtcccgtggtctttctcctaagtcatatgtactggaccccatgggtgcccagcagagtcagcgttgtaacttgggccacctgtggacctcagctaatggtggtgtttccagtgtggaggcggtggttggggaggatgtcctggaaaagcccagctaggggctagtgtggggacctgtcctagagggactgcctctctgactctaagcagagttctctccgtcccttccagcctcctacgtgatcacagacctgacccagctgcggaagatcaagtccatggagcgggtgcagggtgtgagcatcacgcgggagctgctgtggtggtggggcatgcggcaggccaccgtccagcaacttgtggacctcctgtgccgcctggagctctaccgggctgcccagatcatcctgaactgtgagtaactcagggccctccttgagtggggcccatcacgctcctgagcagtttccatccgtgtgagttgcactctctggccttaatact

SEQ ID NO: 3588 - DNA, 435 bp, Homo sapiens
gagttcccctgaccaggactgggacttagctgagaggaatgagatgcccagggcaaaatgtaaggaggcgctgatgctcagggtcctgcggtgccacctgaagatgagcgcctcctgcattttccttccctaggtgcctcacctgactcaccctcatcctggccccacctccactctgaaccaggcactattctcaattctggggaagtaacagtgaaccaaacaggtagagctccctgcctacacggaccttccattatagaaggggaggcaggcagagctagtacccactgaggctcccacgggcgcagtgactgccccaggcatagcagcagccaatgctcaaggctttgaccctcctgtcccgtggtctttctcctaagtcatatgtactggaccccatgggtgcccagcagagtcagcgttgtaacttgg

SEQ ID NO: 3589 - DNA, 861 bp, Homo sapiens
  SITE (62): n equals a,t,g, or c
ttcccttgaccaggactgggacttagctgagaggaatgagatgcccaggcaaaaatgtaagnaggcgctgatgctcagggtcctgcggtgccacctgaagatgagcgcctcctgcattttccttccctaggtgcctcacctgactcaccctcatcctggccccacctccactctgaaccaggcactattctcaattctggggaagtaacagtgaaccaaacaggtagagctccctgcctacacggaccttccattatagaaggggaggcaggcagagctagtacccactgaggctcccacgggcgcagtgactgccccaggcatagcagcagccaatgctcaaggctttgaccctcctgtcccgtggtctttctcctaagtcatatgtactggaccccatgggtgcccagcagagtcagcgttgtaacttgggccacctgtggacctcagctaatggtggtgtttccagtgtggaggcggtggttggggaggatgtcctggaaaagcccagctaggggctagtgtggggacctgtcctagagggactgcctctctgactctaagcagagttctctccgtcccttccagcctcctacgtgatcacagacctgacccagctgcggaagatcaagtccatggagcgggtgcagggtgtgagcatcacgcgggagctgctgtggtggtggggcatgcggcaggccaccgtccagcaacttgtggacctcctgtgccgcctggagctctaccgggctgcccagatcatcctgaactgtgagtaactcagggccctccttgagtggggcccatcacgctcctgagcagtttccatccgtgtgagttgcactctctggccttaatact

SEQ ID NO: 3590 - DNA, 864 bp, Homo sapiens; identical to SEQ ID NO: 3587

SEQ ID NO: 3591 - DNA, 101 bp, Homo sapiens
cctgtaatcccagctactcaggaggctgaggcaggagaatcgcttgaacctgggaggcggaggttgcagtgagccaggattgcaccactgcactccagcct

SEQ ID NO: 3592 - DNA, 282 bp, Homo sapiens
ttttttttgttttgagatggagtctcgctctgtcgcccaggctggagtgcaatggcgtgatcttggctcactgcaagctccgcctcccaggttcacgccattctcttgcctcagcctcccgagtagctgggactacaggtgcccgccaccacgcccggctaatttttctatttttagtagagacagggtttcaccgtgttagccaggatggtcttgatctcctgaccttgtggtccacctgcctcggcctcccaaagtgctgggattacaggtgtgagccac

SEQ ID NO: 3593 - DNA, 1515 bp, Homo sapiens
gtacgctttcttagaaatgtgagcaaagaggagtgccttaaatgtatgaaaacaactgaaattgaaataatatgatgcataagaactaataaagcattttcttattttttaaaaatttgtaggctgggtgcagtggctcatgcctgtagtcccagcactttgggaggctgaggtaggaggatcactgtagcccaggagaccagcctgagcaacatagtgggacaccatctctacaaagaattaaaaattagccaggcatgggtgacatgtgcttgtggtcctagctattcgggaggctaaggcatgaggattgcttgaactgcagtgagtgaggctgcattgagccatgttcatgccactgcattccagcctgggcaacagagcaagacccagtctcaatgtttttttaaaaattttattttatctgtatttgtattttattaattttttttctagactaggtactgataattatagttaactcttcttactaggtaacttgtttttaatactctaaatttcatactatattactcaaaattcagaatgtaagccaaagagagataaagtatattaataaatgttaggtttaaacttgtatgatacatttccaaataggtattatatatttttaaaatatataatgtccatcttttctgtattgatgcctatacaaccataaccccagaagtactctcatactgtgaaagtcattgctaaattaggtattcactttcttaaacacatttctgagaaaagggtgtctttttagggcagatgacttagaagttcttttacgtagccaaggcaaaagattgtctattgaaagcttggaagggctatatgtacatttggaggggaaaaaaaatttatcttacctccagcaagaagagatttctaaaatattgtgctgaaacacaatatacctaggattagacacttttagatagttaaatataagaaatgctaggcaagcataatttgtatatgtataatacaccctgaaaattttattctcaacttcacttctgtttagatctgagacactaaaaatatttcctttagcagaaaattcttcaatgattatagaaagaaaatttgctgtatagtcacaaatttaatatacaaaattaagaagtgccttaaaaaaattgtaacctgataatacttcgcattagtcctcatttcaaatatgtgaagcagccaagatccacaaaagtgtgtattttcatgtattgaatgaatatattaaaatgtttcttttaaattttattttagaaaagatacagtgaaaaccactgaaactgagttagatgaatttgagatttgactttgtttgctttaatatatactagatagatagatagatagatacatagacagatagatacatagacagacagacagatagatataaatctcagcactttaagaggctgagctgggaagatagcttaaagccaggagtttgaccagcttaccagcctggataagggaagactttgtctctacaaa

SEQ ID NO: 3594 - DNA, 1515 bp, Homo sapiens; identical to SEQ ID NO: 3593

SEQ ID NO: 3595 - DNA, 1515 bp, Homo sapiens; identical to SEQ ID NO: 3593

SEQ ID NO: 3596 - DNA, 1422 bp, Homo sapiens
cagtttccctatctgtacaaattattgagtaataatagtatctcttataggattggtataaagacttaaaaagttaatgtcatgtaaaatgctttagcataatacctgactcagagtaaaggcttaataaaccctagctgatcttactgtcagaatcaataatattactatttgtaatataattaccagacttaacaaatgggagaagtattaaccatctgcaggaataagtaccagagcctgcatcaaaatagtttatattcaacatgaagtctttaaattggcaaaagcactcagtttaatatatacctgttaagaaaattttaagagacagtcatggtttttagctggatactctgggaaaccaaataaagcagataattgtacagtatgataatcaaaaaaaggatgtctttataaatagcttgaaatagttccccagatgcaacttgaataaaggaaataaatagccgacttgctctaacttgaggttagagcagaattccttagtctgattcactggatgctggaaacccctgccccacattttcccactccctcttggttagaaaaatttacattggtttagcattatactcttgaggctattttctttcaaaaaaaaaaaactttaaaaaaatttagatattaagtgtgtaatctttgggcagtttccaggctttaaaaatgggttcaaaatttctgatgggattatttagcagaagttcttagaagtttgtccttgtgactgaaaacagatatttttggttcctgtatttgggtggcaaacaaagtaacagtacagctttaatgtatttgtaacattggccacagtgagtctttgataactgaaggatagtgttttccattgttctctgttatcctcaaagtaaaataaggggaaagtgttcagattcatccttacatgtgttctaggtactgtattgctcatgattaaaattaatttaaattaattggctaattgttcagaattaatccctttctatgagaacaactaaaaagggaacaactacaaaagagtacaactattgagcctactatggttggaaaatacttgaaagtatcatttaaagatggttactttaattagatctccgtactaaacgtgggaggatagctttatattttactttttgaagagcattaagttctggtctgtccatttcctgaaattctgagctatgttattcatctctgttgttggctctataatgtatgtatctgtttgctgctattcataataacaaaggtcttagcgaagacctagcaatcttagggtaataggaagacagaggaatttcatattggaatttttaacttgcagatcacaacttgttagtgttttatgaaatcagtgtagtgggtcaaaaccactatagtttttctaaaaaaaaaaaagaa

SEQ ID NO: 3597 - DNA, 1657 bp, Homo sapiens
cacttttgttccttctgtctgctttctgatgctaatattatttgaacatagatttttctcagtaatgatttctagttggcttttcctttccttttgtcattactcagggaatgataaagatattattgatttgaaacagtacagtgtagtgttatagacacacctgggttcaggtcctactctcttatttactagctggttggccatggtcaagttacctaatttccctaagcatcagtttccctatctgtacaaattattgagtaataatagtatctcttataggattggtataaagacttaaaaagttaatgtcatgtaaaatgctttagcataatacctgactcagagtaaaggcttaataaaccctagctgatcttactgtcagaatcaataatattactatttgtaatataattaccagacttaacaaatgggagaagtattaaccatctgcaggaataagtaccagagcctgcatcaaaatagtttatattcaacatgaagtctttaaattggcaaaagcactcagtttaatatatacctgttaagaaaattttaagagacagtcatggtttttagctggatactctgggaaaccaaataaagcagataattgtacagtatgataatcaaaaaaaggatgtctttataaatagcttgaaatagttccccagatgcaacttgaataaaggaaataaatagccgacttgctctaacttgaggttagagcagaattccttagtctgattcactggatgctggaaacccctgccccacattttcccactccctcttggttagaaaaatttacattggtttagcattatactcttgaggctattttctttcaaaaaaaaaaaactttaaaaaaatttagatattaagtgtgtaatctttgggcagtttccaggctttaaaaatgggttcaaaatttctgatgggattatttagcagaagttcttagaagtttgtccttgtgactgaaaacagatatttttggttcctgtatttgggtggcaaacaaagtaacagtacagctttaatgtatttgtaacattggccacagtgagtctttgataactgaaggatagtgttttccattgttctctgttatcctcaaagtaaaataaggggaaagtgttcagattcatccttacatgtgttctaggtactgtattgctcatgattaaaattaatttaaattaattggctaattgttcagaattaatccctttctatgagaacaactaaaaagggaacaactacaaaagagtacaactattgagcctactatggttggaaaatacttgaaagtatcatttaaagatggttactttaattagatctccgtactaaacgtgggaggatagctttatattttactttttgaagagcattaagttctggtctgtccatttcctgaaattctgagctatgttattcatctctgttgttggctctataatgtatgtatctgtttgctgctattcataataacaaaggtcttagcgaagacctagcaatcttagggtaataggaagacagaggaatttcatattggaatttttaacttgcagatcacaacttgttagtgttttatgaaatcagtgtagtgggtcaaaaccactatagtttttctaaaaaaaaaaaagaa

SEQ ID NO: 3598 - DNA, 8108 bp, Homo sapiens
tggctgaataaagtgaacccacataaagtgtcacccgcctcttcagtggacagtaacatcccatcatctcaaggctacaaaaaggaaggccgagagcagggcactgggaatagctacactgatacaagtggacctaaagaaacgagttccgctactccgggacgagactccaaaaccatccaaaagggatcagaaagtgggcgtgggaggcagaaatctcctgcacagagtgacagcacaacacagagaagaactgtaggcaaaaaacaacccaaaaaggctgagaaggcagctgctgaagagcctcgtggaggcctgaagatagaaagtgaaacccctgtagacttggctagcagcatgccctccagcagacacaaagcagccaccaaaggctcaaggaaacccaatataaagaaggagtctaagtcttcccctcgacctacagcagagaaaaagaaatataagtcaacaagtaaatcttcccagaaatcaagggaaatcatagaaacagatacctcatcctcagattcagatgaaagtgagagccttcctccttcctcacaaactcctaagtaccccgagagcaataggactcctgttaaaccctcctcagtggaggaagaagatagcttttttcggcaacgaatgttctctcctatggaagagaaggaacttctttcacccctcagtgagcctgatgacaggtacccacttattgtgaagattgacctgaatcttttgactagaataccaggaaagccttacaaagaaacagagccgcccaagggggaaaagaaaaatgtgccagaaaagcacacgagagaggctcagaaacaagcctcagaaaaagtttccaacaaaggcaagaggaagcataaggtttgtgaagggtttttgttgtttgttttgaaacatcagaatctgaaatgcggtggaaatctcagtaagccacaaagtaacaaggtgggtcataagctgtgaaggaaaatagtgggtaaacccaaggcccaggcgaggctacatgtggaacagtctcttgaggatttctgtgcttctgcctgtgtccttcagtaaagcagaatagttgctaatgaaataagaaatgagtcagtgcttttcagcatgtgctggccagtgtagaggttagagagcagcagcttgcaaattggcatttgcaacattctcaacattttggttttaggtgtttttagtttggatatgtactccccgtattgttataatccctaccattctcttctgatgtacacccagaccaagtcacacttaaataactaatctgctatgcacctctatgccccagcttattttccttaacaaaggtcagaactaaaaatattgctggcttatagccagctgtcatccctaaatacttccaagataattttggatatagaggcaaaatttgtatatttaaggtctgcttttcttagactaaggaaatgtgaaaactcacgcatgtctgtgattggaggataataatcgtacaatgaagagatctgaatcactacatatatagagactgtgggaaaaacagcctgatcttttcagctctagtgaggaatttacaggagaatgtaaagttttaagtagtctatatcaaagaatactataatttcttccgatacatgtctatgattgtgaaagaccagaagttaagcttgagtaggtgaacagataggtaccagaatggccttaccaagtaagtaaacttagaacacaaacaccactccagttgacctgagaatcacatatactacagggagaatagagcactttcttaaaatggagtgagatattttcctctctccttttcataaaaccacagtgccacgtgcagatgatatatattcagacaaattagaataatacatgacttcttttttgaatctttaaaaattgaaattgtccacattatttaaatttttagaaaaccaaagcttactactctctatactatacctaatgagtttccattatcatagtatagagatgttttgctcaactagtaagctgtttagggctgctggcccctgtagcccacagcctcagatcgctggacttggctgtgggatttaattcatagaataatgtggaataagagcttgtgtatgatagactctgctcttttggaagctaggactttttttatggaattttaaaaaatggtccttttgtgcttaaaaagtattactttttttgtaagattttattttatttttcttacttttagagacagggtattactctgtcacctaggctggagtgccatggcattcatagctcactgcaacctcaaactgccgggttcaagtgatcctccctcctcagcctcccaagtagctaggactacaggcatgcgaccccacacctggctaattttttatagagatggtatcttgctatattgctcaaactggtctcaaactcctggaatcaagcagtcctcccacctcagcctcccaaagcactggcattacaggtgtcagccaccacacctggcccttctataaggtattcagacatttaaaatataaagtgtcaagggcagtacctggaggtaaagcaggtagtactaagagaagacccagttaagggtaataaaggatgtagatttctttttctcatgttttcatttgtctgtctttattcatttgtataggggaacagattcttttgttatggtagaatatttgcattctcgtgccctgatatttgaagcaaaaggaaaacttagattcacttagaaaagtaacattggcaatggatgggcccaccacttgtgttttccatcagaaagttttttgagtcactaggctgtgctatgatcaaaagtatggaccataaaaaatgttggcaaagttgtgaaaaagttggaactttgatatggtgctgatgagaatagaaatgataccactgctttggaacatagtttggtagttactgaaaaagttaaacatagagttaccttttgatctgcagttgtactgctagttatatatccaagagaaatgaaaacatgtccacacaaaaacttgtacttgaatgttcatagtagcattattcatattagccaaaaagtggagacaacccaaatggccatcacctgatgaatgactaaacgaaatgaataaattctatgcagtgaatactattcagccataaatgagaatgcagtactaatccatgctgcaacatggatgaaccttaaaaatgttacactaaatgaaaggagccacaaaggccacatatattgaatgatccattttcctgaaatgtctagaataggcaaatctataaagatgaaatgtgattgccagtgtctgggggaggaggagatggggagtgactactaatgggtatagagtgtgttttcaggataatgaaaatattttaaaattcattaagccgggtgcagtggctcacacctgtaatcccagcactttgggaggccaaggcgggcggatcatgaggtcaggagattgagaccatcctggccatggtgaaaccccgtctctactaaaaatacaaaaaattagctgggaggctgaggcaggagaatcgcttgaacctgggaggtagaggttgcagtgagctgagatcgtgccactgcactccagcctgggcgacagaacaagactccgtctgaaaaataaataaataactaaataaataaaattaaaatttcattgtggtaatggttgtacaactctgaatataccaaatgttatggaattgtgcacttctaaagagtgaattttatgttatgtaaattatatcttaattataatttcacagatactacctcccaaatcattacattgaaaagatgccatcttagagactgtaggaaatgcgtttcagtctctgggttttgtgtatctaaaataggcgacctcagccttaaaacctcatcttcttgaatattatttaaatgaattatagtacttctcttttatcttctttctgatgcctaatcatggataaactctttgtgggtagctagtgctggaagctgaagttagttgaataaaaatcagaccacggtttctatttttcatctagaatgaagatgataaccgagccagtgagagcaagaaacccaaaacggaggacaagaattcagcaggccataagccatccagcaacagagagtacgttcccaaaacatgttgcatgccagtgttgttaatatatgtatatcatttgatagtgggtactttctgacatgctctgagtgttccttttagtaagcaagtgttatataaatgcatacacataacatatgccaaatagtgggagctttcacttttagctaatagggatggaaaacatttaacatttaattagttcttcctttattcattttttattggggtaggggtgagtatggggggagaattaaagtaaagctatgccactttctggttagatggcaaacttatctgtaatttccaagagactggttgccaacttaaaagtggtaatctcttcattcaccattcatcaatttgttcaatcattcagccaatatttattgagtactactgagtggtaggtcagtttttggccctggatttacaaccacgggaataaaaacagagaagatgcctaccttcatggaatttacagtcttattttgttttatagaaatcatgtgtcctagtaatcaaatggggaaaaacagatttgtcttgaaagcagacaaagagaaatggaaaaatcaattacccctgtattactgtgtggagaaatgaaggcattcgtttggtttggcaggtcatctaagcagagtgctgcaaaagaaaaggatttgttgccttctcccgctgggcctgttccttcaaaagatccaaaaacagagcatggctctcggaagaggactattagtcagtcttcttccttaaagtcaagcagtaacagcaacaaggagacgagtggcagcagcaaaaacagttcctccacatcaaagcagaagaagaccgaagggaagacttccagtagctccaaggaggttaaggtaaagtgttgggggcctggggcttttgaaaatcattcaacttgccatgtgacttttccagggtgacactgtgctttgaaattattgtaacatctcagtaaatatataggcctatgtcttttaccctctatatgtaataatcctgataaatgaatacagtgatataagactgtgaaggtggtaagtcagctggtcacatacatattgaaagaaaaacccttgggtacagtggctcatacctgtagtcccagctatttgggaggctaagatggaaggatcatttgaggaatttgagtccagcctgggcaatgtggtgagaccctgtctgtaaaagaactttaaaatttaaaaaaaaaaaaaaaagatagaaaccagtcattggaaaagttggttatggaagcttttaaaataagaactaagtggttctagttgctaagattgagttgttgtatattgtttgaaataggctttgagtttctcagaattatactttacaaacaagttatattacgtaaagtgacaaagcaatcatttgactttgattcatgaaatagaaaaagaaatctttagctaagttagcactgaaattatttctaattattattcctaggatactcacaatgcaggggagtattcttcatgtttatagttggagatttggatcaaaggagctttttcaaggctgtactttaatagtcactcaacctcaatttgtttaccaggttgtttgctttctaaactgttctgatcaggagcaaatttacttaaatcagaaaatacctattatttagtaagcaaaggtttgagagttgaaaaataagactccttaaagctattatatttattaactggtaaaattaaaattttttaaattgagattattttaattaagaacttctcaaattaaaatacacagaaagctttttctctagctgaacaacctctttctttagtagtttagtgttagcacaaggtgcttaggaccttgacttttatattggcctgctttattgctccagttctccatctgcctgctgatggtttttctccatttcccatcctttaactgtaggatttgaggcctctgtgcttgcttcttgaaacctgctattgcttttttaaattattatttaatttaattaattaatttattaattaatttatttatttgcttttaaataagtgagctctcctgctcatttggattctgctatctcgtaggtaaaaatcactgtgtatgcttctatcacacgtaagaaaggagtttcttcaagaagttcgtcagcttcttgaaagcaggcatttgtgtcttattttgtgttttatccggtgcttaacttgctgggtaatgaggaaatatttgttggatcaaatgtagtcatttggtactctgttgttttcaacaaaatatggaatagggccttaccactttgatttcaatagctcttggcacttaacagttactgaagttagtatttgttagtcttgacaatttccaagttaggcagtgacatttgagtttattagagaataatctgtaatttagttaggaaatatgctattttttattctatcaactaaagaaaaaattagatctggaaaatcaacattgcacatagtttttatataagaaaactgtgtttaaatatttggaaacttattttcagaaatcctctgaaaagcaaatctgaatgtaggtccttatgggtctatttataaaacatagagggggccaggcatggtggctcacggcctgtaattccaacactttgggaggctggctggaggatcgcttgagcccaggaggttgaagccacagtgagccatgattgcaccactgcactccaacctaggcgacagagtgagaccctttctcaaacaaataaataaataaaacagaggaaaagctatcctagtaatgttacagtacaacataatattcagaaagccatttcaaagtataattatatatttaaaaattttatatttttatataaatataaaaaattttatatggggtaaataggtaaagtaaaattatatattattgagttttctaatgttgaaacatccatgcattcctggaataaattccacttgtttatggtgttttattatggaaaaatgtatattcgttttattaaagatagggctggatggaaggcagttgagagagagtcatagctctttcataaagggctatattgataggaggcagaatagacatatagccaggtgcagtagtacatgcccatggtcccggctactcaggaggctggggtgggaggatcacttgagcctaggagtttaagatcaacctgggcaacatagcaagactcccatctcttaaaataaaaaaaagacatgtggatgagaggcagagtaaagtttaagaaagtaactaggcttttgaagtctggcaattctgaatttgaaactcaaattccaagaatgccatttaaaacctgtttgaacttaggcaagttactcaacctccttgagactgctttttcattttatcttaatagcagtacttatttcataggtttgttaaaggattaacaataatgctaagtacttagttaacttagtgcctggtaagtagtaagcacataataaatattagatgctattaatattattgctgttttcattgaccagtaactaccaataaatgttgccgtaagtagtgctgccattttcatactaggcttttgtcttccttatgttttaacaactgcctaggccagtgcctggcatatagtagacccttatataaatattagaatgaatatttcagttatataaaatggaccctttttttttttaaagtttacattatgaagtttataaaagttttgtaacaaggaaattcattatgaaaggcaatgaaattttgtttcctttttaccagtggctgaagaaatgctattagtttcatttttaatctccttacggttttcattgtagttatatatttttttggtcaggaaaaggctccaagtagctcctctaactgtcctccatctgcaccaactcttgattcttctaagcctcggagaacaaagct

SEQ ID NO: 3599 - DNA, 226 bp, Homo sapiens
aagttgcagccgggcgcggtggctcacgcctgtaatcccagcactttgggaggccgaggcgggtggatcacctgaggccaggagtttgagacccacctgaccaatatggtgaaaccccgtctctactaaaagtacagaaattagccgggcgtggtggtggacgcctgtagtcccagctacttgggaggctgagacaggagaattgcttgaacctggaaggcggagg

SEQ ID NO: 3600 - DNA, 1589 bp, Homo sapiens
caggaatccaaatccccattccctatgtattcagagacggtggatctcatcaagtaagtggaaaaacttggcagatcattggcaataacattatttctctggtccatcaaggaagaggctgatatatagtaaactgaagagggtgtataatcctttaatgtccttggataaaggagaagtagatacttcaatgagtatttttgcttttatttaggtttgaaattctaatgttttgaggacaagtgaaatcataagatcaaggtgaagtattctgtttgtcatttgtttgttattgtaactcaacagatacactatgaagctaaagaattacttggcaccagatgctacagctgcagataaacgactcacagtactttggtgagttttctgtgttctagcctctgctagatacaggaagttctataataaatagtgctgtgtgtgctcttctgaatgttttccttgaatcagacttctgtaatcctgtcttaaatctgttcctgatgggtcaagcaggaagtaactcaaaattcctactgaaaggtttgagttgttgtcagtctctgatccatttccctcttgatgaaagccttggctttgtgagactgatagtagaaacctccatggtcttgaataatcacttttccacactcttcatttggtacccgctctctccattcacatatacttttccttagggagcaagcatctagtttgttcagaataaaggatgtgacttgtttgcttcatcccagtgagatattatcagttcgattgttacaggtctttactttacctggcactgtgtttaacactgggaatgcagctaagaagaagactaacacagccctattcatcatggagtatagtctagtgtgagaagacagaaatcaaatcatcatacaagtccatatgaattaagtattttgaaagaaaagtatatgtaactgtaacagtagagggtagggagacctactctatttagagggaacaacatgtacaagggctggatggtggaaaggaatgggaaactttcaaggaactaaaagaagaccagcgagaagtgggtgtgactggagagataggcagggatgatcctgcacggtctttataagctatgttgtggtttgtaatatttgcagttcagtttcctagtttttgttttttaattttagattgtttacactttggtttggaaattctaccccttcgtaatttttaaaacttcatgacatgttggtgtcctatggataaggtttggattttggaatgtcagcaaataatgagagcctagtcctaggcttcttagccatcttcccctccctaggatgtgtaccacaataagaacacatctgttggttttgcctaacggttaatgttgtggcctatgccatggtcacatgagccagtctcctgcacaatgcaaaggctgtctgtgcaaatctggccagagtttgctgtcctggtaaataagccgcccttttccattggctagcctgcgatgcgagtctttgctgtacctgaggctgttcaaactgaagaaggaaaatgctctgaagtactcaaagacactgacagagcacctgaag

SEQ ID NO: 3601 - DNA, 3255 bp, Homo sapiens
tcactttattttcaaaattttatttttatggaattttcagcatgtttaaacttaatttttagaacaaaatccaaaagcttaaaatcagatatcttataatgtgtcacaattaagtatggagagttctgtcatttttgaggaaaatctttcatgattcttaaaatgcagatatttacaatatttttaaatacagacatatacaacatggcatatttaaatgtacaaaatagttgaaattatattttatcacagaacattccaaaattcaaactaatttttaaaagtccacaaacactgatagcatttggaaaaaaatagcaacaagtttatcaataaccatgccatatgtttagtaactaacttacttatacacaacacataatttacatgtcaaatccacaaatctaaaagatatatgactaatctatttaactcacgctagaatctaaatactattttataattcataggtttaaatacatgtttcacagtaatctatgaaacaggaatataaactatgaaaacatatttaactgacttcttaagagacaaggaaatgtcaaaaatagcaaatcaggcattttttcccctgaaattaaagttcttatgaataccttcataaacaccaaaggaagaaaataaaaacaactcagatactacaacttaatttttaccttctcaaacttctgtttagagctcttggcataatcacagctcccctgggatatttttatttttttcctgatttagtggagacaactatttattccctcccttgttccaggaaaaatgtaaggtggcttagaagatagactcagaatatactagaaagtataattataggttaaataaaaaagaaaatagagaaagcagaatttgggggaatagcacatgaagccatttaagaaaaggtcaggaaatatatcctaaagaatattacattattctcccacagtgattttctggaaatattgcaaaatacattaatttgtaagaaaactaatattaaagtactggtaaactagagatgctgatcaaatttgttaaattatttatttaccctgatgaagcagatgattataaaaatgtgtgtgcttttctttgtgcttggataaaagaagttttcctaaataccatatattggtagagtataggtgaaaaaaaaaataaaatttgggcacccttactgaatttctactgagaattccatcaactgctgtctgctgacttgcgactggatggcttcaactcaggtgctcatgtgttacatggttgttttgagagcacaaaacagagcaacatcaattccagggcatcctgactattggttcctccagctcacctcatcaggacccagcaagagaaatgggaggaaggtaatgcagaggagacctgctcaggttggcatgttgaagccacagtctcctctgttgggttgagagctgcagaggttctgactgtgcttacagtctgcatgtcacagacctcaaccccactcctaggggcagggaaggaatggtatggacagaagactgggagcagcattaaatagcttcatggaaacatgcatggtctgtccatctctattttacaggcctagctttcaacaaataatagaaagaagggtcttgtatttatatgctgagaagtaagaatgcagggagtgatgatgaaggaaagggtttgtgggaaatggagaggaaagaaaggtagtaggatgtttccctttcaagtgtggcacgagtttcaaaactacagattagggactgaccaaaacaaaaatatctgaagactaaaacaaaccactgcctcctatcttttttgaggatgaatggtcccaagtaatccttgtgagttttcgttaggttgggaaggaaggaagttcaagtctatagatctataaccgtggaaactgcagtgctcctggatggagtggcaaaggcttctccaaggactgtggtggtgggagaaggggacagaataatgactgctatttttccaatgatgcccttcagaatacaggcaatgccaacttatccattaggcacagtacctaaggcccacagttttttagaagcccacaaaaatgttttaattttttttagcctcataagaaaaaactgaacttctaaacaaaatgttttaatctaaaatattaatacattcatttcatacagatacaattgtaaaatatcacttttaattttgtatggaagaaggggtctaagatggcaaaactatctagggcccacaagaatcataatgcagctctgaatacagggtcaaacaaactgtaactgaagcaatgtaacttgaactggaaactgaagataatttaaaaggattagagaagaatggtcaaggctaaaataatggagatggagagtctgagcttactgatcctgttccactggtttttcttttcttgaatgttactttggaattagattaagtctaatattggggaagcgctagtgtcgatttccattagccaagccagaaaaaaaaaaaaaattaggtcattattttatagtcattgtgcaataacaaagacagaatcaggatgaagacacctgcatgtctttaagtcctttagtcctttctccacttctgtaaacattattaaaggcaggtgttcctttgagactctgcctcctgaacttcctgtatcataggccccctcagttctagacttcctctgtgcttctacaaggccctggctccattatcctcggtagtagcccaaggctggtagtgccagcaatgtgggtacctgtggttgcaaaattgttttaagaatatgacaaaagaaaaaggaagcagggaaaatgatggaggaagagagaaagaagtaaccaagtttaacatactaaaattatactgtcaaaaaaatggggaaggatttatatactaattgtgtttttttaaatagtagcactgagatatttgtacttcacacttctctgtattttaaaatatactttacaagacaaatgtactctatagtcagaaaatactaagtattattttgaaaactgtgctctcaaggccccaaactcttgacaagtatcatccttgagatcctcgcaatatggcttagattagcaaatatggttaaacactggcacacagggcaaggagactcagatttgagagcagaacttttaacaatttccattactttccatcacccaaattcatcagtattatagggaaatgtcaatcaagaaagctagtataaaacactttttagta

SEQ ID NO: 3602 - DNA, 4240 bp, Homo sapiens
tcactttattttcaaaattttatttttatggaattttcagcatgtttaaacttaatttttagaacaaaatccaaaagcttaaaatcagatatcttataatgtgtcacaattaagtatggagagttctgtcatttttgaggaaaatctttcataattcttaaaatgcaggtatttacaacatttttaaatacagacatatacaacatggcatatttaaatgtacaaaatagttgaaattacattttatcacagaacattccaaaattcaaactaatttttaaaagtccacaaacactgatagcatttggaaaaaaatagcaacaagtttatcaataaccatgccatatgtttagtaactaacttacttatacacaacacataatttacatgtcaaatccacaaatctaaaagatatatgactaatctatttaactcacgctagaatctaaatactattttataattcataggtttaaatacatgtttcacagtaatctatgaaacaggaatataaactatgaaaacatatttaactgacttcttaagagacgaggaaatgtcaaaaatagcaaatcaggcatttttttcccctgaaattaaagttcttatgaataccttcataaacaccaaaggaagaaaataaaaacaactcagatactacaacttaatttttaccttctcaaacttctgtttagagctcttggcataatcacagctcccctgggatatttttattttttcctgatttagtggaggcaactatttattccctcccttgttccaggaaaaatgtaaggtggcttagaagatagactcagaatatactagaaagtataattataggttaaataaaaaagaaaatagagaaagcagaatttgggggaatagcacatgaagccatttaagaaaaggtcaggaaatatatcctaaagtatattacattattctcccacagtgattttctggaaatattgcaaaatacattaatttgtaagaaaactaatattaaagtactggtaaactagagatgctgatcaaatttgttaaattatttatttaccctgatgaagcagatgattataaaaatgtgtgtgcttttctttgtgcttggataaaagaagttttcctaaataccatatattggtagagtataggtgaaaaaaaaaataaaatttgggcacccttactgaatttctactgagaattccatcaactgctgtctgctgacttgcgactggatggcttcaactcaggtgctcatgtgttacatggctgttttgtgagcacaaaacagagcaacatcaattccagggcatcctgactattggttcctccagctcacctcatcaggacccaggaagagaaatgggaggaaggtaatgcagaggagacctgctcaggttggcatgttgaagccacagtctcctctgttgggttgagagctgcagaggttctgactgtgcttacagtctgcatgtcacagacctcaaccccactcctaggggcagggaaggaatggtatggacagaagactgggagcagcattaaatagcttcatggaaacatgcatggtctgtccatctctattttacaggcctagctttcaacaaataatagaaagaagggtcttgtatttatatgctgagaagtaagaatgcagggagtgatgatgaaggaaagggtttgtgggaaatggagaggaaagaaaggtagtaggatgtttccctttcaagtgtggcacgagtttcaaaactacagattagggactgaccaaaacaaaaatatctgaagactaaaacaaaccactgcctcctatcttttttgaggatgaatggtcccaagtaatccttgtgagttttcgttaggttgggaaggaagtaagttcaagtctatagatctataaccgtggaaactgcagtgctcctggatggagtggcaaaggcttctccaaggactgtggtggtgggagaaggggacagaataatgactgctatttttccaatgatgcccttcagaatacaggcaatgccaacttatccattaggcacagtacctaaggcccacagttttttagaagcccacaaaaatgttttaattttttttagcctcataagaaaaaactgaacttctaaacaaaatgttttaatctaaaatattaatacattcatttcatacagatacaattgtaaaatatcacttttaattttgtatggaagaaggggtctaagatggcaaaactatctagggcccacaagaatcataatgcagctctgaatacagggtcaaacaaactgtaactgaagcaatgtaacttgaactggaaactgaagataatttaaaaggattagagaagaatggtcaaggctaaaataatggagatggagagtctgagcttactgatcctgttccactggtttttcttttcttgaatgttactttggaattagattaagtctaatactggggaagcgctagtgtcgatttccattagccaagccagaaaaaaaaaaaaattaggtcattattttatagtcattgtgcaataacaaagacagaatcaggatgaagacacctgcatgtctttaagtcctttagtcctttctccacttctgtaaacattattaaaggcaggtgttcctttgagactctgcctcctgaacttcctgtatcataggccccctcagttctagacttcctctgtgcttctacaaggccctggctccattatcctcggtagtagcccaaggctggtagtgccagcaatgtgggtacctgtggttgcaaaattgttttaagaatatgacaaaagaaaaaggaagcagggaaaatgatggaggaagagagaaagaagtaaccaagtttaacatactaaaattatactgtcaaaaaaatggggaaggatttatatactaattgtgtttttttaaatagtagcactgagatatttgtacttcacacttctctgtattttaaaatatactttacaagacaaatgtactctatagtcagaaaatactaagtattattttgaaaactgtgctctcaaggccccaaactcttgacaagtatcatccttgagatcctcgcaatatggcttagattagcaaatatggttaaacattggcacacagggcaaggagactcagatttgagagcagaacttttaacaatttccattactttccatcacccaaattcatcagtattatagggaaatgtcaatcaagaaagctagtataaaacactttttagtatttgttccccaatatatcatgaggaaacaggtcaaaaggaagatgagtacaaaggaatcaatcactgcctttcacagaatcacgcaacttcggagcttggaagggaatactaagccataaaattcaggcccttgatttactggtgaggagcatggggtccaggttatgtgttttgattaaggtcacacagcaaagttggtaacagagttagggtaagagctcaggtttcctgacttttggtatagttcctcttacactctcagccctcaaactaattgttttataagctatacttcactgtttatcctaagtgcacacagagaaatggaaaaatactacccttttttttttaaatgtatgttaatttggaaactgtattaactcaaaatataaacttcacaagagtagtccaacgattagaatgaacaataaaattttagttctggaaggacattaagaagttaagttagacttcagttacacaagaattaaggctcagggaaagtaaactgtatctccccaaatcacaaagttgagacaagaaccaggtcacctaaagctgactcactgcttcttccaatactccttattcttcattggctattgattacaaacaaagcaaaatatagaatcaatctgatttagatataaggaaacgttagtaagaatgtttggtgaatagctataaatcaattctctgactactaagaaataaactaaaatctactgaatttcaataaatgaggcagcattgactgcttattttattttaaaattggcttaaatgcagatcataattctgagttttggtgtcatttgaagatgacgtaaagcttaacaaatgtaaaacaaaattctaatgtttaaaattctctagatcaagggttggagaataatagccaacagcctatgttttatgaggcctgtgagttaacaatggtttttatcattttaaagggctgtaaaacacacacacacacacacac

SEQ ID NO: 3603 - DNA, 227 bp, Homo sapiens
taaaccatattaattatctcagtgaccacccatccatatctcatttatagccataaacaaatctcagcagaatatatggaaagaatggaagtgcttttaaatgaaataggagataccacaatggaacataaatgactagttcagggaagaaatgacttagagacatagtccaaatcccaagctgaacacaacagtaaagccgaccaggttgcttagtttcacagcct

SEQ ID NO: 3604 - DNA, 2306 bp, Homo sapiens
tttagtcttggctacaaccaggctagactttgctggctctaaaagaggaaatttgttatggcatttgacccatggcattcatcacagatagtgggaggtacaagtcataaaatagggagaaagttttcttcttgctcacactggattcctaggacttatcagagatttggaaaaaccaactttgaaattaagtttgcattttaaatttcaaatttggaagcctctttctgaaatcattagctctaagattattttagagcacctgcaccttctttgtgaaggatgatgatttactattccctcaatactgcatgttatcgaaaagtgtgttgtgtaaagtgtttttttcctcattctgtaagagatctatattcaatgtgaaaattatttccttgtgtactctgtatagggcatggaatgctctgccatttttaaagagccacaaccaatatgaaataattaggtcctctctaaggatgtttcatgtttttcttaaatgactccagtcttcaaatggctgagcatactgcagaaaattatccttttcatctaattcattttttaaatgacaagttaactacaggaggctttatttattcagatggtatgtccacttgtggtcgtgatcaatatatttttctaattgaaaagtaaaagcatcacagcttaccatttttctttttctgcagtgttgattaatgatttttttcccgtttattgctagcagtttcaaagtgtcatgtggagatttagcaatactgtctctacttaaaagtattgcacatttcattgaaaatgtgagagttgatataccagcctctttatatttctcttttacagcagaatcacatacttctcaagataaacaaggtttttaaaaaagtttctgatttagttaggatcatatgcttttttttttttttttttttttttttttgagacagagtttcgctcttgttgcccaagctggagtgcaatggcacgatctcggctcactgcaacctccgcctcccgggttcaagcgattctcctgcctcagcctcccaaggagctgggattacaggcacgcaccaccatgcctggctaattttttgtatttttagtagaaacagggtttcaccatgttagccaggctgacctcaaactcctgacctcaggtgatccgcccgcctccacctcccagggtgctgggattacaggtgtgagccaccatgcccagcctcttcaagcttttttactatacatgttgcccctctcccccaacttaggcactactgaattttttatgatggcaccaggtcactttatgctgggtgatatagtcaaaatttgcttatttactctgcccctcgtcaaccacagtatcatttcaaggacatgaataaaatacttgacagtatccaaaggagctataccaaaatctaacaagtaaattttggattttgcctctttgtgctttaaagtaccaggatttctgtctctatggataggtcttggagaatgttaagtaatggatgaaactttttaaaataatttgtaaattttacctaagtaggacagtagtccttactgcaatcaaaataatttactgagcacaactcctgtaaattaatctacagtcaggctagtatgattttaatatgatttgagtaaaaagataattttcaaggaaagagtaatcatccatcaatttattataaagccagatagtattcaatttatgtcaagaacaaagaaattgcccttttaaaagcatgtacgtgaatgctttttgaggcacagaagtatgctaagctttaacgttttgtatttatttacaacccttttctaagggaaggttacttctcagtgcagatggagaaactgaagcactaaggataaatgattagtttccaatcacatcatttttttccacagacttgctgggactagctttcaggtattgacagccagccccatatattaaggtaaccaggttgaatcttccaatttgagaacccatgtatgggttgcagtgagccgagatcatgccactgcactccatcctgggcaacaagaacgaaactccgtctcaaaaacaaagaaggatataataaagttaatatataaaccatgtatgtggttaggaataaattcaaattcaccagtctccaatggtgattacttttactacatagaaaaacattttagtgacttacagaggatttttatttgtgaatatttcagtaaagtttgtgttgattgttgataacactgttcatctactgaagcactttaataaaaataaaatgagctggaattagaaa

SEQ ID NO: 3605 - DNA, 2311 bp, Homo sapiens
tttagtcttggctacaaccaggctagactttgctggctctaaaagaggaaatttgttatggcatttgacccatggcattcatcacagatagtgggaggtacaagtcataaaatagggagaaagttttcttcttgctcacactggattcctaggacttatcagagatttggaaaaaccaactttgaaattaagtttgcattttaaatttcaaatttggaagcctctttctgaaatcattagctctaagattattttagagcacctgcaccttctttgtgaaggatgatgatttactattccctcaatactgcatgttatcgaaaagtgtgttgtgtaaagtgtttttttcctcattctgtaagagatctatattcaatgtgaaaattatttccttgtgtactctgtatagggcatggaatgctctgccatttttaaagagccacaaccaatatgaaataattaggtcctctctaaggatgtttcatgtttttcttaaatgactccagtcttcaaatggctgagcatactgcagaaaattatccttttcatctaattcattttttaaatgacaagttaactacaggaggctttatttattcagatggtatgtccacttgtggtcgtgatcaatatatttttctaattgaaaagtaaaagcatcacagcttaccatttttctttttctgcagtgttgattaatgatttttttcccgtttattgctagcagtttcaaagtgtcatgtggagatttagcaatactgtctctacttaaaagtattgcacatttcattgaaaatgtgagagttgatataccagcctctttatatttctcttttacagcagaatcacatacttctcaagataaacaaggtttttaaaaaagtttctgatttagttaggatcatatgctttttttttttttttttttttttttttttttttgagacagagtttcgctcttgttgcccaagctggagtgcaatggcacgatctcggctcactgcaacctccgcctcccgggttcaagcgattctcctgcctcagcctcccaaggagctgggattacaggcacgcaccaccatgcctggctaattttttgtatttttagtagaaacagggtttcaccatgttagccaggctgacctcaaactcctgacctcaggtgatccgcccgcctccacctcccagggtgctgggattacaggtgtgagccaccatgcccagcctcttcaagcttttttactatacatgttgcccctctcccccaacttaggcactactgaattttttatgatggcaccaggtcactttatgctgggtgatatagtcaaaatttgcttatttactctgcccctcgtcaaccacagtatcatttcaaggacatgaataaaatacttgacagtatccaaaggagctataccaaaatctaacaagtaaattttggattttgcctctttgtgctttaaagtaccaggatttctgtctctatggataggtcttggagaatgttaagtaatggatgaaactttttaaaataatttgtaaattttacctaagtaggacagtagtccttactgcaatcaaaataatttactgagcacaactcctgtaaattaatctacagtcaggctagtatgattttaatatgatttgagtaaaaagataattttcaaggaaagagtaatcatccatcaatttattataaagccagatagtattcaatttatgtcaagaacaaagaaattgcccttttaaaagcatgtacgtgaatgctttttgaggcacagaagtatgctaagctttaacattttgtatttatttacaacccttttctaagggaaggttacttctcagtgcagatggagaaactgaagcactaaggataaatgattagtttccaatcacatcatttttttccacagacttgctgggactagctttcaggtattgacagccagccccatatattaaggtaaccaggttgaatcttccaatttgagaacccatgtatgggttgcagtgagccgagatcatgccactgcactccatcctgggcaacaagaacgaaactccgtctcaaaaacaaagaaggatataataaagttaatatataaaccatgtatgtggttaggaataaattcaaattcaccagtctccaatggtgattacttttactacatagaaaaacattttagtgacttacagaggatttttatttgtgaatatttcagtaaagtttgtgttgattgttgataacactgttcatctactgaagcactttaataaaaataaaatgagctggaattagaaa

SEQ ID NO: 3606 - DNA, 2312 bp, Homo sapiens
tttagtcttggctacaaccaggctagactttgctggctctaaaagaggaaatttgttatggcatttgacccatggcattcatcacagatagtgggaggtacaagtcataaaatagggagaaagttttcttcttgctcacactggattcctaggacttatcagagatttggaaaaaccaactttgaaattaagtttgcattttaaatttcaaatttggaagcctctttctgaaatcattagctctaagattattttagagcacctgcaccttctttgtgaaggatgatgatttactattccctcaatactgcatgttatcgaaaagtgtgttgtgtaaagtgtttttttcctcattctgtaagagatctatattcaatgtgaaaattatttccttgtgtactctgtatagggcatggaatgctctgccatttttaaagagccacaaccaatatgaaataattaggtcctctctaaggatgtttcatgtttttcttaaatgactccagtcttcaaatggctgagcatactgcagaaaattatccttttcatctaattcattttttaaatgacaagttaactacaggaggctttatttattcagatggtatgtccacttgtggtcgtgatcaatatatttttctaattgaaaagtaaaagcatcacagcttaccatttttctttttctgcagtgttgattaatgatttttttcccgtttattgctagcagtttcaaagtgtcatgtggagatttagcaatactgtctctacttaaaagtattgcacatttcattgaaaatgtgagagttgatataccagcctctttatatttctcttttacagcagaatcacatacttctcaagataaacaaggtttttaaaaaagtttctgatttagttaggatcatatgcttttttttttttttttttttttttttttttttttgagacagagtttcgctcttgttgcccaagctggagtgcaatggcacgatctcggctcactgcaacctccgcctcccgggttcaagcgattctcctgcctcagcctcccaaggagctgggattacaggcacgcaccaccatgcctggctaattttttgtatttttagtagaaacagggtttcaccatgttagccaggctgacctcaaactcctgacctcaggtgatccgcccgcctccacctcccagggtgctgggattacaggtgtgagccaccatgcccagcctcttcaagcttttttactatacatgttgcccctctcccccaacttaggcactactgaattttttatgatggcaccaggtcactttatgctgggtgatatagtcaaaatttgcttatttactctgcccctcgtcaaccacagtatcatttcaaggacatgaataaaatacttgacagtatccaaaggagctataccaaaatctaacaagtaaattttggattttgcctctttgtgctttaaagtaccaggatttctgtctctatggataggtcttggagaatgttaagtaatggatgaaactttttaaaataatttgtaaattttacctaagtaggacagtagtccttactgcaatcaaaataatttactgagcacaactcctgtaaattaatctacagtcaggctagtatgattttaatatgatttgagtaaaaagataattttcaaggaaagagtaatcatccatcaatttattataaagccagatagtattcaatttatgtcaagaacaaagaaattgcccttttaaaagcatgtacgtgaatgctttttgaggcacagaagtatgctaagctttaacattttgtatttatttacaacccttttctaagggaaggttacttctcagtgcagatggagaaactgaagcactaaggataaatgattagtttccaatcacatcatttttttccacagacttgctgggactagctttcaggtattgacagccagccccatatattaaggtaaccaggttgaatcttccaatttgagaacccatgtatgggttgcagtgagccgagatcatgccactgcactccatcctgggcaacaagaacgaaactccgtctcaaaaacaaagaaggatataataaagttaatatataaaccatgtatgtggttaggaataaattcaaattcaccagtctccaatggtgattacttttactacatagaaaaacattttagtgacttacagaggatttttatttgtgaatatttcagtaaagtttgtgttgattgttgataacactgttcatctactgaagcactttaataaaaataaaatgagctggaattagaaa

SEQ ID NO: 3607 - DNA, 496 bp, Homo sapiens
ctgtttttaccttcattgaagccgtcacctcatcatcttaaaataagctgacatatagatttatcatgtgctggaggagattccagggaatcaggaaaatcttcggtaattggtccattctgattctccatgttatacccctcttgccccttcctattccttgaaagctggctattccattcagatgggacactcatcccctaaggaaagctgcataaaaggaatttaattacccttttgggaaacataatacatataactagtaatacataaagctaataagaaagtgaaataataaaaaggaaatacaatagaagaagtccacctccctctgggccctcatttcctttctcataggtaaccactattaccagtttctagactacccttccaaagataatttctgcatatacaagcttatgcatgtgggcatatgtgtattttttaaacctaagtgtcagcatgctgtatactaacttcatacattgctctttac

SEQ ID NO: 3608 - DNA, 105 bp, Homo sapiens
aggctgaggcaggagaatcgcttcaacccaggaggtggtggttgcagtgagccaagatcgcgccactgcactccagcctgggcaacaagaacgaaactccgtctc

SEQ ID NO: 3609 - DNA, 496 bp, Homo sapiens; identical to SEQ ID NO: 3607

SEQ ID NO: 3610 - DNA, 496 bp, Homo sapiens; identical to SEQ ID NO: 3607

SEQ ID NO: 3611 - DNA, 808 bp, Homo sapiens
tggtttaggcatattttatatgtacatgtcagcatgtctaatcagtacatctgcacctttattataagtagaagagttaatttgctattttaggcacatcataccaactcttaaattggtcagatgaccccttgggaaatgtcctgaatccctcatttaagttttactttccaagttaggtgtttagttcattcttcatatgtgatagtgaaagtaaaagctttcctgactcgtaaggctgacattttcttgttagggaaagagactcgatagcaaggtaaactaacagtatttcccaaataaaggcacacaggagaaaataatgaatcaatagaatctaattaaaattactaccccagggaataagaagtattgaggatttattttattttgaattggttttaagtatggaataatcatctttacagttataaaaaaattagtgtttacaaaatgttgggcatttctgctttgacaaacaaacaggtaagtcccgtggccttcagaggcaggcagcagtagaaactttccaaaaagtaacaatttctctggatttaacatggaaatagaaaaatttaaagaataattaaattaaaaaaccatggtaaatgaaatgtggtgatgatatacagtttcggatgttaatgctagttgaaagagagaaaaaatatcaagtagaagcagaggacaggatcattggaagggacctgagaaattgccgcttcatccattttagcacacttattagcatggcatgtaccaatattaggaaattgagtgacagtgtgtgagtttagctctgcctaat

SEQ ID NO: 3612 - DNA, 192 bp, Homo sapiens
agagcatagtcttttttttttttttttttttttttttgagacggagtctcactctgtcacccaggctggagtgcagtggcgtgatctcagctcactgcaagctccgccttctgggttcacgccattctcctgtctcagcctcccgagtagctgggactacaggcgcccgccaccacacccagctcatttttt

SEQ ID NO: 3613 - DNA, 2058 bp, Homo sapiens
cgctctgtcacccaggctggagtgcaggcgtgctatcttggctcactgcaacttctgcttcccgagttcaagagatcctcatacctcagcctcctgagtagccgggactacaggcatgcgccaccacacccaggtaatttttgtatttttagtagagacagggtttcatcatgttggccaggctggtcttaaactcctggcctcatgtgatctgcctgccttggcctcccaaagtgccaggattacgggagtgagccactgcatccggcttgattttacactttgttatattgaatgattactgaaaaacagtctgaaaaacaatggggtaaaataggttctgtaacattgtaatggctgcattcataaacattcataaaattacactgattgattgatgtggaaaataaatataagagacatggtctctgtcttcaaggagtatatcagtgattatatagtcatagcatcctattctacaaatataatatttagctagttttatattatttgaaatttagacttctagtttttctctgttatatatataaaaagtgaacatcttaatacatattcgttcactacgacggaaattcccatgttttaaattccagtcttatacatggaattgtcatgttgaatattatgtccttttaaaagtaattgacttaaaaatctttgaatcaaacactcgaagttgtttgagtgcctttttcctcatagcctcaccaacacagataatcacttttaaaattattggtcatctgataggcaaaagttatcttgttttaacttgaatttttgattataaaaattggtacattaaaatgcttttgggctaattaaaaatattggaaacagaaagtaggtagtaacataacatttcaaatagcatactgaggtatagatggtaagtttgttttctcccaccccaggctcctacaccccatctctggagctgaactctctagttagcatgtgcttaacatgactgcatgagggcaagggctttgttttcccagcgtgtagaatgatggctggcacacaacaggtactcattggatgcttattaaataaataagcactttcctgaatagagtaatgaaaattttctatgtaaacataaacacctacatgcatactttttaatcctttttatattattaacaaaaatgggaactcaccacacacactattcttaaatgtctcgatattgttccatataaacatatttagactcctttcactttttgaaaaatgctgcatagtacggtaatttagttaatatccttcctattgatgaaacatttaggggctttatgtctctggctattatttatggacgtttcttcttcaggaattgtttgctcatgctctttactaattttgctataaactttttctataaagctattaggagctttctgtacatttagaacaataaagctttgtttataatatatgctgtaaatattttcctaatttcccatggtcttttaatttctttttttatatcaatttttggtaaacctattcatatttttataaatatttattttctgcatttggtggtatacttataaggaccttttctaccccatatgaatattcattaatattttcccatacactttcgtgtttacatatgtttaacttatatggaatttaattacccataaggtataaggtagaaatctaacattttctagtagtctttgttatcctagatccatttattgaatagtatattttatccctgctaattagaatatattcaatcataaattaatttcttgagtttatttctgtactttatattctgtaaaccatgactaggtaaatagaataaatcacagaataatttgtgaaagcaaacactttaaattattttgggtttatttttgagatctgatctgatagtataagtttatgatcatgacattgaatttttttcctcaaataatctcacattcttatctctttcagatatgacttagaatatgattgaatatgaatacatgattgaagatatattataaaattgagatacttgttgca

SEQ ID NO: 3614 - DNA, 220 bp, Homo sapiens
tacttcttttttttttttttttttttttttgagacggagtctcgctctgtcacccaggctagagtgcagtggcgcgatctcggctcactgcatcactgcaagctccgcctcccgggttcaggccattctcctgcctcagcctcccgagtagctgggactacaggcgcctgcaaccacgcctggctaattttttgtatttttagtagagacggggtttcac

SEQ ID NO: 3615 - DNA, 1799 bp, Homo sapiens
tgtaattaagtatatgcttaactcatctgatttatattaggtgtgcaattacatgtttcttatctttcttccttttaaaggttaggtgaaagtaaaaaaagtggtgagagatttgagacattgagtgagaggtataggatcttggaaatgaatgatcattagagacaggttgtacagttaagtaacatgactacttgaaaaacattgtttcattggaccatgggaaggttgttgctaatcttcagtggagtaacttcaatagaattgatgagaaaggggaggcaaagtgtaatatgttattatgtaatatgtaatatgctttattgtctgatggtaataaagttcagaaagtagagaatagaattttcaagattgagatagagtaacttgaaatacctttatgtaaaagttgtgaagtaacttttgaacttttataaactaatatgactagtttgggtagatatggtagacttggaaaaaaaaaagaccacttcttgaataaaataagaagaaatactttgcttttacttatttgtccttgaacaaattatttaatttctgtgggtcctctttgcttaaatggagctgaacataataacctatttcagtgggttttcatgaagctgtaaagcttttaagacagtgcttagcatagcataaagtacttaacaaataatagctaatattactattgggaaaagtttcaatatgttaatattgtagattattacaagattattattgtaatatcggtagatggcactgatacctagctacagtatggatcacattctccttgtcaataaactcttgtttctcctaattacatgaaagacatttgatattgtttattaaaattgcacattccttaacgcagcagtccccagcctttttcgcaccagggaccagtttcaaggaagaccattttttcacaaacccaggttggtgggttggggaatggttttgcgatgaaactgttccacctcagatcatgaggcattagattctcataggaacatgctcgcatgcacacttcacaatagggtttgcgcttctatgagaatctaataccgccactgatctgacaggtggagctcaggcggtaatggtcacttgcccgctgttcacctactgtgcggccgggttcctaacaggtcatggactggtaccagtctgtggccccagagttggggacccctgccttaatggaacctgcttttcactgaagttgaaaatagatgtggcattctagtttgaaaaaagcagaaatcttgccctttaatccttggagtaaatgtaagtgtcatgagatatttgtcattgtgaaaacctgatccagtggacccagctgtggcatttagtagggtaagcccgtttgtgaaagtcagagagttctaggaagtctttgagacaaaatcttttaaacttgtcagtgatcatccttagtatctgcacatacatactggagctatgtaggttttagtgttgtaacattcaaatgatgtggtttaagtgaaagatcattatacattgtaaaatgtacgtgtatgagactttttttttaatctaatggaatgacattagataaaaaaaaatcaagtgatcaggttaggaattctctagttataccaagtattggtcaactctgtattgccatttgtgtaattaattggtgatgtggatctcctgtaatagtatggctctaagtgttgcaacaattaacagaggccttgtgtatttccacaaatcatcaagtttaattgggagggctttttgaaggtaaacaaagtttttgttgt

SEQ ID NO: 3616 - DNA, 384 bp, Homo sapiens
atgtatttttaggaataatcatctgatttttagtgatagatatattgcttactcaaaactaatttagagaaagtatcaatttaagaatcataggtggggtggacacagtggctcacacctgtaatcccagcactttgggaggctgaggtgggtggatcacttgaggcaggagtttgagatcagcttggccaaaatggtgaaaccccacctccactaaaaatacaaaaattagctgggcatggtggcaagtgcctgtgattccaactactcaggaggctgaggcagaattgcttgaacctgggaggcagaggtggcagtgagctgagatcttgccactgcactccagcctgggcgacagagtgagactccatctcaaaaacaaaa

SEQ ID NO: 3617 - DNA, 2186 bp, Homo sapiens
tccttcatacttcctttagagggcttgctctgctacaagcagtgggcttggactaacagtgattaaaataccacaggcataaggagaaaaggagtatatgtagtagtaataattactagtataaattatttcttcacatgctatgagtaataatattaaaaaactcattttaccattaagattccttatgctgaagctcttccatttagaatactgtcaatgtcatttactggtatgaactaaagtcccccttcttttccactcactgggaaccttagtaaaacaccagcatatcttacctctctttctgactggccgatgcttccagagactgaatgttgggaaaacctagtagccaaacaattctaggacagaataacatttttatatttggttccaccatcttattacatttagttatagttttaaaaaagaaattcaagcccattaaaatatgtctggtcaatgaaatgcttccttttattgtgttgtgctattgtgctttgtttttcaaaacattgtaaaaatagtatctttggtttagtattttggattatatattataatctgaggagtgttttgcttatgtagaatccagatatatttctgttacctaggagatgttacttacatatgtaatactgtatcctgcacatggaaatattcagaattgtagatagcataactctccctgctcctattcttttgagcctaggtataattttttttttttttttagaaaaagacatatttagctttaatttctatttatgctaaacatatttataagtagtctgtcaatataataccaactatttttatttttacataattcaattatttcatttgacatgtctggcagactcaagacattaagtaaaaaattggaactatgatttttctttgtcattttttaaaaaagaattattttattaacctgctggcatataatctggagttcttttcacaaccttactttttctgatttgctttattgaatgattgaatactcatttctttctaaaaatatgttgtaaattctcccttggcaagatttctccctatgagggtagttattatttgagtctgccaagtggttaccatggggcaaggtgccatgatgtattcttgggtgcattggttttttgcgcattgtaaatttaagacacttatagtaagtggactcattcatagatgagtttcagaaccttttacgttctcggtagaggcttctgtcggacaggcagaagagtgtattcctcacttttttttttgtcttcaaattccagtaaggcatagcacttttaagaaattagaatttttctatcatctatgcaaatgatatttatgttaatattaaatatcttatgttacactgggagtaatttgaggtgcaattatttttattactactttgaatagaggaccattatccttctttcttcagaaaactaagaagtaagtgtaacttttaaagtaagtatatatcagtgagagtaggcttgttttacaactatttctagccagtgagttgtgttttcatgtctcatcaaaagacaataccacattgcatcattttacaaaatatgttgtcattttcatttcagttgtaacataggaaaatagatatttcctagatgatttctgagtttcttactgcaaagaacagttataaattggtatacatgtgtctctgtaatagggataatattgatatatctgttgctacatatttaagaatcattctatcttatgttgtcttgaggccaagatttaccacgtttgcccagtgtattgaattggtggtagaaggtagttccatgttccatttgtagatctttaagattttatctttgataactttaatagaatgtggctcagttctggtccttcaagcctgtatggtttggattttcagtaggggacagttgatgtggagtcaatctctttggtacacaggaagctttataaaatttcattcacgaatctcttattttgggaagctgttttgcatatgagaagaacactgttgaaataaggaactaaagctttatatattgatcaaggtgattctgaaagttttaatttttaatgttgtaatgttatgttattgttaattgtactttattatgtattcaatagaaaatcatgatttattaataaaagcttaaattctcatctattta

SEQ ID NO: 3618 - DNA, 2429 bp, Homo sapiens
tggagcttaaaaagctgcacgcaagtgttaaacttctggtgagagtttaataaattaagttttctggagggctggcgtgaagtttgcaggggtcggggttggattgggccggtctcgtaccgctgtggcctgtaggctcggttccgtcgcgctctgcctcaggcagccctactgggtagcaggcccgaaaccccggtgcttgttgggctttcatctcctgacggggtcccagttttgggctgtgtctttcatgatcagtttctacgtggttttcagagaatttccctccactcgcacacccccactagtgtattactttctccacgaaccttgctcaggtctacagctctagtaaacctctccacttgtagactgtctgttcatggtccatgtgtatattataggtagtgtcatgtacaatatacctatcatgtctgtgtatgttccgtatatatactgtcattatttatgttccatatatattttttgtgtataaaatataggttctctaccacacgtggcatatagcaattgatttatactagatgaatgattggattttggttactattgtaattattttattttaatttttatttatttatttttgagactgagtctcagtctgtcgcccaggctggtgtgcagtggcgtgatctcggctcactgcaacctccgcctcctcgtgtctcagcctcccgagtagctgggattagaggcgcgcgtcaccacgcccggctaattttaattttttttagtggaaacggggtttcatcatgttggccagggtggtctcgaactcctggcctcaagtgatccgtccgcctcggcctcccaaagtgctgggattacaggcatgagccaccgcgcccggcttggaatgattttagagtacttcatttgaggggttttattatgtgtattttattttttgcatcttctgtaataaccatgtattttctactgcattcttttttaagtaggaggaatactgttggcgttcaaaagcattgctgtttcagttaagtagttccttaattacttacaatgtagtaaggctacattgaaggaagatataaatttcagtcaagactacgactgagcaaaggtaaaaaaggaagaatgttcaaggtgtctgtgcaagagaacagttagaccaggctggctagagcagtgtttatagggacgtaacaggagatatgtgtggcagatttagggtagattcagagtgccagtaatatgccaagccaaggcacgttgccccttatacattgggaaaactgttgaaggtttttaacattgggaaggtcgatcgcatagcttggtgccagatagccactgtgcagatggcttaagccaggagttggcagactttctgttaaaggtcggacactaaatattttggactttgtgggtcatagttatagcaggaaagcagccatatcagcatatgattgaatggacataactgtattccaattaaactttattttttaattaattaatttttttgagacagagtcttgctctgtcactcaggctggagtgcactggtgcaatcttggctcactgcaaccttcgccttccggattcaagcgattctccttcctcagtctcccgagtagctgggatcacaggcatgtgccaccacgcccagctaatttttgtatttgtagtagagacagggtttcaccatggtgaggctggtctctgccttcgcctcccaaagtgctgggattataggtgtgagccaccgcgcctgcacttggcctccaattaaactttactacaaggacaggtgcttggcctgatttggtccatgggcatagtttgacaaacagtggtttgaacaaatggacctagggacttcagcagtaatccagtcctgaactaagcaatactataccatttttttgtatagcttttatatttatacatgaagtgtaatatcacataacgttagctctgatctagtctgcctggctgtaagtcctggcatctcctggttattgacagtgtgacattgggcaaattaacttctctttgcgtcagttttttaattttaatctttaaaatggggataatagtacttcttacaaagggttgtaaggagtaaatgagttaaagcacataagtgtagtgcttgtacatataataaaagctcaatatgtgttaacttaatattttaaaaattattcctcatatacattattaaaggcagatctgagagatgttttaaggtagaatttactggcttaatgcatctctagctacggaggaaagacagtatccaacacttcaaggcaagggccgttcacatagaggtaatatggaagtcataaaagtaaattaagggagagagggaggtaggaaatggaggattaaggactgattttgatgggatgcacaggagagaaagtggggagagt

SEQ ID NO: 3619 - DNA, 17908 bp, Homo sapiens
  SITE (51): n equals a,t,g, or c
  SITE (69): n equals a,t,g, or c
  SITE (85): n equals a,t,g, or c
  SITE (97): n equals a,t,g, or c
  SITE (98): n equals a,t,g, or c
  SITE (110): n equals a,t,g, or c
  SITE (123): n equals a,t,g, or c
  SITE (149): n equals a,t,g, or c
  SITE (400): n equals a,t,g, or c
  SITE (555): n equals a,t,g, or c
  SITE (686): n equals a,t,g, or c
  SITE (718): n equals a,t,g, or c
  SITE (888): n equals a,t,g, or c
  SITE (1289): n equals a,t,g, or c
  SITE (2284): n equals a,t,g, or c
  SITE (2354): n equals a,t,g, or c
  SITE (2456): n equals a,t,g, or c
  SITE (2641): n equals a,t,g, or c
  SITE (2669): n equals a,t,g, or c
  SITE (3176): n equals a,t,g, or c
  SITE (3186): n equals a,t,g, or c
  SITE (3203): n equals a,t,g, or c
  SITE (3217): n equals a,t,g, or c
  SITE (3234): n equals a,t,g, or c
  SITE (3412): n equals a,t,g, or c
  SITE (3431): n equals a,t,g, or c
  SITE (4238): n equals a,t,g, or c
  SITE (4342): n equals a,t,g, or c
  SITE (4351): n equals a,t,g, or c
  SITE (4360): n equals a,t,g, or c
  SITE (4434): n equals a,t,g, or c
  SITE (4435): n equals a,t,g, or c
  SITE (4445): n equals a,t,g, or c
  SITE (4459): n equals a,t,g, or c
  SITE (4470): n equals a,t,g, or c
  SITE (4472): n equals a,t,g, or c
  SITE (4475): n equals a,t,g, or c
  SITE (4486): n equals a,t,g, or c
  SITE (4494): n equals a,t,g, or c
  SITE (4503): n equals a,t,g, or c
  SITE (4507): n equals a,t,g, or c
  SITE (4515): n equals a,t,g, or c
  SITE (4524): n equals a,t,g, or c
  SITE (4538): n equals a,t,g, or c
  SITE (4558): n equals a,t,g, or c
  SITE (4616): n equals a,t,g, or c
  SITE (4705): n equals a,t,g, or c
  SITE (4754): n equals a,t,g, or c
  SITE (5298): n equals a,t,g, or c
  SITE (5311): n equals a,t,g, or c
  SITE (5513): n equals a,t,g, or c
  SITE (6363): n equals a,t,g, or c
  SITE (7252): n equals a,t,g, or c
  SITE (8375): n equals a,t,g, or c
  SITE (8540): n equals a,t,g, or c
  SITE (8878): n equals a,t,g, or c
  SITE (9805): n equals a,t,g, or c
  SITE (9839): n equals a,t,g, or c
  SITE (10029): n equals a,t,g, or c
  SITE (10046): n equals a,t,g, or c
  SITE (10389): n equals a,t,g, or c
  SITE (11148): n equals a,t,g, or c
  SITE (11532): n equals a,t,g, or c
  SITE (11760): n equals a,t,g, or c
  SITE (12134): n equals a,t,g, or c
  SITE (12397): n equals a,t,g, or c
  SITE (12413): n equals a,t,g, or c
  SITE (12431): n equals a,t,g, or c
  SITE (12449): n equals a,t,g, or c
  SITE (12539): n equals a,t,g, or c
  SITE (12570): n equals a,t,g, or c
  SITE (12594): n equals a,t,g, or c
  SITE (12629): n equals a,t,g, or c
  SITE (12682): n equals a,t,g, or c
  SITE (12744): n equals a,t,g, or c
  SITE (13007): n equals a,t,g, or c
  SITE (13658): n equals a,t,g, or c
  SITE (13667): n equals a,t,g, or c
  SITE (13676): n equals a,t,g, or c
  SITE (13753): n equals a,t,g, or c
  SITE (13974): n equals a,t,g, or c
  SITE (14037): n equals a,t,g, or c
  SITE (14209): n equals a,t,g, or c
  SITE (14278): n equals a,t,g, or c
  SITE (14332): n equals a,t,g, or c
  SITE (14412): n equals a,t,g, or c
  SITE (14424): n equals a,t,g, or c
  SITE (14440): n equals a,t,g, or c
  SITE (14452): n equals a,t,g, or c
  SITE (14504): n equals a,t,g, or c
  SITE (14601): n equals a,t,g, or c
  SITE (14616): n equals a,t,g, or c
  SITE (15075): n equals a,t,g, or c
  SITE (15089): n equals a,t,g, or c
  SITE (15174): n equals a,t,g, or c
  SITE (15219): n equals a,t,g, or c
  SITE (15237): n equals a,t,g, or c
  SITE (15254): n equals a,t,g, or c
  SITE (15271): n equals a,t,g, or c
  SITE (15318): n equals a,t,g, or c
  SITE (15466): n equals a,t,g, or c
  SITE (15474): n equals a,t,g, or c
  SITE (15479): n equals a,t,g, or c
  SITE (15480): n equals a,t,g, or c
  SITE (15487): n equals a,t,g, or c
  SITE (15661): n equals a,t,g, or c
  SITE (16693): n equals a,t,g, or c
  SITE (16751): n equals a,t,g, or c
  SITE (16854): n equals a,t,g, or c
  SITE (17175): n equals a,t,g, or c
  SITE (17177): n equals a,t,g, or c
  SITE (17226): n equals a,t,g, or c
  SITE (17298): n equals a,t,g, or c
  SITE (17367): n equals a,t,g, or c
  SITE (17379): n equals a,t,g, or c
  SITE (17437): n equals a,t,g, or c
  SITE (17594): n equals a,t,g, or c
  SITE (17852): n equals a,t,g, or c
gacgccgtacgtgccagatggtgttacctggagcttaaaaagctgcacgcnaagtgttaaacttctggntgagagtttaataaanttaagttttctnnggagggctggcngtgaagtttgcanggggtcggggttggattgggccggtnctcgtaccgctgtggcctgtaggctcggttccgtcgcgctctgcctcaggcagccctactgggtagcaggcccgaaaccccggtgcttgttgggctttcatctcctgacggggtcccagttttgggctgtgtctttcatgatcagtttctacgtggttttcagagaatttccctccactcgcacacccccactagtgtattactttctccacgaaccttgctcaggtctacagctctagtaaacctctccnacttgtagactgtctgttcatggtccatgtgtatattataggtagtgtcatgtacaatatacctatcatgtctgtgtatgttccgtatatatactgtcattatttatgttccatatatattttttgtgtataaaatataggttctctaccacacngtggcatatagcaattgatttatactagatgaatgattggattttggttactattgtaattattttattttaatttttatttatttatttttgagactgagtctcagtctgtcgcccaggctggtgtgcangtggcgtgatctcggctcactgcaacctccgncctcctcgtgtctcagcctcccgagtagctgggattagaggcgcgcgtcaccacgcccggctaattttaattttttttagtggaaacggggtttcatcatgttggccagggtggtctcgaactcctggcctcaagtgatccgtccgcctcggcctcccaaagtgctgggnattacaggcatgagccaccgcgcccggcttggaatgattttagagtacttcatttgaggggttttattatgtgtattttattttttgcatcttctgtaataaccatgtattttctactgcattcttttttaagtaggaggaatactgttggcgttcaaaagcattgctgtttcagttaagtagttccttaattacttacaatgtagtaaggctacattgaaggaagatataaatttcagtcaagactacgactgagcaaaggtaaaaaaggaagaatgttcaaggtgtctgtgcaagagaacagttagaccaggctggctagagcagtgtttatagggacgtaacaggagatatgtgtggcagatttagggtagattcagagtgccagtaatatgccaagnccaaggcacgttgccccttatacattgggaaaactgttgaaggtttttaacattgggaaggtcgatcgcatagcttggtgccagatagccactgtgcagatggcttaagccaggagttggcagactttctgttaaaggtcggacactaaatattttggactttgtgggtcatagttatagcaggaaagcagccatatcagcatatgattgaatggacataactgtattccaattaaactttattttttaattaattaatttttttgagacagagtcttgctctgtcactcaggctggagtgcactggtgcaatcttggctcactgcaaccttcgccttccggattcaagcgattctccttcctcagtctcccgagtagctgggatcacaggcatgtgccaccacgcccagctaatttttgtatttgtagtagagacagggtttcaccatggtgaggctggtctctgccttcgcctcccaaagtgctgggattataggtgtgagccaccgcgcctgcacttggcctccaattaaactttactacaaggacaggtgcttggcctgatttggtccatgggcatagtttgacaaacagtggtttgaacaaatggacctagggacttcagcagtaatccagtcctgaactaagcaatactataccatttttttgtatagcttttatatttatacatgaagtgtaatatcacataacgttagctctgatctagtctgcctggctgtaagtcctggcatctcctggttattgacagtgtgacattgggcaaattaacttctctttgcgtcagttttttaattttaatctttaaaatggggataatagtacttcttacaaagggttgtaaggagtaaatgagttaaagcacataagtgtagtgcttgtacatataataaaagctcaatatgtgttaacttaatattttaaaaattattcctcatatacattattaaaggcagatctgagagatgttttaaggntagaatttactggcttaatgcatctctagctacggaggaaagacagtatccaacacttcaaggcaagggnccgttcacatagaggtaatatggaagtcataaaagtaaattaagggagagagggaggtaggaaatggaggattaaggactgattttgatgggatgcacaggnagagaaagtggggagagtaaaaaggaataaaaaagaagtcaagaaggaggcagaatcagtctctaaagtatgataggaaccagaatagcatagtagtatatagactaacagaaggatgggtggtgaggtactgctgagaataacagttattgtgttgatgatattagtgaattcaaccagcagantattaattggatgcctcctatgggcccnattactggggatacagggaagaattagatacatactctgtactcaaagagcagaaaatctactaggagtgaaagacttggaaataatatatgcaccaactttaaaaataatcaagagtaagatagaattttttagatttaattggtacctttaaaaacttaaaattgacttacggttcataaatgtgggcaatttaattgaatttattttcttttctagacaatggccaagaacaaattaagagggccgaagtccaggaatgtatttcacatagccagccaaaaaaactttaaggctaaaaacaaagcaaaaccagttaccactaatcttaagaaggtgagtattagttaagcactctgactttattgtttacaagcaaagtgtcattgtaagctactgaacagctgtatactattactttttaaaaaggttcttcatttttcctagaaaggtaaggatggtttcaagcatttgtctaaaaaaatataaaaaaaaaggaagaaaaantaacctcccntttcttgaaaacaaatngttgaaaagaaatnaaacattttaactacanaatgtgtgaagcttcaatttaatagttttactgaaccatagaactcatttaaaaaccatagtatgggaaacagttcttatctctaaactcaaatgtaagaatgtattaatagaggcaagacatgggatgtcagtgagcacccattctttttctcctcagtaattcttgtatctttganagacatctgcaattcaaancaaaaacctgtaaaatgaagataaaaaatatttattgaaatgcacaatttgaaaggggtttcttttctttgtttatatttcaaaatacctgagaaatttctacaagatttaagaaaaatttttaagaaaatgttttcaagtttcagtagtagatggagtcagctctccaggactcagtttaattataatagtccatagaaatctaacatttcatctttcaactttcatgagctagcggagttaagctttttggttgaatagttttatgattttataaatgctaagaatgaaattaagcagatgatgggggttttggggatgacagtttatataggacggtcttcatagttgacacattgaaaccaagactagaatgacaaagagctagcaatgcaaagagctaggaagtgttgggagtggtgggttcgaggcagagaaaaatagcaagtgcagaggccctgagctagggaaaagcttggtgtatttgaggaagattattttatttggacaggaggtactagaacttttatatatgccaccaggtaggatctaagagagagatctatgggtaggctgcataaggtgcaaaggaggtaagggttttgaaggagaaattgtttggcagcagcaacagtgaagaagaagagcaccacccctacctctgttaaactcaagaggaggactgcgagggaagctgtcatcaggggtcttccattaagacaagaaggtccaggaaggattcagagacgtattgttatgttagaagggactaaaagtatttgatccaggtttcttgtatagatgcgnggatgacagcactgtagcctagaaagattttggtcactgtaaggatacaggaaaaaagcaactcagtttctcttactctcactctcatacggacactcaacacnttccaatanctaaatttngtggggcaagtttcccccacaccctaacaaattctgcaaatgaaattcttcagcaaggccaacacctgggggtnncctttaattnaaaatctgacactngttgacctggnangantagcgtcaganttccacanggttgagangttngagtcctnaagcatctnccccaacttccagntgacaatcacaagtcccagnatgttttacctgtgcttctcacccaaccagttataaataagtgttcccatgacccccntccttgggtttgattaatttgctagagcagctcacagaacccaggaaaatacttttaccagtttattataaaggatattacaaaggggnacagatgcgtagccagatggaagaggtgcagagggcaaggtacatgggnaaggggcatggagcttccctgctctctctgggcatgccactttctaggagcccccatgtgttcagctatccagaagctctttgaacccagttcttttgtagatttccggaggcttcattatgtaggcataattcattaaatcattggccattagtgatgggcttaacctttatccccactcctctggagcagaaagtcctaatcctctaaccctgtgtttttatctgactagccctcctcctgaagctatctagagactcccagctaccagccatcttattagcattcaaaagacactcttatccctcttaatacaatgatttaaaaagctgtatgacaggaaatgaggacaaagaccaaatatatatatatatcttattatgaatcacaatatcacagtcacatattttagccttctgaaccataagtgtgaggcatagccacataaatcccattttttaaaaaccaaaactttttgtctgtaatttcccaataagactataagaatttttgagtgaattatccctaatttgttggtaagagntttttagattttnagatttaacaggttaaggttgaatatatcttatctttaatggttatgagatcatagattaatgctttttttctttttaaaagataaacattatgaatgaggaaaaagttaacagagtaaataaagcttttgtaaatgtacaaaaggaacttgcacatttcgcaaaaagcatttcacttgaacctctgcagaaagaactggtnaagcagaaatcatttgcttttttttatggctaacaaattgaggctaataaattaaactcccaagttttcaaagcctgtaagttgagtgtaatttttagtacttggctctctagtactaggctctatagtataaatagcatattcagactctaaaacattgtcagaatatacagattgttctacttccaaagatatgactagaaaaattaaattgaataacagcttatataagtcatttgtctgctattgttgtctgtgtttttaaatataatactttctcctttcagattcctcagcagcgtcatgaaagcaaaccagttgatgaagctacaagattaatggctctgttgtaatatactggtgatgcatctaattctccacaaagaccaataaattgaatgttttatacaattttatttttaaaaatcttgttaatgtacaggcattggcacattttaaaaacaaactacataaacagatctttcctataacctaggaaagtggaatgtcagaagtcaacaaaatgtgataaacttaaagtgctaaaacagaaggcacttcacaaaatctgttcactgaaacagttatatatcctcgtttacatccttcactttacaagtggcagtgaacgtctgtttggatagaaggacatacagaaatacaggcagtttagtggcagtaaaaatataagacaagtaatgagtccttggccaacttgtttttgatgacctgtagtgtcctttaactttcctccttaagaagaaaaaacagaaggattcacaattagaagaaaagttgaaatccagaatatagttacttttgggagtggggacgtttgtggatattaaantcacttatcccctaaagcaatcagagccctttgtttttatggttgaagttttgtgaagtaaagaaagtattagggaagaacacttcagaatcagtgaactaaaaaaggtgttacattcattattttaaatatttaggttattaagaagtctaaaatgttacacagttagaggtagataacagtcccaagccttcacccaatcaagtaatccacagtccccacataaaacacaccacaaaccccgccgtcaccatccaaactaaacctgcactcacccgccccgccagcacaaagccccaacagacgaaacacggcgaacaaaaaacaaagccactgctaaacagcgctcccacatacggttaatcatccccaacaaaacacccccaaacacatcattccaaatcaaacccccccgcaacgcgtagcctgaaataccatcagccaccaaaaaccagaacaaacaaaaaacaaattagattgagaaacagaagccgccaggagtttgagaccagcctggcctcatggtgaaaccccgtctctactaaaaatacaaaaagtagccaggtgtggtggcaggtgcctgtcatcccagctactcgggaggctgagccaggagaatcatttgaacctaggaggtggaggttgcagtgagctatcatgccacgccaccccagcctgaataacaatccagcctgaatgacagagggagactctgccttaaaaaaaaaaaacagaacactaatgaaagtgtttggttttccaccttgccaaacagaagaatgaactggacttacaaagtttgctgatgttctctgcttctacatacatgtttagtacatctctagttactataacatttgctaacttaactgctaccacttcgtaggtnttctactttatttgttaggtagtaggactctgatccaagaacttacagaaggagagaaattattaaagtaattagcatattgtagctaactgatatttaataatttttcaggttagatgacaacatggttaatattaatactaattcagtgacttcccattggcagcttgaaattggcctgggtaggggtatttacaaaggcaagtgttcagatcagttgcttgatttagacaagttattttactcttcttggaccagatccttcaggagtggaaaggcctaacagtttattttcaatgaaggtgagaagtatccccatatggattcctttccctcaaaatgcaagcaaagaaaaataaattctgaaggttgcctattacttactgtaagtgttaagggagaattttcatgaatcttcatagtaaagcaggtagcaaatatatgttcatttcttttaaatcatgtttcacttataaattccacagaagcattactgataagtgagttagtaaaattttaacctacttaccgtcagaagacattaactcatcaatgatatctccactaatagatcctgctggaaacagtaataaagttttgttatatttctgttaacagtaaaagatactcatatttaaacacaagtagtcacagcagcagcttgactgacatgcacatttatttaaagtactagtactttgtggacaggttgttttcatgagcgcttactctgtgcctggcattacttttaaacttccaaactccagacgaagaccaaaagactcattatctgccaggcatggtggctcatgcttataattctagcactttgggaggctgagtgaggtggacggattgcttgagctcaggagttcagaccagcctgggcaacatagtgaaatccgtctttacaaaaaatacaaaaaaattagccagacattcatggcacgtgcctatagtcccaactacttgggagactgaggtgggaggatcacttgaggctgcagtgagctgagatcgcgccactgcattccagcctggctgacaaagtgagaccctgccaaaaaaaaaaaaaaaaaaaaaaaaaaaccaccaccaaacctcatcatcattctaccaaaanctgactcagttttagtcagtagtttcataattctcccagttattcaaccttaaaacttcaacatcactttccattcctgttaactttatctccagatctcacacatcaaatgttattttgcctacagtgtttctcaaatctgttcgttatttctcttcctgatcntcactgtaatcactgttttagcctttttatttatttatttattttgagacaggatctcgctctgtcactcaggctggagtacattaagtgctgtcagggctcactgcagccttgacctcccaggcttgcaatcctcccactttggcctccctccccagtagctgggaccacaggcacacgtcacaatgcctagctaatttttaatttttttttttttttttttttttagagatagggtctcactgtattgcccaggttggtctcaaattcctgggctcaagcagtgtacctgcctcggcctcccaaagtgttgggattacaggcatgagccccaccancacttggcccttgttttagccctaatgttctctcagttgcataactgcaaacatctacagtttccatcgcttctgaattctgcttcccagggccaaaagcatctttcctaatcatattactcctgtgtgcaccattatagctaattatgctatttccttggtcacagatcttcactggtttattggataaatgtcctaactactctgaaattcaaggcctgctctaatgtagcccaaaattactttccttagttaggatttccaaacatgaaaccataaaaacagaatactcactttttaaaaacactttgttgaagccagtgtgttaattatgtctaagctaacccaggtaaaacccatgtaaagcttgcctgctttatatcctaattagattgtaagctttttaaggactacattttctttttttttttttttaagatggagtcttactctgtcgcccagactggagtggtgcgatctcggctcactgcaacctccaactcctgggttcaagcaattctcctgcctcagctttccaagtagctgggactacaggtgtgcgccgccacacccagctaatttttgtattttttagtagagacagggcttcactatatgttggcaagactggtctcgaacccctgacctcaggtaatctgcctgccttggcttccctaagtgctgggattacagttgtgagccaccacgcccagccagcactaccttttctattgtgcatcctaatggtctgtagtatagacatatttataggggaaagaaaggaatagatgtgggcaaaaagaagctaaaaaacattccatgtccagttatatcttgttagcgtcacttttaacctgtgaaatcccattttagcaatgagacacatcctagaggtaaaataaacaatttggattatatacaatatangttttaaattatctgcaatatgatgtctatattnggcaccattcattcattcattcattcagtagtcactgagagattgcctaccatgctccctttatttggaatcagtaaggtactgccaaattaagagttgtgctctctactcctgatacccagtgtgaaatgttttagctttttaaaatttcataaatgaaacaaatgaggaaagtaagatttcctacatnaattggagttgagaccnatttatcacttctataaaactaagcttcccaaataaaaagtataacaaagaatatggagaaacaagaggcataagtcactatggtccatacttaaagatagttggaacatattttcttaaaggtagttggaacatatttcactaatttatcctagacttactaagagagataaaagaaccttaccaagtaaacttcaggtaaaagctgaaatctacatatgccacaaatggaaaattccacacctgaccttgtgataggctgcagtcaagccacagtcaatattttgtttcatgcaaaaattaaaactattgtataaaattatattcaggctatgtgaataanggtgtgtatgaaacaaatgaatactgtgtttagacttgggtcctatccccaagatatgttattatgtatatgcaaatattccaaaatgtcaaaagtgcttgggacatttctggtcacaagcactttggataagagagccaacctgtttttatatttctccctctctaatttacaaaagaaaggctctgaacccacctgaagatatatctgtagctgatgtctgctgcagagcctggcttctttcagagacatgttgctcaggcagattttgagttgccatgctggatttctgtggagtcactggagtcaaggactgggaggaaggctgtgtgaggtcatcaggtgggggaacaggaaaaaccacgggcttagatgaactcgactctttatttataagcagcacatggataggtcctgaatgactctttagattgatctggtatttcttttgtccattctgaccctttgaagttattgggtataaacaaatgtataattattaacatttctagctaacttaagacagtacaataagacaggcaaagctattagggacttactaaattcacataacacaataaagtcattaagtcaaaacacaaaagtagagacatagagtagaatgtaattttgagggctctaaaccactagtttctaaaaagtaagcttttcacaaatactgatcattagaaactctctgttgtagaattctggcaaccatctgttgttaccgtgtgtgactatataataggtcagggncccagcaatgctccaggtattctccatatacaggaaatttatcccctggagttggccaccacagatctggtcagttcaacatgcttcacaaatcaaactcttttttttcccatctgcaagcacaaagacaactaatttctcctactgagaaataaatataacattcttccagctgaaaaagtaatctgtatcctgaggcttcagactccagtaatacaaatgcctaaatgtaaacttttttaataagcgggtgggggaaggaggtagataatatagtaatctttttctactcccttttttggttattgctttcaaattagtttgtttttaaaaatctgaatctgaaaacgaaaatcatgaaactcatagagtcaataaatgtcntttgacttaataagccagacaatgttttataaaagacctaatttaaaggaattgattgttgatatgtacattgaacttttttcttcaatggcaatttttatatcaattgtacatgtgttgttgttgttgttgttttgaaacaaagtttcaatcttgttgcccaggctggagtgcaatggcgcgatttcggctcactgcaaccactgccttctaggttgaagcaattcntgctgcctcagcctcccaagtagctgggattacaggcatgcaccaccatgcccggctaattttgtatttttagtagagatggggtttcaccatgttggtcaggctggtcttaaactcctgacctcaagagatccacctgccttggcctcccaaagtgctgagattacacgcatgagccactgcacccagcccaatgtgggaattttaacttatttttatagattattggccatatgtattagtcatttcttgacatcctctaacttaaaaaattcaaatttaaaataatttaatcaaaatgttaaatcattttaaatcatttggttacttggggatagatatcttagggataggacccaagtctaaacacaatnattcatttgtttcatacacaccttattcacatagcctgaagataattttatacaatagttttaatttttgtatgaaacaaaaatcacttgataaaacattctgattactttttaaaaattgactttgagccaaatgatatcaataaatgactaaggatatagccaataatccttaaaatcatttatgaatcaattaagtctataattttacccaagaaattaaagacattcaaattcaactataaatacttttagataaaaancttgactaactcccangtgtttacacaattagcntcacattcacctaaaganaaatataaatcctgagacagtagattcatttttcccacttatataaacataagttatcctacataccatttctggaatgggtacctccangttgtgtaccagaaggtgcctgaatggccanaaagtgtatcacctggtcaaaaantaaatataaaaagttacataaaatactgttgatcnatggaatacagtggcaagaatgtgggctctggaatcagagtgtttggttcaantcccaaactaggtgaccttgagctttgattttcaattctataaaatgggggatacacaaccntactgcatagatttattttgaggattaaataagataatacatgtattagtattatacatgggttagctgtatgattctcattaacaaattcagctcaagttgattttgctttgactaagactcctgtaaagtctgagattcttaagaccatttagcctcaaataacactgttcattggactgaggatagtggagattaggtatgagacactgaaatgttgagcttaaatgattttattatttttgaagccaaattctacaacnaaatctctgttgagttgcagattaacagaagtctcagcaaacttccttaaaaaactcaggaaatacagtggtaaaatagaacaatagtcctatacttatttccaacatagtcttacatagaaagtcagattccacttgatgaggtacttggcagaatctttttaaataggtggataatacacataaatttaaatatgcacaatttcattttacttgtgctataattttgggaacacacgtccccccattttagttatattaataattataattattaacatgatattgttattttaaggagaaaacacaggggcagcaaattgcataggaataggtttcctggttataagatggattcacctaattctttccttatggtttctttgagtttcatttgagaccagcatacttgcatatagtttgataaacaatgctgatgagaaccatgttctagttcaagtttggtcactaactctgtgactgtgtgacaatgaaagttgcttaatcccgctctgatttagcttgccctctgtccctgtccccttccccttccacacacagttgatccctaccagtggagctaatgaactgaatgctgtgaaaagcagctattctcatgaaaacagaaacaaaagcagtctatcaatacancggcatggntggagtgangacacaatgcccacaacttctgaaaataatgacaggatgaggacacagggaattctgaatcaccctccactaaatanggttgagaggaagaatgcaaggaaaagtctaatggtacttaccattaaagcaattacagatgtcttcatgagttacataggaaaatgtactgtcataggagttaaggaacgacatttatatcaagccgtaggcatttaaattaaggtaatacatctgaaggtcaaaataactaaatgaccatatgcacagagggactgccacacatggacagacaaaaaanagaagtctagtctagaaaggtaaagacaaaggagttcccatcctttgctcttagaagaagccnattctgatttttgtgacatttgaggacccttaggagagagatggaaagcagtgcacattcttcatggaggcaaaggtttctgggggaagggaatggatggggaaaaggaggccatcagcaaccatatcagcttccacatcaggaattttctgtgatcgttgttttttgttcnttgtattaaatggtcaggtatggccacaagaggacacagaggattaaagaaaggctcagaaaaacaaangtattatactcataggtcctagtgacgggaggcaaggcaggctactcagggccnacatggttaagacaacaaggtggtcaggaggcagaagacaggagcaaggggaaagcattagcccagagcttttattgggngtttccttgggnaaaagaaatgcagggntggctgggcatnggtggctcacgccacccagcactttgggaggccgaggcaggtggatcacttngaggtcaggagttcaagaccagcctgaccatatgcacagaggggctgccacacatggacagataaaaaaagaagtctagtctagagatggtgaaacnccatctctactaaanatacaaaacttagcagggcatggtggtgagcacctgtaatcacagctactctggaggctgaggcagaagaattgcttaaacccggggggtggaggttgcagtgagccaagatcgcatcactgcactccagcctgggcaacagagcgactccatctcaggaaaaaaaaaaaagcagggtggggagaacactacgattagctagtctggataattttgttttgttttattttgagacggagtttgctctatcgcccaagctgaagtgcagtagtgtgatcttggctcactgcagcttctgcctcctgggttcaagcaattctcctatggcctccctggtagctgggattacagatgcacattgccatgcccagctagtttttgtacttttagtacggacagggtttcaccctgttggccaggctggtctcaaactcctgacctcaggtgatccgccaaccnttggcttcccaaangtgctgggattacaggcgtgagccactgcatttggcctagtttggataattttggtgggctctaagctatgcaggtagtcccccnagttgtctggtacctgaccctgggatgattaaggcagaggaatanttgccacctggggtgtantggactggagagagganggtctggaccttgactnggttagtttatatatcaaagggatgctcctggctgagcccatgctgntttctttttttttaattttattattattatactttaagttttagggtacatgtgcacaacgtgcaggtttgttacatatgtatacatgtgccatgttggcgtgctgcacccaataactcgtcatttagcattaggtatatctcataantgctctcnccttnnccccctnccccccaccccacaacagtccctggtgtgtgatgttccccttcctgtgtccatgtgttctcattgttcaattcccacctatgagtgagaacatgaggtgtttggtttttttgtccttgcgatagtttgctgagaatgatggtttccagcgtcatccatgaccctaaaaaggacnatgagcccatgctgtttctaagaagtggctagtcccaggatgggcagtctctcctcagccagaaaggtttatggagatgtcaaaataccataatatacagaaaactttatatatatcacacataaccatggttggggcaatgggaatggccagcatctcgtaaagcagggcagcgaagtccaagataaaatagattaatggcttttgaatttcagagctccacagaacacagcttgaaaactcccattgttctcaaactgttaaggggctctgatccatacaaaggaaataacaaatgagatcatggacttgttcaccaaatacatgaaaatgtgaaaagtaaattatattgtatacattagtcaaaatttcatgaggtgctacaaggtaaaatgtggttagtttctttaagagtacaggtaagttcataaactaagagaatcacagatacctgagagaagacggtggtttgtaagaaacacatggatatgtgtttttatatatataataatgtttttatatattatatataaatatattttatatattatatatgatattatatgtattatatataataatgtttttcccccaatatatattgttgataggcacacacgacttagacccctgttctccagtaggaactattttggggttcatgttaggcagaaagtatcaaggattgattgtggacacatcatatctcatctttaaacgaaaaattttcaaaactttgagagctgctgaattttatacttcagaacactgaacataattatttaaaaatacaaatgtacttaacaatggcttctaatattcacagatttcctaagcacactggctagcatactgcattctatcaattggtagaccaaaagttggctaatctctttttccccctcagtgcaacacaggaataacgctaacggatctgtactatataacttaaaaaggtaacatttagaaaatattagtatataagaatataataaaattaaaatgtcatatttacttataaaacttaactgntctaaaaacaaagtgaatgatctttagactgaaatgatttatacatacatattccaanagctatatgtatatgcataacttatttaaaaggatatctattattaatggaatcgtccatcacatttttgatgctttgctgtagccacaacttctgctgatcnaagttctctttccttcagttctagatcttcaatttcagctttaagatatcttaatctatctatgacttctttagtattacagccagcacctacacctcttaaaaacatatgagaattaatatcctcagtatcagatctaggttaatatcacttaatttttactgtaataaaactgacttatttagtaatatattcaagacagaagtctttacactcttaaaatcaagcactaaaatccttaaaaattttaaacaccatacttcttgcttagaaaatttattgacaagaacaaccaaattacaaaaattctcaatcttcccntnacagtgtttttttgtcatctggaaggccagactggttggtgactgggtnaccaaaagagtgtgctcagcagtcacacctagcagtctcaggatgtgactgaggtgctggtaaaataaattnacaacattttaatgttttggtggaattttggcgaaaacaaaacaagacaaaaactatggtcaaaggggnacacattagaangaacagaaattgttacattcaaacgtataaccaggccacaattaatgacaacatgcgntttcaattaattactatttacaaagtacaaattcctatgaaagtagttcttgctctcaaggacaggtaaagagttaggaagagattaatacaagacagtatgcaatgtgtgccaaatgagtaatagcttgagggagaaagtaagatttgaattttanagagcgaaaacccaatatccaagagagcaagggaacacccaacacaggagtgacacagaggcccagaaaggtgtgttcagggaaagctgaggggcctgactgaaatagaggatttgggagatagaaacattgggaaggtcaaattttacagagcactgagaagaaaaaaggtttcagaagagggtgctggtttgtaacttacttccactggatactgttttttgactttttttcaatcaagtcaattccctctaagancattggtgatatcataaattctccttttttgcctcacagccaaagtatcagcagcc

SEQ ID NO: 3620 - DNA, 4140 bp, Homo sapiens
gatggaaatatcttctacataactgggagcttccatttttagcctggaagaatgaaaattattgataatcatcagatgaaagggaacccaaactcatgacattaaggtttttctaccttcttgaaatgctgggaggaaaaattcatttaagctgcctgtgtatttgagtataaaatagcaatattctgaataataccaccatgctgctcaactctaatatagggattggcaatgttttaaagttttaaattggtggctgggtgtggtggcttacacctgtaaccccagaatctgggatgccaaggagggtggatcacatgagctcaggaatgcaaggccagcctgggcaacatggtgaaaccatgtctctgcaaaaaatacaaaaattagccaagcatggtggtgtgcacctgtagtctcagctacttggggggttgaggaggtgggaggatcgcttgagtccgggaggtggaggctgcagtgagcagtgttcgcgccattgcactccagcataggcgacagagtgagaccctgtttaaaaaaaaaattagggccgggcgcagtggctcatgcctgtaatcccagcactttggggggctggggcaggtagatcacttgaggtcgggagttcgagaccagcctgaccaacatggagaaaccccatctctactaaaaatacaaaattagctgggcatggtgacgcatgcctgtaatcccagctactcaggaggctgaggcaggagaatcgcttgaacccgggaggcagaggttgtggtgagccaagattgagccactgcactccagcctgggcaataagagcaaaattctgcctcaaaaaaaaaaaaaattaaattggtcaaggcctaggtaataaatgttttaggctttccaggctatgcggtttctgtcgcaagtactcagcattatcattacagcatgacagcagacagacaagatgtaaacaaatgagcatggctgtgctgcagtgacactttgtggacacagaaacatgaatttaatagaatatgcatgtgttgctatgtatcattcttatgttgagtttttccccatcttaagatgcaacttcattcttagctcgtgggctatacaaaaataagtagtgggctggatctggcctttgggctgaagtctgccaatttctgctctgagacaatcaaataagagctttaacatgaatgtttctggaattcggaattatctccacccataaatagcatattttgtgcatttatcatagttcttaccactttctgtcaagaatcattgttccctgtgcatttacaatccagatgattgtgccctgagagatagaaatgtggtatgtacttcctttgagcacctacagagcctaggtgtccaaactattttgacttaatgaaactgtgtggtggagagaagagatggaggttaaataagtaagagaaattatggagtatcatctatacaaggctggctgtgttcccttagaggactatgagtttcattatagatggtttgtaatttatgtggtgttctcattttcttcttctccttaattatctttgtttacttgttgaattgcttccaagacaattatttgaggtccaggtctgtataaagaactctgcattgccgagtctatcccaggaaaactaaggtttctgaaagattatttttctatttatgattttattcatctttaagattgttagaaaaactggaaatttaatttttgcatgtatttttaaagatgaaaaatctttaagctattttctttatgtatggttcatttggaacatgggtaaatatggctcttagaaaattaacatgatcctttcttttgttttagtaatactttatgctttcatgttttatatttcactaactctgcacaataatcctgtgaagtaggtaggacaggagtggagtcaagactctttcaggttaaagtgactaaaaaataaaataaaaacaacccaaagtagtttaagctcaaagaaggtaatattttagctcaggtacttgaaaaatgaagggatggatctttcttccatctatggctgaatccaaggactcaaatgattgcatcagagttctctggtctgttcagttctgtcttcttgtgtgtgttgctctcattgcaggaagacttcttccaagttgctggaggagatggccactagtagccttgattttatatcatcccagcacaaagacaccaaatgcaagagacagcattttccaccagctctagcctggaaaatccttagaggaggactgtagttatcagctcaaccaggacaacttgatcggagaagagtggttatccagaaagggatgctgagcagataatcaacgttctctgaagtgggtataatgactatctacatgcatatgggaaagggaggcacagagaaatgaagtaacttttccaagatcacacggttggttggtgggagaggtaaaccaaaaacccaggcctcctcactcagacctctgctcttgcctgaataaccatgttatttcgccacttcaaaataaaagtgagacctaccagttttcataaacactgtaatgtcgttctgttacatttatttctttgccttctgtatatatatatcaatagcctcacattcaaagaaccaaataattgtacccaacttattcacctcagtatttgtgaataactctggccttataaaaaagtctaacggttttctgtttttgttttgctcttacactttatgggcattttataccagcatttttaggtgtttttaacaggtggatcgtcagaaagaatacaaaagtttgaataaacatacattggcaagcaattattcctctccccttagtatattctgttccttaattttttttgtgatgggcataattaaatgatttattgcaaaaattgcttatctttctgtaagcaggcaagtgcctggtttgttggaaagaggacttgaccaagtgctaaccaatgtggatttgcgaattatcaagtttacaaaacctttttaaaaactgttttaaaaaaatgcttagttttacaaaaccgtctggctttgtcaatttctagttagttgtgtggctgccagcacacggcttaaactctgaaccttagtagtatcatcacttgcaaaacaggagtggttttatcaccttattttgagcatagtgtaggctgaaatcttttgtaagctacaaaatggcatataaatgtcagttttactgacagagcaggagcaccgtcatctcggacaaacaccgccatttttaagttccagctccctttctagcctcatgaatttcaaggaaatcacttctcttctaattacaagcagatagaaagagcagtcagtaaaacacagataagacagctcaggcagagtgaagtagggggaaaatctcttggctaactaccaaacctcaccctcatacaatgagccccagtgaaacagtgggccttaataagcacattcctttcccttcaggtgtactaagatagggaagctaaaagcagacttttagctgcgggtatgcctgcagctgcagaaagatgtatgggaacagacacacaactctccctcccagataagcacagcaaagagacacagaagcagtccaagcctctgttaaactctcccaccctgaatccttaaaaactcttagtctgtaagagagtgtggctctgacctaacttggccagctgccagtctcaggtttatttaaaataaacctgtccctgttgactataaagccacccttcgtgcttctctcctctatttaattcttacatctacgtttgtttgaaatccagcttttcctatgacctcaacaaaataaatagaggcacatgtgaaaacttacctttaatagggttattctcttggaagaattgagtcaattttcttaaagcagaaaaacctagacgacgttatgggttgaatgttttaagttccttggtacctgttttatttgtatattttatactgtgcctggtttcttgtgcctttgcagtgctgtcaaaaattctctttttgaaacaaggaagctgcagtgagaaaaacatttctaactcgcagtgcattacaaatcttcctttcggagattatagctctagatcttttccaacct

SEQ ID NO: 3621 - DNA, 4159 bp, Homo sapiens
  SITE (108): n equals a,t,g, or c
  SITE (311): n equals a,t,g, or c
  SITE (322): n equals a,t,g, or c
  SITE (407): n equals a,t,g, or c
  SITE (485): n equals a,t,g, or c
  SITE (516): n equals a,t,g, or c
  SITE (696): n equals a,t,g, or c
  SITE (703): n equals a,t,g, or c
  SITE (705): n equals a,t,g, or c
  SITE (716): n equals a,t,g, or c
  SITE (725): n equals a,t,g, or c
  SITE (741): n equals a,t,g, or c
  SITE (752): n equals a,t,g, or c
  SITE (874): n equals a,t,g, or c
  SITE (1676): n equals a,t,g, or c
  SITE (1994): n equals a,t,g, or c
  SITE (2952): n equals a,t,g, or c
  SITE (2963): n equals a,t,g, or c
  SITE (3587): n equals a,t,g, or c
  SITE (3882): n equals a,t,g, or c
gatggaaatatcttctacataactgggagcttccatttttagcctggaagaatgaaaattattgataatcatcagatgaaagggaacccaaactcatgacattaaggntttttctaccttcttgaaatgctgggaggaaaaattcatttaagctgcctgtgtatttgagtataaaatagcaatattctgaataataccaccatgctgctcaactctaatatagggattggcaatgttttaaagttttaaattggtggctgggtgtggtggcttacacctgtaaccccagaatctgggatgccaaggagggntggatcacatngagctcaggaatgcaaggccagcctgggcaacatggtgaaaccatgtctctgcaaaaaatacaaaaattagccaagcatggtggntgtgcacctgtagtctcagctacttggggggttgaggaggtgggaggatcgcttgagtccgggaggtggaggctgcangtgagcagtgttcgcgccattgcactccagncataggcgacagagtgagaccctgtttaaaaaaaaaattagggccgggcgcagtggctcatgcctgtaatcccagcactttggggggctggggcaggtagatcacttgaggtcgggagttcgagaccagcctgaccaacatggagaaaccccatctctactaaaaatacaaaattagctngggcatngngtgacgcatgncctgtaatncccagctactcagganggctgaggcanggagaatcgcttgaacccgggaggcagaggttgtggtgagccaagattgagccactgcactccagcctgggcaataagagcaaaattctgcctcaaaaaaaaaaaaaattaaattggtcaanggcctaggtaataaatgttttaggctttccaggctatgcggtttctgtcgcaagtactcagcattatcattacagcatgacagcagacagacaagatgtaaacaaatgagcatggctgtgctgcagtgacactttgtggacacagaaacatgaatttaatagaatatgcatgtgttgctatgtatcattcttatgttgagtttttccccatcttaagatgcaacttcattcttagctcgtgggctatacaaaaataagtagtgggctggatctggcctttgggctgaagtctgccaatttctgctctgagacaatcaaataagagctttaacatgaatgtttctggaattcggaattatctccacccataaatagcatattttgtgcatttatcatagttcttaccactttctgtcaagaatcattgttccctgtgcatttacaatccagatgattgtgccctgagagatagaaatgtggtatgtacttcctttgagcacctacagagcctaggtgtccaaactattttgacttaatgaaactgtgtggtggagagaagagatggaggttaaataagtaagagaaattatggagtatcatctatacaaggctggctgtgttcccttagaggactatgagtttcattatagatggtttgtaatttatgtggtgttctcattttcttcttctccttaattatctttgtttacttgttgaattgcttccaagacaattatttgaggtccaggtctgtataaagaactctgcattgccgagtctatcccaggaaaactaaggtttnctgaaagattatttttctatttatgattttattcatctttaagattgttagaaaaactggaaatttaatttttgcatgtatttttaaagatgaaaaatctttaagctattttctttatgtatggttcatttggaacatgggtaaatatggctcttagaaaattaacatgatcctttcttttgttttagtaatactttatgctttcatgttttatatttcactaactctgcacaataatcctgtgaagtaggtaggacaggagtggagtcaagactctttcaggttaaagtgactaaaaaataaaataaaaacaacccnaaagtagtttaagctcaaagaaggtaatattttagctcaggtacttgaaaaatgaagggatggatctttcttccatctatggctgaatccaaggactcaaatgattgcatcagagttctctggtctgttcagttctgtcttcttgtgtgtgttgctctcattgcaggaagacttcttccaagttgctggaggagatggccactagtagccttgattttatatcatcccagcacaaagacaccaaatgcaagagacagcattttccaccagctctagctggaaaatccttagaggaggactgtagttatcagctcaaccaggacaacttgatcggagaagagtggttatccagaaagggatgctgagcagataatcaacgttctctgaagtgggtataatgactatctacatgcatatgggaaagggaggcacagagaaatgaagtaacttttccaagatcacacggttggttggtgggagaggtaaaccaaaaacccaggcctcctcactcagacctctgctcttgcctgaataaccatgttatttcgccacttcaaaataaaagtgagacctaccagttttcataaacactgtaatgtcgttctgttacatttatttctttgccttctgtatatatatatcaatagcctcacattcaaagaaccaaataattgtacccaacttattcacctcagtatttgtgaataactctggccttataaaaaagtctaacggttttctgtttttgttttgctcttacactttatgggcattttataccagcatttttaggtgtttttaacaggtggatcgtcagaaagaatacaaaagtttgaataaacatacattggcaagcaattattcctctccccttagtatattctgttccttaattttttttgtgatgggcataattaaatgatttattgcaaaaattgcttatctttctgtaagcaangcaagtgcctnggtttgttggaaagaggacttgaccaagtgctaaccaatgtggatttgcgaattatcaagtttacaaaacctttttaaaaactgttttaaaaaaatgcttagttttacaaaaccgtctggctttgtcaatttctagttagttgtgtggctgccagcacacggcttaaactctgaaccttagtagtatcatcacttgcaaaacaggagtggttttatcaccttattttgagcatagtgtaggctgaaatcttttgtaagctacaaaatggcatataaatgtcagttttactgacagagcaggagcaccgtcatctcggacaaacaccgccatttttaagttccagctccctttctagcctcatgaatttcaaggaaatcacttctcttctaattacaagcagatagaaagagcagtcagtaaaacacagataagacagctcaggcagagtgaagtagggggaaaatctcttggctaactaccaaacctcaccctcatacaatgagccccagtgaaacagtgggccttaataagcacattcctttcccttcaggtgtactaagatagggaagctaaaagcagacttttagctgcgggtatgcctgcagctgcagaaagatgtatgnggaacagacacacaactctccctcccagataagcacagcaaagagacacagaagcagtccaagcctctgttaaactctcccaccctgaatccttaaaaactcttagtctgtaagagagtgtggctctgacctaacttggccagctgccagtctcaggtttatttaaaataaacctgtccctgttgactataaagccacccttcgtgcttctctcctctatttaattcttacatctacgtttgtttgaaatccagcttttcctatgacctcaacaaaataaatagaggcacatgtngaaaacttacctttaatagggttattctcttggaagaattgagtcaattttcttaaagcagaaaaacctagacgacgttatgggttgaatgttttaagttccttggtacctgttttatttgtatattttatactgtgcctggtttcttgtgcctttgcagtgctgtcaaaaattctctttttgaaacaaggaagctgcagtgagaaaaacatttctaactcgcagtgcattacaaatcttcctttcggagattatagctctagatcttttccaacct

SEQ ID NO: 3622 - DNA, 9210 bp, Homo sapiens
ataatgaaacagtcacaaagcgaaaaagcgcatgtggaggatcccctgcttcgtggtttttattttgataaaaaatcatgcaaatctaaacatcagactacagagttacaaccagatgtacctccccatgaaaggattttggcaagtgcatctcatgaaatggatcgcatttcatataaaagtggcaatatagaaaagacattcactggcatgcagaatgccaaacagctctcccttttatctcatagttcatctattgagtccctttctccagggggtgatttatttggattgggcatctttaaaaatggcagtgacagcctccagcgaagcacttctttagaaagttggttgacttcctataaaagcaatgaagatctctttagctgtcacagctctggggatataagcgtgagcagtggctcagttggtgaactaagtaaaagaacattagatctcctgaatcgtttggagaatatccagagcccctcagagcaaaagataaaacgaagtgtttctgatatcactcttcaaagcagttcccaaaagatgtcctttactggccagatgtcattggacatagcatcttctatcaatgaagactcagcggcatctctaacagaacttagcagcagtgacgagctctctctttgctcagaggatattgtgttacacaagaacaagatcccggaatcgaatgcatcgttcaggaagcgtctgactcgttcagtggctgatgaaagcgatgtcaatgtcagcatgattgttaatgtctcttgcacctctgcttgcactgatgatgaagatgacagcgacctgctctccagctctacccttaccttgactgaagaagagctgtgcatcaaagatgaggatgacgactccagtattgcaacagatgatgaaatttatgaagactgcaccttgatgtcagggctagactacataaagaatgaattacagacctggattaggccaaaattgtctttgacaagagataagaaaaggtgcaatgtcagtgatgagatgaagggcagtaaagatataagtagcagtgagatgaccaatccctctgatactctgaatattgagacccttctaaatggctctgtaaaacgtgtctctgaaaataatggaaatggtaagaattcatctcatacccatgagttagggacaaagcgtgaaaataagaaaactattttcaaagttaataaagatccatatgtggctgacatggaaaatggcaatattgaaggtattccagaaaggcaaaagggaaaaccgaatgtgacttcaaaggtatcagaaaatcttggttcacatgggaaagagatttcagagagtgagcattgtaagtgtaaagcacttatggatagtttagatgattcaaatactgctggcaaggaatttgtttcccaagatgttagacatcttccaaagaaatgtccaaatcaccaccattttgaaaatcaaagcactgcctctactcccactgagaagtctttctcagaactggctttagaaaccaggtttaacaacagacaagactctgatgcactgaaatcatctgatgatgcaccgagtatggctggaaaatctgctggttgttgcctagcacttgaacaaaacggaacagaggaaaatgcttctatcagcaacatttcctgttgcaactgtgagccagatgttttccatcaaaaagatgccgaagattgttcagtacacaactttgttaaggaaatcattgacatggcttcgacagccctaaaaagtaaatctcaacctgaaaacgaggtggctgctcctacttcattaactcaaatcaaggagaaagtgttggagcattctcaccggcccatccagctgagaaaaggggacttttattcgtacttatctctctcatctcatgacagtgattgtggggaggtcaccaattacatagaagagaaaagcagcactccattgccactagacaccactgactcgggcttagatgacaaggaagatattgaatgcttttttgaggcctgtgttgagggtgactctgatggagaggagccttgtttctctagtgctcctccaaatgaatctgcagttcccagcgaagctgcaatgccactacaagcaacagcatgttcttctgagttcagtgatagttctctttcagctgatgatgcagatacagtggctctttcaagtccttcctctcaggaaagagctgaggttggaaaggaagtgaatggtttgccccaaacttccagtggctgtgcagaaaacttagagtttactccttcaaagcttgacagtgaaaaggaaagttccggaaaaccaggtgaatctggaatgccagaagaacataatgctgcttcagccaaatctaaagttcaagacctctccttgaaggcaaatcagccaacagacaaggccgcattgcatcccagccccaaaactttaacctgtgaagaaaatcttctaaaccttcatgaaaaacgacatagaaatatgcataggtagaatgtaccccctccccaagcatgaaaatcatctcactgaaaggtacgtatagtcctcatgccgtatatgtatttaaaatattgagttcaggtcagcaaaaccatggcaggagaaaaggctagtcagaatgaccagttacggcagacagttatctgaataagacatttaggtagaagaaatgctctcaacaatgaaagtaactgtgaagcaaaagaaaaaaaaaacagggaaaattgacattcttagtgacattatctttattacataattctggcaagaatacaaaatttgaggaagtagttgaacaatttaaggcctcaaattcttccattgagggagaataaaaagcttatccaaatcgcaattatactccatgatcaaaatgcatgcatagtaacaatgctctccacttcagtttcctgcacagagagctgtccgttctcttcagtgcctgcagatgaacaatgattaggctaaaggccacatctcctgatttggcccttccttttatgcttctgtctaatgtaactatcgtcacatttgcttccccagtggaagactgtgctgtcacaactcctaatcacggccatgtctaaggattcaaacaggaggggaaagttgatgttaaagaagaggctcttatttatccacatacagattgagaacaggctcagaaagcaaatgcagagagaatacatgacaagttaatggcgttttgataaaaacagaatttttgaattttgcctgaaggtgacaggctgatttccatcaaattttttaagaaagtcattccactcttcacatttaataagacagctattgatcgataattccaagatgatgatatgtctctaaaagtgacacaaagattctgttatttcccatttctaagccccagtgatgaatatgctttctcaatcaagtttaaagaaaatttgagctttcaaatgtgagagtcatatttcacccaagtatgagatgcctaatgccacctccaccccccactccagaagcttaatgccgtcacctaaactcgtgctataggaaatgaattacagaagcaatctaccctaatttgttaacttattcaaataacagttattatacttaactatgctaaagattatcttttttgtggcagattgtttattttttgatgagcctaattactgattttctaaaagtaatttacatttattacaaatacatcttttaaaatgtgacagataaatgttgttcccataatgtattatgaaaaaagttactatttaaaaacacattatttaatttgaaagatgaatggcaaacatcattatttttttttcctgcaacacctgtgccctaagcttattaaaatgtgtgattctgtgtagagctgctagaaatggggactaagggggggcatctataccatatataccctaaaaataaactcagtatgcaaaattgaagaaaggcatcccacttactaatatagctcaactaattttctgtgtttcagactctatttacaattggctgcaagtgagaacaaaagtaggagagagagaaatgtattttctgtgaaacatgtccaccctataatcacattctccatcagtatgcagtaaaactgaccattaagggagagtaactgcaattccataagctgcttcaaaacaagtcctattagaaccgattgtactgctggctctgccaacctccgcagaagggctggtagagcctggctgattttgttttctgaaaggggataaaggcttgaaagcaacaccactctgagcatgacatcatgtgactgtgaccctcaagtcaccagtcatgctgagatctggagctccagaagctctggcactggagaagcctttgcgaagcactctcccttttttgatcctctgggaatttcttctctctcttacatagacgtagaattgaaatgaaatgtaaatgatgagcagctccatctttagacttggaggaagtgaatgtgctggtggatctgtgtaaccctcacattttacaagcagggacaatgtcaaactagcagccagcccgtctgccagtcagcagtattttttgttaagccccggtgatgcctggccttatctcgggcaaagggagaaacagccagattttacttctgcagaactcacatcgcccccaagtgacttgttataggcctagagccatttaaatagccatatttactggtcctattcaggatttttttcagtatcatgtggacaaaacatctggatgcctgaaatttttaccagacgttagcattggataactgggtataaatagtcacatattgttaaaatactatcaaccaggacaaattatttaatctcaaaatgttgacatgccttcagtatttaatgtcaagaatacatagtaaaaattgtttgataaatatgaggtttcatgtctacaagagcttaattgttgtcattgttcttactacaagttcagaaaaagaaaaagaaaaagctgtgctttttaaagacatttgaaaaccatcagtggtgatgctctttttatcaggacagtaaaattcaccaaattccatttgcttggtttttttttttttccagaactaagttttcagatgatgaaatgattataatgccacccagaagagatataacttagaatagcagatagagtctgcaacagtaacaaaaatgttttccagattttcaaatgttttttatttactgtgttctaattaaaaacccactgaaactgcttgagaagttttaacatgatctaacagtatgcatttgcactgatttccaggcatactgctgtgcttttcactattttcatttttgtgtcatgtttctataaaaatagaggggtcagttacagcaaatcacatcaaaggaaaggtaactggatagatccagatctttctgcctaatttggaggaagcacataatgtatgtctggagtgcctcctaggacctgcctcagagatgtactttgcgctaatctttttgctgtattctgacagttatttcttcataatcctcatcataagcctctgatctttgatgaatggtttaaccctaaacttcaggctggataaatcccgtggtataaaaatttaactcatcatatgcggccagtgtgtgctttttcttttccttttggtctgctctagtgatttggggttttgttttactatgtgtatgtgtatgagtgtggtgttttggggggtgggttgaggagctgtatttacttacagtgcatatatttcctttagaactttttagctttattgccttttctactttattggtctgtaaatgtgatagttggtggccagtagattttagattttaggcaattacttgtatttgtgcatgctcaagtacgcacataaagagttttaaatgctgctgctcagattttacaaactgagaaagctgtaagagcaaacatttctcatgcacacagcacaattcccattctgttaattggattgacattaggtgcttaatattttccaaagctggtcaactaggtttaagaaactacctttggtgattgtgtatgaattttgcactagacaatacaggtataatcttatcaaacttacctttaaaatcactttaataaaccaatgttttgctggatgtgaagtgtctttaaattatctggcacttctgaataactagccctgctatgctaaatgacaaggatgttactgggcatcacctatcatctatctctctctctctctctctctctcacacacacacacacacacacacacacacacacacacacacactctcacaccccagatctgtgcctcagccaattggcctgcccatttccaagtgggccaagttgaaagaattgattacctagagagaatttaaatgccagcatttagtaagaccagatttgcctcacctagggaatccctattctgtggccagatttcaaatgagtcatgtcctcagcatttgaacaatgcactgggctttcttgtgttactgcattattttactataccaaatttcatcccatctgtttctgtctgtctcccccagttctttatctaatttttcttctttctccaactccccatggctccagccaaaccactttttgttaaggtttttctggctcttaagttgaaagattgtagaaaaacagagagcaagacaaagagcatattcgttcttgaaggacagtaaaacaacctgatatgagaaatcagaactcagtttaagcccagacaagcaaaagcctgctttctttgagagctggtcagggggacttacaatagttgcatcctgcattgcctaaacttggtatttaggtgttcctcacatttgaccagttgcttttagccatttagaaacaggcagaatggatcaagtttggaagaaatttatatcatagccatgagatgtacaaatataattgaatccatctcgtttccacaatgctgtatgtaccttaaatgaaatgcattactatttgagctagaagccccagttgtatctttttataggctgaaacacttaggataatcacaatgttgtgaatatttcaccactatacaatagtggaattgttcgatatcatgcataaaatcactgcaggaagggttaagcctgagagcctatcagctcccagtctgtggaatcattgtacattgtaaatattttgccgcatcacttggcatcagtggcctcacattttcatattggtttgaagctattttgatgttccaaactgagtgcacaggcaaaagagtggatgacatccagagaaaaggtcaaacttgatgatttttcttgttttctttgaaaccacgtctttttaaaaaaaaaaaaaaatcaatgtatttttcacatctacgctgagactttttttgtcagtaatgtgaagcttgggctattaaaattatttatattttatgtatctttatatttcagaacattagcaagtagtcccacaattgcagccttcaatggttcctcaaagggcttggttttgctaatgaaaaatacatttctgaaaccttttcttgtcacttttttgtttcttgtagatacgcctggctgcaactcaggggtggcctcatcctcccgccctgggctggcctctggttccatcacgtttgtcactgccgtttattacattgacttctcccaagatgaatcttccttccaaatgtgttttctccacacaagccttgtgatctgaatgtgtgcgctggttctctttaggtgatcgtctttgaagttcagcaaagctgcttgttctcccatggattcctgtcccaagctacctctaccaaccctctctctccagctagacttttctctttgcctcctcccttcccttccactctttaaagttctgcagttcaccaactggtagtccattaaattctcctgtctagaatgacccccccaccagtacttgaccaatttcatgtatcaatctggatttttttttaacggtataatgactgtgtttattgaaagagttttacctaaaaagccaacatttgaattggttgcagcatagagaagaaacactggtccttctttcaaaattaagcaactattaaaagcgccattttatttatttcatttaaaaaataatctatgcagcatttcaagaaacaaccatatggtgttgtatattataaactggtgacattctactattgaattatgtacaacattttcattttttatgcttcttgaggtggtaatgagaaaaaagttttttaaaaaagtgtgccttgctgtatttcttataccatttattaaaaagctgctttcacggtaaaattatgttggtttgaaaggaggaaatagcaaggttaagatgtgtgaataatttctgtatatatgtataaccaagtacaaacattgatgtataatgacagtataaaatgctttcatgtttgtgatgtctagtgatgtggaaaatataagccttaaatccattagattgcatggtaattaaaattggcataataaacacagattattgggggaaaaggaaaattagtgatctcttctactatgttctttaccaaattgttgcatctggttctgaaaaagtatagcatgtagcagcttccaaacatattcatattgcttaagaggcttaacattacctaaactagagactagacgtaaagccttcagttttcaaaatctttctggtcactataaagatcttggaacagcaaatgattaaatgtcagttcccctaaaccaataaacatttatactagattttttatttccacttatcattaatgatttaatgttggatttcaggtaccttgtatgtcttaatttattttaaatatttattttgaatgagtttgatagaaagctagtagaaaagtacagaaaatttgactattatttatagatttcaggtatatttatatgtgtaaaagaaattgacaaagaaatatttcatctggcctttactgactcctgttaaatgcagttttaaatttatatcgtaacacctacttaagtgcctgacacagtaggtattcaataaaaatttactgaattaaaggattaaattaggtgacatggtgacatctatccctttattttgacactaaaacatggacacaactagaaagaggtacaatgcaatataaagtcacaatagataatatatatcaaatttcta

SEQ ID NO: 3623 - DNA, 649 bp, Homo sapiens
caggagactttgaatgtgattgatcctggcttgatggacctaaatgggatgagtgaggatgccctggaatgggatgaaatggacataagtaacaagttaattagtttgaatgaggaatcaaatgaccttgatcaagaactccaacctgttatcccttccttgaagcttggagagacaagtaatgaggaccctggttatgacgaggaggctgataaccatgggggatctcagtatgcctcaaatattactgccccctctagtccacacatttaccaggtgtacagcctccacaatgttgaactctatgaggacaaccacatgccatttctgaaaaacaatccaaaggtcactggcatgacacagcctaatgttttaactaagagtctcagtaaagactcttcattttcatctaccaaatctttgccagatcttctaggtggttccaatttggtaaagccctgcgcatgtcatggaggagacatgagccagaattcaggcagtgagagtggaattgtcagtgaaggagacacagaaaccactaccaactctgaaatgtgcttgctcaatgcagtggatgggtccccaagtaaccttgaaactgaacatctggacccacaaatgggagatgcagttaacgtgttaaagcaaa

SEQ ID NO: 3624 - DNA, 201 bp, Homo sapiens
cagagtacacaagtatagtggcccaggatgtagtgaaagaacaaatcctagagtctttgaaatttctaagggcattctagacctctgttgggatatggtattattttacatactgacacaacctaaattttctttgggtagtaactaatgtcaagtctacatcgactggtaaaacattcaaagaacaaactgacaatgatg

SEQ ID NO: 3625 - DNA, 5419 bp, Homo sapiens
aaatcagttattaaactttatgtatatattttagccagagcttaatttttatgaagataaagacatgaagtttaacaatggacaacagttagtacagctaattgtgaggtcaagtaattgttagacataggggaaggctttgttccacaatattatatggaccactgaacaagaatgacagccctttgttatcacttggcatatgaaaagtgttgtgtgcatagtttgtgttaattttttatgtgcataaaaatgtgattttaatttatatgctctgaaggataattcagggtatagttaaaaatgtacaatgtgccagttcagtatatataaccctagccctcaaattattctgattaaggttaaaatgtgctggtattacgtgctttttcctgaggccttctgattggttcttggtaacagaattttaaagtaaggtgtgagtagtgcaactcctgtcctttatatataaagatatcaagtaatttcatgtcctgatatttaaaaaaattacccacaaatgtgtttttttaaatcgatcaaagctagcaacaggttaaattgtctcagttctcttacataattgggttaaaaattataaggtattagaagaattttaattaatgccaaattggtaaatatggtgtaaaaaaaaaaaaaaagacttttcattttctcccacatagaatagtcagatatattaaacatcccttttccataaagatggtttcaatgggaatggaagaaacaaaatcttaaaagagtgagtatagctgaaccaattcttcattctagcaataaccacactaagttcattactttacaaatgactaaacccaatgtcttgtcctttaaaaaatataggtagtgcagaattgtgataaatacgcatttgtttttttagagagccccactccccaaagggtagccattaattcaggtagccttttaaatgtatttgagagggttccgtctttttggctgctatcctagttaggtgagatgttgctatgggaagaacttgccactatacactaaacagacacttaagcaaaagatgtattctggagcctggcacagtagcttatgtctttggttctagctactcaggagcctgaggtgggagcatcatttgaactcagttctgggccactgagaccctctttaaagagaaggaaaaaaaggtattctggaagatcttgtgcagttgcaacaatgtttcagcatatatatgtgaattcatatatgacacctgaacggaatcatgaagtaacagctgagattatatggtggcaaaaatgacctgcttttcctgaagctttgggaggcctaggattcttgctttaggcatcacctttgttaagccttaaagggggctacaacttgtgcaaaatggtgtctctggtaacacttcagaaataattggcaaaagtgtaataggaatacacaaatctttattttgaaataatcttgtattttaatgtggaattagaagcagcacatcaaactggtgagttcacagaaacttacctgagatgatgctgggttccattgctgttgtgctaagtcacgtatttttgtagctgctgttagctgtgtctagcgttttgtaacctaaggagggtcttatagaagttggtatgttaactaaatcttggactgggaaacagcaccatttgtatcctctgcaaacagatttacgcttttgaggctcaaaccaactagtgttctcatgggctgttgcctaaggacagataaacatggaaaacaggctatgtccagggacagatgattggtggttaagaattacagtaaaggaaaattacacctggattttcttctgtaaagtttcaaggaacttggatttgaactgtgaatctactgttttggcaaaaaatctcaaagaaaaggatgtttgttactgtctcagtcttcctgtctttgctacacgatttggatcccttacgctttttcgttaagaatatctgtctgctatagtgaatttgctagccccttatttttttttttaattttagttctttattagaacgtgtacttgaatggactgtagttgctcataacccatgttaatctctgatagtatttgggttttatttcaggagcttttgcaataaagcagtaactgcaatctgctaaagtcagactgttagcaagtggtgttaaaactgatttaagtccattacactgaacagtaggaaattaccacttttgtaaggctcaaaaatgatcaactattaacagtttcttatggttcagtctaattacaaatttttaaaaagtttatcagtgtatcatttcagattcatctgtatcttctgtaatattatttccagtactgaggtaaggtacacaaaaattcccctggaaaaactatattctagttttgtaagatgatttcccacagtccatttgcttatttcttcctttgataattcaaaaagatgctttaggtaatggtacagaattagaagctgctattttagctctattaactttttctctatggtttcaattttatccaaccagagagggctggcctagttggtatctttaaggcccttccagtagtaatttgagtctagtcacatgtcagaccctgagcaacacctaaccaaatgcccaagtattctcataaggagtatgctgaatttaagtggtgtttgttttacatatgtatccatcccagacattttcaactatgctgaatgcaatctataagatattccaaacaaggacaaagtaatttttcacaagtcttacagccccactattaagtatgctactaattagcttcttgaatttctttgtatttcagtgattgggatgttctttttttttgggaaagtttttttacccctttgtaccctcttaattggattaactgtaaaatgtacatattaattttctagttttagagaccattttcattaaaaatattttccaatagtttttctagataaacaatttatacttaattgttgcttggttgcttacatttcaacctctaggcttcctttttcagctaacttggctgtcttcaggttgtaaagaaaaatgtaaacatatatttgaaatttcattaactgaaactgctgtaaggtgttagcaaatgttaaccataacagattatcccatatcattggactgttctattattgggtcaggaataataggtgacacaggatagaagctcttcctatatatatcttgttgctaaggcagtagttggctctaagctgataaacagcacactgtacagcagtccaaaaactaaaaccagagcttaggtcattcaagttaactggtactcaaggttactcattccaggatactttacataaccaaaaacctaggagagcattctacattgtaattttttttttactttgtttacataaaatttacagggttttgtttttttaagcttagtctgttctttgacattgttgattcatgttctaaattttcatcagatttaacatgtttggaggttcttgtgcactcaatgtgaacctactacaagcttctgaactgcaaaaccttttttttaggtcactgtcaacagaaagatgccttatagaatttctcatgattgaaacagaactctgcattctaacctaaaacccctctaaccctttaaatgaagcattatgcctgcgtgaaattttatttttagacatttctgatactaggttttctttacgggggggcatacatattcagtatactgaatttatacagctttcagtgtggcaatatattaagaagctagttccctaatttttctcagttctcattggttttccatttaaatgtttccgtaagtactctcatcatttggaaaatacttgatggcaggagaacttgcttaaaactaaaggtggagaaagagttaacttccaggacaacccattatagctcacttcttaccaacaaagcagtttttatacagcaccttaggactcatttctaatgtcaacccagatggccagtaaaggcaagggaagaggctaagtgactcacaaaaatctctgatattgaggtctaatgtgaaggctatagataggaattccccacaaacttctaatgaggactaatatgaacagcaaattggagaagacaccaaggacctaattttagtttcactagccgtgggaccttagaaaaaagaccatttgctctggacttttgtttcccaagccataaaatgtggaagaatcttcacaatttcaagttggtcatgtatatttcccttttacagagaaagctgaagcctcgaggctcagatttacctggcttctgtttacctggcttctgcagaagtttaacttgtaacctacctctcattcccaaagtgtgtttaatcatgccgccttctttaaaatatatctggaagcaccaatgagtaaagacaaaggccccaagctagatctgtagagataagtactagactcacatctcagtactatcaaggaaaacatgcttaggttatcagaattgtgaaggccatagtacaaaaagttaagagaacggaactcaggatctgagaaagatcagccattctcagcatgttgccttggctgcttaaccttactaaacttccatttcctcacatgtaaaatgtacatcataataactagtctactgagataagggaagaatacttagcacagtgctagtacactgtaagtactcaaatgttacagatccaagtattttgtaagaaaataccagcaaaagataaaagtttttttatggatcgtatttgtatcaatcacctacatgatctagagccctcacatggataacatttaaatgttcagtttgcctaatagccttcaatgaaacacggattcttctacttaaaaaaggtaagcctggagaaaataaaactgattactatgcaagaaaaaaatgtgctctgctgtgctccttggtatttttaagtggtttccattgtcttaacacctgtcttaaaacgggtatgttgtttgcactgaaccctcaaaagtatttatacctattaagttaaatttccctttttagagttaatgcttcattgcctgtcggcatattatcactatctgtctttgaaaaattttcttttaagtctcaactatttcttcataaagctcttgttcagagaaacattttttgatttgtccaatggactgaaataaaaggttagtaaaccaaaatacagttgatcctcattattagtagaattccttatctgtgaatttgcctactcactaaaatttgtaactccaaaatcaacatccttttctggtcatttgtgagtatttgcagagtgacaaaaaatttaaaccactttatgtgcacaaggcaatgctctaccttgtttaagctctcacaccataaacagatatcctttttg

SEQ ID NO: 3626 - DNA, 29607 bp, Homo sapiens
aggtatattcaagagcaaatgaccaagagccatgtgggtggtggttggctaaagttcggatgatgaaaggagaagtaagtactcttcacacttgctttgtgactagtttctaaggaagtacctcagtgcttggtttttgtaaatcttatttcaactgttagttttatttctaaaagcctacctgagaaatagttgatcagacatttccattagcattaatttctgtttgtgttctgtattggcaaacaccaaagctgctctccagaggtacacctcaagcatgtaaggaccgccaaggttcatgcttgtaagaacctataatctagtttaggcaaatcagattgatgtagctaagctgtgcttagtattttatgccacatgggggagggtccgttggttaagctgagcaaggtaattagaacttcatttaaacttcattatttttgttcagatgggatttttaaagtattttgatgtcttttagttttatgtcattgaatatgctgcttgtgacgctacttacaatgaaatagtcacatttgaacgacttcggcctgtcaatcaaaataaaactgtcaaaaaaaataccttctttaaatgcacagtggatgttcctgaggatttgagagaggcgtgagtaattttatatactattgaattgttctgtgaattaagaagatttttcagtcctacaaaacattttccctaatgcccaatcaaaccttctgatggaaaatcatcttaatgaacaaaggttttagtggggcttgtcaaaatgaaacactgactttgtattgtgactctcctctgactttaatctgttattgagttcttacacataaattgatttctctctaggtgtgctaatgaaaatgcacataaagattttaagaaagcagtaggagcatgcagaattttttaccatccagaaacaacacagctaatgatactggtaagatagtaccatattataaggtagcttattaatggatattgcacagattttataattacatatttcagaagagaaaagctaagatcaacttagtgtatagtgaatttattaatatagtgtgggagaaaaatttgtttgcagctataaaatgttaattacattcttaacatcataaaattcttaatgtgtgagattccggatttttccccaatcaaacatattctgaatagcagatctaaataatacaggaattcagaaaggaaagtgtgattactcagagtagtgagtgttaggtgaaagaagtgtagtagatgagaagcaaggaaggctttgcatagaagatgggatggtgtttgtgctatttggaagaatgattaaagttttgagtaattagcttgtttgtttatagtctgccagtgaagcaactgtgaagagagtaaacatcttaagtgacatgcatttgcgaagtattcgtacgaagttgatgcttatgtccagaaatgaagaggccactaagcatttagaagtaagtgggtttacttacaaaagagttttctgtgtcccatttagtttttgtttgttttttggagacagattctggctctgttgcccaggctagagtgcagtggcacaatcttggcttactgcaacctccacctcccggattcaagcggttctcctgcctcagcctccgtgtagctgggattgcaggtgtgccccaccaagcccagctaatttttgtattttagtagaggtggggttttgccatgttggccaggctggtctcgagctcctgggctcaagtgattgcccgcctcagcctctcaaagtgctgggattacaggcatgagccaccgaacctggcccccatttagttttatatttttcaagttccttgcttcaaacgaaggcagcccaggacctctgtttcgtgactgtttggagttgtgtccgtagaacaattgcttttccattttaccttttatcaaacatagcctttcctttgcgaaatgcctgttgacttgttggtaggacttagatgacaggtgccaaagagctaagaaactagggatactcagtagactgtattgctagttctttactttgtatttaacctttttatttttttaactgccttgtcatctgtcagtcatgatatctttcatcagtaactagttcactgtaacaactcttgtgtgagaggagaggaggactaggagtgaggcatcatgtggcatgtagtattaaaatattaagcttatcattatatctctgtcttatcctaaggtactctgttttgtcctgttcttccctgctacactagtaggatacttgttcttcccactcactcacactttctagatctagatgaacacatgtgcatgcacacactgtgatgtctcagagaaattaagatatgtttattatccttaggacaaatttggaaatgttctcattaatttaaaaattctgaacaagggatatgtgaacaaatctgcctgtatctggaaaagtgttttagactaataaaatagatgaataaaacagtttcttttccccattcattttatgacattagatgagtttcctttgtttcttaagaaacttgagttttggcctttttaaaaaaatttatgtgggttttcggtggttttttcttcttgggtttttctttatactgtggtaaagtacatatgaaacttagcatcttaaccatttttaagtgtacacttagtattaagtatgtttacattattgatcaatcttcagtacatctcatcttgtaaaactgcaaatctataccctttagacagctgctcattttcccctttccacagcccctgacaaccatcattctattttctgttgctataaatttgactattttagatacctcatgtaagtaaaatcattttagtcttttttgtgactggcatattttacttagcatcaaggttcatctatgtagcatgtgtcagaatttcctttttaaggcagaatgtatataccacattatgttcattcattaattggtctgtggatttgggttgctttcacctctttactgtcgtaaataatgctatgaacatggatttgcaataaaacattttgtggccgcgtgtggtagctcatgcctataatcccagcactttgggaggctgaagtgggaggattgctttagcccaaaagttcgagaccagcctgggtaacatagtgagagctcgtctctacaaaaaataaattaaaaaaaaaaaattagctgggctcagtggtgcgtgcctgtatttccaactattcaggaggctgaagtgggacgattgcttgagcccaggagattgagttggcagtgagccatgatcacgccactgcaccctagccttggtgacagagtgagaccctgtctggaaaaaaaccaaaccatacaaaaaagccattttgtattttgatcttttatattactaattttccttttttattagtgcacaaaacaacttgcagcagcttttcatgaggaatttgttgtgagagaagatttaatgggcctggcaataggaacacatggtagtaacatccagcaagctaggaaggttcctggagttaccgccattgagctagatgaagatactggaacattcagaatctacggagaggtaagttctctttctcctgccttggcctttagtgtattaaccatctattgtttgattatatttttatctgaaattccagtttcccatgaaacatttttgaggtagaatttattcaattagcatcagtcagcctagtagtcttacttatgaagctgaattgaagttaactttgtattgaggggagtgaaagatttactaagtaattaaatatgtagtttttttattgaggtttcttaaccgcttctgagtttacttcagttttatacccgttaacaaataatctatcgaagtatttttttgaatgtttactgtgtgccaggcactggcaggagtaaatggcatatattagaatagcttttctagaacttgagtttgtataatacttcgtcactggttaatcatgacgtttgcaggggtagaaaattagtaagttatttttaaaatgttattcagccaggtgcagtggcacacacctgcagtcccagctacttgggaatctgaggcaggaggattgcttgagcctatgagtttgaatctagccagggcaacatagagtttagaaaagtatatataaatttttatatatacatacacatgcatcttatctatatttttatatatgtaaattgagaccatccttcaaattagagtaactggatttttattttttaaagagacaagattttgccatgttgcacaggcttgtctcgaactcctgagctcaagcaatccacctgcctcagccttccaaagtgccgggactataggcgtgagccaccgtgcctggcctggagttttttttgaatgacaattttgtgtcttgacttttcatacatagctcttatgaacagctgctttcacatagtaaagctgactagaagcttcacttttaatttcaaaacctttaaaagtagacagtataacatagtaattaagaagacagacagacacggtggctcacgtctgtaaccccagcaagtttggatgctgaagcaggaagatcacttgagtccaggaatgagaggctgcagtgagctatgatcatgccattgtcctctagcctgagcaacagagagcaaggtcctgtcttgttgagaaggaggagggaaaaaaaaaaaagacgagctttggagctatactgcctggattggaattcactttaagtaggctgctttgagtaggcttggagtttgttacttgtataagtgttctcattataaaataataatagtgcttaccttaatacagttcttaaggattagatgcattgtaaaaaatgttgattgcatatggtatatcatgtagtgtgcacacaataatttgagctatggttttaaaatttaaaaaaaattttatttgcttttttttttttttttttttaaagagacagggtctactctgttgctcaggctggagtgcagtggcgtgatcatagctcactgcagcctccaacccctgggctcaagccatcctctggcctcagcctcttgaatagctaggactacaggcatgtgctgccatgctgggctaatttaaatatatatctgtatattttgtagagatggaggtttcctatgttgcccaggctggtctcaaactcttggccttaaacgatcctcctatattggcctcccaaagtgcagggattacaggcgtgagcccactgcatctggccttatctgtggttattaaagaacacacgttaaaagtgaaagtgactttattgagaagtagaaagtctgtgtagagactcactcccaaccctctagttgtttaaaattgtactcattagaaattatgaattttgataatcttaccagtaggtacttttaaaaaatgcatctctgcaaaaatagctttttaagtcatatacctgattttgagaataaataaatcagacaattttaacaatttgtattgttaacatttaacatgagaatttcaagcaggaggtatagactagtatatttaggattgggttaaagttttggctgttcagcagctgtgtaatttaaactctgacactaaatttctcagcagcttaaagattttagagatgttattttatttttggttttaatagtactgactgatttggggtttttaaaaatgatttttttttaagtactttgtgaatcacttcacctgaaatctctccccagtggaatgagcataatcttttagtagaacataatcattcagaattttctcttttctcatcttcttgttttggattatgggttgctccgagattgaaacaggatttcatttttacttttcccctcatctacagagtgctgatgctgtaaaaaaggctagaggtttcttggaatttgtggaggattttattcaggttcctaggaatctcgttggtaggtacttttactaaatgttaaataagttaataaacattatttagttacatatagcgacttaattgaaaactagtcttgtagtctgataaccttattccagttatgtgtagatttatttagatagcaatacttcttttctttttttggtgataacattttgtgtaacttgttattgtcatatgttaaaaagtaaagatgtttcttctgtacaggatgactcactaataaggcccagggtttttataagtttgtcattacagtttttcatcagtcttttcatcccttgggatcttccctattattctcactcctttactctctttttatcactgatatatattcatcaaaattatgatagtactttttgagaaggtattggtgatatttgttttgtttagtgcagaagaaaaataacagtgaactaacaatagggtaataaacttctacacagtaggtcctgaatagtaggttgttgcaaggcatagaataataagaagttgtgggcaggagagaaggatgataatatgaggggaggtttcactgtttattatttgacaccattattgaaactgttgtacccatggattatagttaagtgacaagaatttgcatttgaagctatggttaaatgagcattatagcttggaatgagttaatttatagctctgttattaatatgcactacatctgtgctgtctttttgctatttgaggcaattgggaaggctttggttatgtgttaagtatgcagtgactatactaaaaattgacttacctaaacatttaatataaaaagaagcatcaagataatgtagtgtagttttactaggagggggacgagtttttgttccctgttatctctcattatttttttttgacgctagggaaatactttcagcttcttgggttccatttatataatgcggcctgttctgcctttaggaaatgatgtttagctacggacattctatttgttaaattgtataaaacaaacgttaatagaaaaataaatacttccattctaaaaagattttttttttttttttttttttggtcattagtaagtagtatattcaggaaaagtagtttaaaacacaggaatttgtttcttggaatttaactgttagtatttatgtaaaaataaattttttttttttttttttggagatggagtcttgctttgtcactcaggctggagtgcagttgcagcgatgcaatctcggctcactgcaacctctgcctcctgggttcaagcgattctactgcctcagcctcccaagtagctgggactacaggcgcctgccaccacgcctggctaatttttgtatttttagtagagatgtggtttcaccatattggccaggctggtcttgaactcctgctcctgatcttgtgatccgcccacctcggcctcccaaagtgctgggattacaggcgtgatccaccgcgcccggatgtaaaaagcctttcaattctcctcaaacatttggataggtatgacattactgccaattgtgtaagctctactttattagttcttggtataccgttgttcactgtagactgaactgctagaaagatgagatgttaaaattcaatataaacttgaagaattttgtataattataattatacaaaatataggtagggtgcacaatgttatcaaatgtttatcagtatcaaatgaaatcacctttgataagctgcttttgaaaatgctgcctttttaaagaaatcgttaattattgacatctgtcagtactaacattgtggtagctgctctacagatgtaattttgacttaactaaggtttcctcacttgtaaaaatgatttggcagtgggtttgtgaaagggaaccaggtttcttttcaatccaagtctgtcaattataaaagatagccttggtcttagagagttgtggtaggtgttgtgagtaaaagtttctgatatttcaaaaataagaaaattgggtatatttgtagttctttgttctctttattcactgaagtgagtacctgttgtctcttttcctgtatcctgtctacgttggctttggtgatgtgggttgtgtgctctataggaaatacacattagcagtgactattacacactggtgaaatactcaggagtagtacaagaatttctattggttgtcatgtgtaaaaatacagtgtttccctccataatgttttatggatgaagcaggcttttgaataatagtacattcttagtccaaatgaaagaaaaagagaactgaggattaaaagggaatgagaacacttgggtaagttccagagaggatttccttacacattcgggttctgagagttctaagatgaccattcccacccctcccaaatcaaagggaaaaatatctgaacgttgatttgaaaatggttcaaaacctttcacctccagaagccttccttaatcacttctctctgtcccttcagcatttatattcagtgctcaatttatactacaggtctacttcagtttgtcaatatggtctggaatttaaactatggaaatgatcatttaaaatattgacggtctgtggtgggactaaataaaacttgcaggtaggttcctgccaaggaccccagaagggtgatggatgatcactcaaaactggtatagttcacaagaaggaagtggcaaaggttctgggggaggaatatggtatgtcaacctaatctttgtttttcgaaagacatttgcttacttttagcagggtcaaggatggagttgctgcttgagcttcactgtgttaacaatgaaggttgcttttatgtgctgctgctagggctgctcagagaagatacacgtcatgtgaattccctgccctactttttttttttttaacatgttcaattgctgctgcttttaaatttaggcttattaatggggaaggaggcttgagagtaggaatacaagagagaaaaacccattatagtccttttattgtactgaccagtctactgttgtcgttcttattcattctttaatagaaactgttcaggcatgcaacaggaaaatcttccattttaactctttcaaccaaggtttaagtttttgtgaaaagtgatatacttaaattaactgaggatgtggacttgataacaaatatgctgtcgctgttcactgtctaagggatacatcggttccatatggtgaaggttacttaatagtacttgttaataggtacacaactcagtgttgctttgttatttatgtgagtatgtgctaatctttagatagtcctttagggaaagagagccttttgacccctttatttattaatatactcaataactgctgtttgacagacttacaagttaagtgtagaaagttaaatacttgaattttatgtaattttacaatattttatacctagcaagacagcatatcatgtacatgctttatgtcattttttatatagctgtggagtacttgaaaaacttcttggtgtaaaatataatacatgtaaatattcattctaaagttatcttcaagtcatagaaatctcttggacccatagaaacttgaaaataaaagcaagattgatgaatttgctacttatgtgaattaataaagtgctaatgattaatgtcaaaatagtttttctctttgcctttatgtatacatccaaggttttgaaatgggttggatattttaaaaatatgaaaatgatataagcatattttaaaagtctagattttgagaattccttacatgtgagcactgttgtcagtcccagttagtaaccttaggcgtgctgaaagagaagtaagtttcagaccaagggtgaaatttcttggtagtctgtagggcgagttaattgatagtaaaaagatgggagcttcacttgatggttgtaatttagtagcaagttacaaataattggggctgacactgaaagaatagcagaattgagttttagcttaccattgtatttgttttctcttactaaaggaaaagtaattggaaaaaatggcaaagttattcaagaaatagtggacaaatctggtgtggttcgagtgagaattgaaggggacaatgaaaataaattacccagagaagacgtaagtatttaaaatgtaatctgcctctttaaaatgtcctttttttggccaacttaatagttgtaaacattttgtctgttttatctgatacagagggtttttcttctttttaaaattatgtttttataatattatttcatacacttagaaaacaagtcattttctactatgtgggccttgttcttagttgttttgatagtacttcagtaaaaaaagccagttcttgacataaagatttctatttgataatcttaacagttatttttcatacgtagagtgtaaagctgtagaacttgatactccaaaaggaattttttttttcaatagtttttggggtataggtggtttttggttacatggttaagctgcttcagtggtgatttctgagattttagtgcacctgtcacctgagcactgtacactgtatccaatatgtagtcttttatctctcacccccctcccaaccttcctccacactgagtctccaaagtccattatagcattcttttgcctttgcgtcttcatagctaagctcccacttacaagtgagaacatatgatatttggttttccattcctgaattacttcatttagaataatggcctccatccaagttgctgcaaaagacattattttgttcctttttatggctgagtaatattccatggtatatatataccacattttttttgtatccacccattggttgatgggcactgaggttggttccatatctttgccattgtgaactgtgctgacaaaggaattcttgattgtactctccttaactattttatagaatctgaaagtattgaccatttcttaattgaaatccccttacacttttacattgctatagaatctgaaagtattgacttttttttttttttttttcctggagacagagtcttactctgtcaccagggtggagtgcagtggcatgatctcggctcactgcaacctctgcctccctcattcaagcgagtctcctgcctcagcttcctgagtagctgggactacaggtgtgcgccatcacgcccagctaatttttgcatttttagtagagatggggtttcaccatgttggccaggatggtctcgatctcttgaccttgtgatccacctgcctccacctcccaaagtgctgggattacgggcgtgagccaccgtgcccggccttgaccatttcttaattgaaatccccttaacgcttttacgttgctatagaatctgaaagtattgaccatttcttaattgaaatcccattacgttgctgttaattcgttaattctgatcctagctttctaaaattttttgtcgtgtttcttcccacatgttgatgatgttttgtctccttaaaattcctgttttttggtcatatcattaatgctgtacaatgagttttttatgagaatgtttagtgtttttttttttcctgagattttgattatccttagaacagaaactattcttatacattagcagaagattctggcagttaacaaatagatgttatttggaattaggtaactagatgaaattggctggctcggttgctaattttatgacttcagcaagttactttgttaactgtaaaactggtaatactatttcttagtcaatttttaaatgagtattaaatcaaatacatgaaatgaataatccagacctgaaaacaggctatgtgcttaagatttttttaggttcttgccctcccacccccctttttattcactttgaatgcccttttatctgcttgtgaactcctgaggacagtgttaagacttcttcactccctaatcttaaataaggagtttcccttgtttcatgctttcatagttgaaatgacttcttcaaagccactgtgaacctctgtaatagctgtgctatatccctagcacttgccctgttgcctaagttttaaatgaaccatatctaaaaatcattactcttaaaaattactttgaaaataattgagtcatatatagaactaaaatgtcttaaaccacgcttagtttcatatttagaacaaaaaaatccctaaaccattctgtttaactgttagaaaccattctgtaaaatgaagaaaatgggagacatggaaactgattgggggagttaagctttactctcatttttctcagccattaagaagctggaagtatgtttctttaaagaagaaaaattcacagtgtgccatcttatttctcttttctgccactttttaaaaatcttcttattcagaagttcagcaaagtaaaccaagtctggcctaatactttgatttacttgaatacctctacgtatcttaataattcctttaattttacattgtgtaaatatttatgctctggaggtgatatttcttttagtggtcaggaagtacctcttgtagtacacagacactcaagattttgttacctgagcacatactgtagggataactgggttaatgtgctttattatgctttaaagctatacctactaaggtgatgtatctatctagtctgtaagtttatagacagtttgaaggaaaatcgttgttttttgtttctggagacagattcttgctctcttgtccaggctggagggcagtggcacagtcttggctcactgcaatctctgcctcccaggctcaagctatcttcctacctcagcctcccaagtagctgggactacaggcatgtgctaccctgccagctaatttttgtatattttgtagagatgggctttctccatgctgcccaggctggtctcgaactcatgaactcaagtgatccacctgcctcagcctcccaaagtgctaggattacaggtgtgagtcaccatgacctgccagaaaatcattttaactttaaaagttgatttatatacttggaaaattaaattaattataaatcagaaaacttgatataaactgattttttaaaattatttttaaagtgtttagcacacagaagacaatttacaacagtaaattggggtgcaaatatgacaagttattgaaaatctgagtatttcaacttacatggattttagcatttttttctccttaaatcttgaagtttagtacatgtaaattgctgcgtgtttcagaagagttttcctaattatatattggggctgggtacagtggctcacgcctgtaacctctttacgaagtcaataatcccagcgctttgggaagccaaggcaggaggattgcttgaggcaaggagttgggcaacagagcaagaccctgtctctacaaaaaataaaaagtaatagctggttgtggtgacacgcatctatagtcccagctactctggaggctgagacaggagaatcacttgagcccaggagtttgatgctgcagtgagctgtgattgtaacactgcactgtagcctgggcaacagagcaagacgtcatctcaaaaaaaaaaaaaaaaaaaaaaaaaaaaagtgtgtgtgtgtgtgcctgcctgtcagtttcatgtcacttttaggctagaactttgttaaaatattaaacactgaatacttttttttttttttaaacagggtatggttccatttgtatttgttggcactaaagaaagcattggaaatgtgcaggttcttctagagtatcatattgcctatctaaaggtttgtatacggttcatactatattctgatattgttgctgcatttactacataaatgttgtacatttgctacaaatttaaaatgtcctcacattaaacattttatatttgaagtaaacttcaaatctttaaatattttttgttaattcagcttcagatttgccattgttctacatgagaatttaaaaagtcctttgtcatcataaaatgattggccttgtgtgcataatttctcttctttctgagcttttatatttctttctttcttaagaaatgattcctttgtcttcatgcaatttgactctcagatcacttatgtatctgcatgttcatactggagccattttgtttttacttttgtactttacatacaaatagggtacagaaccaggagtgacattgggcttccttggtaactttggcattatgcaaatcatctgcatcatctccactgacattactcgataatttgtaaccattgttaacaaaatagtctatttgagttgatacataaagagcaagggtttttagaaaaatatgacccataaattattaaacattttaattttattttctactctttcccttttattcctgctgtgtttctttttaaagtataataatatcctcacctgttctctgcctctagtatgttttcctcccagtctgtcgtatcattgttgctgttactattttgagatcactctgataatgtcatttcttttcttttgaaattcatctttatatgaaaagtcgcaattaaagctggcattttgaagccagtgctttatctttcagtactcatcttttaaccaagagctttctctagacatctaacctttgcatcctgtaatgacctcaatttctgaatgacaaagtctagcactccttctaggtcacaactcgtgtcactgctttgataggaaagtagcttgttaatagtacctttcatagatgctacctgtatctcattcagcaattctaactccttgagggcaaaatctggtaatattgtataattgttagctatttaataaataacttattttaaagctgtctgttaaacatccccttgattggggagagtccatgtcttcttttatattgtatgcctatagtagcatgtttggcacactctagaccattcagtaaatgttgaacagaaacagcaaatgacctcatcaattctgttgactaggaacacaatgctctttaccatctaattgcctaaggtcacagctttgatagggagtacagctttagctttaggctttaggaaaacaaaaagttatatataagaagacttactcttttttgttttgattgtaggaagtagaacagctaagaatggaacgcctacagattgatgaacagctgcgacagattggtatgggtttcagaccttcttccaccagagggcctgaaaaagagaaaggatatgccactgatgaaagtaccgtctcttctgtacaaggttctaggtcttatagcggaagaggcagaggtcgtcggggacctaattacacctccggttatggtaaaaaaaaattttttttttttttttttggtaatagtaataatagtagttatagtttaggtgctctaacacattttcttataattagttcattactctgtcttggctttgagggtagaaggtagttctgaaggtttagtacacgtcttaatagtagtgatagtatacattaaaatgacagtaaaatatataaaatttccaagcagttatgtaatgaagcaaagcatgtttttaagttggtagttcattgtcatgtttattatatttacaaagaatacatatgtaacttgtttttcaaatactttactagtacagttttatacatttcccagtaaatacctagtaatggtggtggtgatacttctaggaatcatcttttgtctaccctctttaagtaaaaaatgaaaagtgtgcgaatcactgccaagattgcatatagcaagtctttttactagcttttaaaaaatattttacttactcatttggcgtatttgaatatattaacatctcacatctggaattattttatttaacaacatttcactaaaatgaagactctgaaagccagaatctaatttaacactttataaatgaacattttctaaaatgtatttcactgtgaggattgggtctaacccagataggaagggggacagtggagtggtgatagtcaacaattctctaatcctaaattctcccttattcttcttcagctttggagttgttccatttttctacatttggacttggatcttagcagtgacctgatttgtttttttccttcgccccttctctttattttctcttttccttttcttttcttcactcctatacttactcccttttgaggaaatataaaaccttttccaaaatgtaaggcatttaaggaaaatagaaataaatgcaaatttcatgctttaattgaaggatcatctaatgctgacaaagttatattaaacctgaactatcttcaatttgttgtagagttgtaagtttgtgtccctgccctttaatatcatatctttatgttctcattttcttatatatgtttttatttaatgcagtattgaaacctaaacagcaaaattctaataaagaagtgttcagcatataaagggatgaaaattgcagactattattatatttctgaaaatgtttaatgcaaaagacagttaaccagtaatcacatagaaatcaaatatattctcattgatttttgaaccatacattattagcatagataatcagacttggcttattggatgatgcgtatgatgaattcattgaataattttattagcttttgtgggaagtcggcttattgatgagagcttactctggcaaaatgcttttgttgagagtagataattatgtgagaggtagagaaacatctggattcaagaaagctgtgcaaattgttcagtagatggcactcttagctctgaatcttagtggaattgataacattttatttcttgaaatagttactgaacctgagtgggcttggaaaagcaagaaaaaccatttgaatttggttgtagacgttcatgtatacattatatcagagggacttgtagttgatttatatatatatatatatatatatatataatgagtactgtagttttatcagtttaataggaactataagaaacatttcccagtataacatctctgaagttggtatgtgtgttaaattggacatcttacaactttagcagcattttcttttttaatggcacataaaataatgtcttaaaattgatggcctcttggagtcgataaaacgtgattatttttagctgttaagcttagcacaaccaaccattgaaaaatgatataaaccatcttcataaggtgattttagaagtttgaggggaaaatatgattttaaaattggttaaaaacacgatgtcattatgttttgttacttttttttttttgagacggagtttcgctcttgttgcccaggctggagtgcagtggcacaatctcggctcaccgcaacctctccctcctgggttcaagtgattctcctgcctcagcttcctgagtagctgggattacaggcatgcaccaccatgcctgactaattttgtatttttagtagagacagggtttctccatgttggtcaggctcgtctcaaactccagacctcaggtgatctgtctacctcgcctcccaaagtgctgggattacaggcgtgagccaccagcctggcctagtgtcattacttttaaagcttgtttaaaaaaacgactttgaatcaccaacctgtgttttacaaaattgagaggctggaataaatggtttccctgattttattagagtatttgttttctattgcagtaataaattatcacaaacttagaggcttgaccacagaaatttattatcttatagttctgttggtcagaaggctgacatgggtctcactaggctaaaatcttgtcagctgggctacgtttctttctggaaagtctagcggggattcccctttcagtagtttagaaaatttctctacttttaaagacccagtgagattagtttggacccacctggataatccaggataatctctctatctcaaggtccttaaccttagtcacatttgcagagtcctttttgctatcacagaaacatttaatatgtgttattaacagttatttaatatgagtaatgttgagcactagccaatacattaaaattttggggggtacggcctcaatatctgttttacctgctgaaatctatgatttagacattccctctaagtctcttgaatactatatgtaggttaaatttaaggaagactttacttgctgtgacacggggttagataaatactacactggatttctaaggatacttcaatatgaacttttgagagagtcttcagaatgaagtattcttcatttgccctgaattttggtaatgttttcaggtagggtataggtttgtaaataaattcagaagttcttaaacattctgaaaggctttttttttcactattcaaggaaagataaattgccttcattacaacttttatgacatcctgttaataaagtactttttgtcatttggtgaaataaatgttaggggaaattaattcccttccctgagattctaatcccaacaaagaattgaaagtgagtaatagaaatttgatgtattctttgaaaaatacacatccaactaattacctaattgtttttataattgactagttacatctattaacaccatgtagagaaaaggtaggcatcctagagttatcgttaaaggagaaaggaagtgaggcaccttcatgtataaaactttacattttattccctgcaccttaatacttaaaacttcttatgtctgaagagctcttgtttgcatttttcctcaaatgattgcagagtttaaatatagggaacttcaaggtatttcatgaaatcactcttatctgagagtttagcaaatgaacttcaaaataatgcagcaaattatttggttgagaaaattgttatacactctgccaggcatttgaggacatataagatggagttccaccctttatcatagaccaattttgaagtaattccacagggggaaaaaataacaacatggcacagtctgtgatagatgtggggcgattttaggataacaaaaaatggggagagatctgtcttagttgcagtggtctgaagttagaatttgaactaggccctgaaggagatatatttggtcatataagagggaaagaagaagtggcatcccagaactaacaagtggaaatgaatatgatagtgattgagtcatatgtatctgacatttgagttacagtaattattaaataatgataatgtaggcctctgattatatctttgtggtgtttaaataaatttttgaaaggtcaccattacaatagttgcagtgttagaaatggtctgtaaacttttaaaggcaatgctgaatatttgtctcactggtcatggcttcagttctgttgtcaggtgagagaccttctgtttcagagaaaccttaaattctgtttagtaattgcaaatattaggttggtgcaaaagtaattgcagtttttgccattaaaagtaagaaaagcaaaaagtaaaagtagttacttttaatggcaaaaaccgcaatttaagatgctagtaaaacatgccatcattttatatacaacctactggaaaaattacttctagcttataataaagatgccatcaattataagaaatatcttgatttcagagatgttaacatgtgaaaagtataccctagaatcaatgaaattatggtgaaatacactatacagttaaactattcagttttctaaatatgattaatttactcaaatattgaagttatttttattgtactaataatttaggttactaaaacccaaatcagcagaaacatttgactatccatactaagtacattctaatattgataaatgatgttctgtatggttttttttttttggtgccaaaacctaggaattaatgttctgtatattttctgtaatttttctgttgactgcatttctgcacatcagttttttttttaacttccatgactttgtatttcctggatattatccccttttgctgatgagatggtcacacctttgactatattacatgacatagcacatcttagcagactgcagtgagggattcttctgctggttttgaagaagtgagcggccttctgcacatcagtttattttttaatctgtattaactagtagatactatactagtatattaatagtataataattgattattccttagtacgtttcagattgattttaactttcatggatctttctttgaagcagccaaacagtattgcttatttaaacaataatttgtaggacataattttgaacattttaaaaggctttttatagaaatctaagtggtttatgttcttttcttttccaaggtacaaattctgagctgtctaacccctctgaaacggaatctgagcgtaaagacgagctgagtgattggtcattggcaggagaagatgatcgagacagccgacatcagcgtgacagcaggagacgcccaggaggaagaggcagaagtgtttcagggggtcgaggtcgtggtggaccacgtggtggcaaatcctccatcagttctggtagtcttttctatactctgtcagcatccattatttgtaaacagtttaattttacaaaagttaattcatctcccagggccacccatttttggaagtttctcttgctactcattgtcttagagaaagtagtggaccatatagcagtatcaggaaaagccctcgtagagtgtttctcagtgaaggtttacttagaatatactggtcagaactttagttggcagcttttctttatatgatgagggtcagatgtttctctcttcaggttttggaggcttatttaattagaattttttttgttttccctagaattttggggttatgtttttttgtttgccagacagacccagagatttctaatgcacagagagatgtcagtacttttctatacttaatattgaaaacgaagtgaagagcattcttagctacactatgtagtactttgggaacagggaaaaattgtggaattaactaagttttttaattgttggaggaactgtgctgtaaagaggagtgtttggatgactaaagatttgagggtgtaggaaacgttttacttaattacttctgtcttctaaaatttttttatgctttacattaagttgtaggagtttccagaatatccttggttaccataacgggctagggagttaattgccagggatagatacatagactatattaaggatataactttaacatatcattatggtataccacgttaagaaacccgcaccttccttaatgttatacccatgaaaacttatgtagtattttaatattatagaaagtgtgtgtagatacattaaatatagatgccaactgtgcttacaaattacaaaaactggaacaaatcagggcaaaaattaggaacttgttctttgtttgtttagattttctccctttccacagtaatactctttgagccttaagtttagtttacaggctttcagggtaatagtttttatattttagtacactttgtacagttaccaaggtgtttaaaattacagtatactgaattgcaaaataaatgtacttgacctagtgttttatgattaatggatacgcttagtgtcttttgcaaagatgcttagcttgctagctgttaccaaaggaatcttaggaaaaatcggaattaggtgaatttcttctataaatttgattgttggaggtaataaatgcacataggtaagatgggtatttttcttatgaattgtaccttacagtttttccttttccaccttcacatcaccttccataatgtttctaaagatggagtactagtcagcattcgtttcaacattttcctttcataaccagttagaagttcaaccttatttaattggctgctttgtttcaacttgtcttgattgcttcagttcagttacggatttctattatgtcatggaatgcaggtattgaatattatttgggaaacagtccatcaacatcaacacaacaaagctgcagtcattttgaactcagttaaggggatgaaagctcgctcttataattatttcttaacagctgaatatttgtttcttttcatttttgtttttctagtctctgggcaggattaccttgaaatgtgaatgcaagaattagcatttaatacactattttctaatgtatattttaaaaacaaggcacaggaaatgttaggaagccaagatgtctgcttactttctgctttaatttttcatcaccacttaaagttttatcatatttaattatctttgttattttccaggtaaataatattgaaaacattttatttgaagacagtgcatttttattgggggagactgaagtttatttgtcattgatatagttcaatatagatcaaacattcataattgcagtactcttaaacgaatatttcttgcctctgacatgaatatagtgctcaaagatccagacagcaatccatacagcttacttgataatacagaatcagatcagactgcagacactgatgccagcgaatctcatcacagtactaaccgtcgtaggcggtctcgtagacgaaggactgatgaagatgctgttctgatggatggaatgactgaatctgatacagcttcagttaatgaaaatgggctaggtatgtaagcacttagggaagagaaatatatatatatatatatatatatatatatatatatataattgtaaactattgttagtatatgaagcttttttcaaagaaatatgcaattcacaaattgactttttcttagtgtttactttgaacaaggtagatagctttttgtctatcttaaatgtttagttctcagatttgttatagccaaattatttgaaacttggagggttaaagtgccctttgatgccattaaatcagtacaaatattcagctggcaaggtacttagtgcttttattgtccccaagctaaaatcaggctttcatcttgcctcttttaaaataattataaatgacactggtaaaggtacatatatcaagagtaggcattaattttcaagggctaaaatgtcattaacttcggtataaaccaaactgtactagagaggaagactgtgtccctgaatgatggcagtttaagtctgagttttactgtgagttaaaaccctctgaatttccagatgataattccatttttaatccatttggaatgctgaaagctacaaaaatgtatttcctgtcagtaaacatttgttgttttatttttgtgtttaattaaaagtttatttttcccctttaaatctttgaaggaaagaaggtttttttgtttttttgtttgtttttgtcagaatagttcatggtaaactttgcaattacagatgatagtgaaaaaaaaccccagcgacgcaatcgtagccgcaggcgtcgcttcaggggtcaggcagaagatagacagccaggtaacttgagtggacctgtggacaccatcaggtcacaagcatgaaaaaaatgtctatgtctgctttctaaatatattatacttacatgtacacatgtgtgcatatacattcaaaatttgcattgcataaattgtttattcaactaataagactactactattaagaaaatgcattcttccttcacagtgtgttagtaacttgtctaattgaactaatgttgtgtcctaattgtttacatggaaatactgttgagaagaccattttgttcacttggcagtttcttcacacttgagatggggcctgccatccgagggactgtgttgtagattgtgatcaaggttgattggcaaaactgggcagcttttgcatggtgcctgcttactatatctgaattcagcacctcatttttgtgggagttgtaatacccacaattaaaaaaaaagtataaaagagaaaaatatttgaaggtgtctttaacctaatgcgaggaatgcatgttgtttttgtttgtttattgtagtgtgatgccttttcccttacacctactaactattcaaattaataatacttacttagttttagaatgtttattttatgtagtcattaatttttagtaacttcaaagaaacttgtttgctgtgtctattattttgaacataattccatttcctgtgtacagagaatcacatgtatattcacaatgaagcaattgtgtgcaccagaaataaacccctttcaaactaatcaatttttgcattctttccaaaaccagttctttcatgtgttttccccaaataaagaatgtaaattctggcatctttactattttaaatttagtggttgtagagacatttgggaaaactggttaagagaattagttcccatccctaaaagttcatgttttaaagatagttggaaatttttagagcaattaaatattgtcaaaaaatagaaagtgtccagaaaatatttgttttccttccccttctttcctcccctcctttaatgttggaaatatattttagggctgggtgcagtggctcatacctgtaatcccagcactttgggaggccaggtagcaggattgcttgagcccaggagtttgagaccagcttgggcagtgggatcctgtctagagaaaatacagaaattagctgggtgtggtagtgcgcacctgtagtcccagctactcttgagactgaggcaggagaatcactttagcctgggaggtcgaggccgcagtgaagggtgatcgtgccactgcacgctagcctgggtgacagtgagaccctgtctcaaaaaaaaatgttttagatgaagagattatttcattttttgaaggtggtacagcagtgaatacatttctggccctactgtaaacaagaaaattcaggctatcagtatgaacttaacagaatatattacaacatttattaactagatgtatggtggtttattaccaagtcaacaggtataaaaggagtaacagtggggtttgttggagaagaggcaaaaatttctgtatggtattaattgcaacttgagtagtttggaggcttcaacagtttgacaatgatttctgttccatactacatctattcctgttttacttctttgggattactacttccctcttttaaaactcctcacattccctagcttgccccttctcccaaaagatagggtgggtaaaacaagcacaaaactgttaacccttgatcctagtagcagttctaggaggcagcctccctctaaagctaatatcaatattctgtttaaaacactcatttaatttgatctcatctgctcaaaatttcttgttgctcttagtgtaaattaagcagtgaatattctttaccacacttagaatgtgacaatacacactggtgtccagttgattaacttggatccattcgaggaaattctagagtccatgtcattacagaaattgcctgtatttttttctagatattgttaattattaatctgtattggacttttaaggggcttgtattataaggactggctataaacaggtttttatttgaattaacagaggtttcttttggcttccttttatttaggtagcggataccccagctaagtgcttgttaatttagttgataactatatcaaaatattattctgtctctgtacacagtggatgaaaggttctagaattgtttcaacaatgtgttaggttggtgcagtttttgcacccacctcaaaatggcaaaaaccacaattacttttgcaccaacttaatttagcagcaggctttccaattagatgttttcctaggtgtcactgagggccgaacttggaaacagtgcattcactatgctgttccccacactggctagaattgttcttgtaataggtttgctaccatgtatgtagacataataaagtggattatgacaatagccctttttccaatattgtaaactctttttaatgtagttataaatatattagcaatgaatttaaataatttaaaaagcttcaagatgagcgtactgtttcttacagtttggaaggaaggaggcagtttcagatttgaaacatctttagtggttttctagtaaatgatgtatgtaagttctgaaataggttgttcctttgtggttttaaaagatttacataatagttctagaaagttcttggatcttatgaaagtgttagcatgttatttcataattaagaaacgtgaattgtaaataccatccagctttttattataccagaatgatttagttgttttcatagaatttatactttatggaccaattctccccatacctagtgactttaaataaataatttaaaatttactggagatttcattctttacataattaacttgctcccataatttaaagtatatattgtacttttacatatcagggattttctgaaacagtttgcaatagaaaatacttgaaagaaaaaagggtggttcttttggtatttcttaaaatcagtgaattctaagtttcaattctttttttttttttttgaaacagagtttcactattattgcccaggctggagtgcagtggcacagtcttggctcattgcaccctccacctcccgggttcaagcaatgctcttgcctcagcctcccaggtagctggaattacaggctgtgtcaccacgcctggctaattctgacggggtttcaccatgttggtcaggctggtctcgaactcctgacctcaggtgatctgcccaccttggcctcccaaagtgctgggtttacaggtgtgagccaccatgcccggccctaagtttcagttcttgaagagagagtgttgatgtataaagtgagtcagtccacatactgtagaacataggtcatttgttgaagttgggttgacgtgacagtagggtgttaggttgggtttagtctttttcctaatccactactgccacttctttgcaaatacacatttcagatcgtccctaccaagattggcaaagggggtgtgggaggggtgtcattgaatacactctggaccttttcccactctgatcaatgtccacatttttagggtggtggtctgtcatctttagtttgcttgtagtttcttattttaatcactcagaatcgtttctagtgtgaaacgttaaaacaaaaccatagaataaaccacacttggatatcttaattgtgctttaaaaaaaaacacacacacacatttgagtaaatatttttgtatctgaaattttcaaatttaagtatatcatactgtgatttggaccaaatttgccccattcccccctccccccgactccccgataattgcaaacactgggcttagaacactgcgtttgtatttccttttactggttgtgggtttctctaacaactttgttccacaacattagggtcaaccagaagcaaatagctggattcttgggaaagaggaatttaatctagatttcctcaatctcaagcttgaaattttcttcagcaccaaaagcccaggtagatttttaaagctttgtttttggttggaggtgatacccagcttaagaaaattttgacactgggtgacccaccactagtttaatagtgaaattaccctttatccataaataaactttagaaatattttttcaacacctgtaatttttttctcatctttaacagtcacagttgcagattatatttctagagctgagtctcagagcagacaaagaaacctcccaagggaaactttggctaaaaacaagaaagaaatggtaaggagaatttaacctgtaggttttttttttttttaatttttggtatggtttagctttatttttttactacttttactgtgtgatcacttgtttccacaaatagacaatactattttagttaaagactcttgaatatgttcttggccccaggtaactaaagatatgcatgcttgagcctgaaatactttttagttagagcttcaaatagcatttataaaattcattctgcccaaagatactgggcatagagactattgcctaattcaggagcaataggctatatacctcttctcattgatggatatagaccttttaaattttagttcttttaaatgctttacagtatttgatatgtaaatgtgatttctcaaaataaggtgagtaaagtaggtgattatttgtttaatattaactgtttatgtcattttcatggtgagctttccagtgttttaaaattaggtacagttttcattagtttagatgttttctgtggtttgggcactgctaggtactagagatacaaagttgaaagacccatagagtggaatactttgttatttgttttgaattttaaagatgttttaatactttgatccattgtggtatataaaactgaaatttttaattagctaattagtgtttatgtagctgttttcctcctcagctatagatttcatttataaagaagttgaaaaagttgtctccctttggcaggcaaaagatgtgattgaagagcatggtccttcagaaaaggcaataaacggcccaactagtgcttctggcgatgacatttctaagctacagcgtactccaggagaagaaaagattaataccttaaaagaagaaaacactcaagaagcagcagtcctgaatggtgtttcataaactgaagaagttcctagtttacagttcttttacattacatttacaatagtgcttgtacaagcttgccaaagatagaatatggatcgccagtctttacatcgcactttcagttcctccatttggaattcaaaaaggggagggatcctgaagaaatcatatgttaaacatactttgacacctactgtgttataaaatatatcatcagatgtgccttgagaatagtatatgtaacattaaaaaaaagttgctggctataggaaatgttattttgttttcaaaatatggcagagatggggggtggtgggtggggtgggatccctaacgtaatattctttatgaaagcattagctgcttttgttacatttttaatatgcaaccacttcttcacctgaggaaaactagaatgaaatgcagtctaaaatattttgcactgaattgtaatttcttcattagtttagtctggaaactggtctgttttaatgtgttttttaaatgctgtatgtagaggaaaatctgcagaccactggaatacatttgttaaactctcatctgcagggacactgggcgatacttggcagtgactgttctaccttgaggctttgtttggtttatttattaaagtgtacagtatttaaaaatcaaacatagctttagttaaaacactaagctgaattagtcatgtccattcagacataacctgaactactgaaaagatcaatttccagaaggtttattctgtataaactacatgttagtcttcagtagagtatcttttttttttccttttttttttttttatttcggttgtttgatgtgcaatatgtttttgtatgcaggtagtaaataaactttgatcttccatttgctgaatttttttaactttctactttttacaccaattgttgcaaaatagttggagctattaataggcttaggatagtatactttgctttttaaaaagcatttatacttgctcataaatagcattaaaatgtcagttggccatttaatcattttgtaatgaatcatctgaaatctttacacaagtttaggctgttagatgcataggtaattaataatacatgtgataattagcaaaaaaacctaacaaaattctaatcaaaggcaactttggaagacaatgggggatagaagggatgacaagcaatttttaaat

SEQ ID NO: 3627 - DNA, 6065 bp, Homo sapiens
tttgcctttaaacatcatttaaatttattagtgtataaattctaaagagtccaaattaaatatgttgatattgagaacatttcagttttcagttttgctaacagggtttaagcttaatcataacaattgcagaagtttgattatgtcaagaaatagccaactgaaggaataatttataaatggtcattacctttaaggggctagctgaatacaatgtaaatactcatgcctgtaatcccagtactttgggaggctgaggcgggaggactgcttaaacccaggaggttgaggctgcaatgaactgtgattgtaccagacctgtactctgaaatctttatcatactatttttaatgcatgaaataaaaatggtttatatgtacatagaatacacacacacacacacccctaggtcaatttcttaggtctcagttgtggttaaattcacttttaaatacaaggttccaagtatccaagttgccaggccagttgcctgtacctggaacagcctttccaccgaataagaagagtccctacttaaacagcttaagctaatttccatcatactatttatcacagtctaattaccagtttatcagtctcccattaaagtgggggctccctgagagcaaggactgtcatcttcactttgccttgaaaagtagacataggtcccaaattatctgctaaatgagtaatgaacaatatttctattcagaaggtgtgtgcttgcccataattaatacgcaaatattctaaactataatctgatttaaaatccccaaatttaaacaagaaaattataccaaggctttgagatttagcttgtgctaaatcattttttaaaattgtagctctgaggcattttattataaaaacttagtactcatatacataaactaatacgaacttaaaattcatcatacatttacttcattttttagcttgaccttctagtaaatctttagcttcattgattttggctgctatataaggagatcctcctataggaagaaagaaaaaagaacagttacaatatggattctcaatttctgcttggtaaaaagctactcttgtttcaaggactccaatgcttatctgagggagatttagcagaaacagtgttttaatttttaaaaaataaccctgacactgcaactggatgaccaaatatatggtaatatatgtgaccaatgagaaatgaagtaatttacgtgggagatatttctacaaaaataacacctttttagaaagcttaaactgatagaaataggatttctatcatatatattagatatatatgtatatgcctttgaactggtgttagcctattcatgattacaggtcataaatgaacatcaattataccatgttattttaataccatgatattctcagaggcttctgagctgtttactggaaagatcccagtttgctttacatcctttttctgtccagtttttcttttcctgttatctactgtcccttcacaatgtcatctacagctgctttcctacgaatctgctggaggagtgattctcaaagtatggtcctaagaccagcaagaaataacaggaaatttagtataaatgcatatttatggggctccactgccgacctactgagtcagaagccctccatataaaacaagctaaatttcataaaagatactgtgaagtagatatcaaacaattataaccctgtttaaaatgtcaaaaccctttttattaatgaaagccctctcctgtataagtaaaaggatacaaacactagaacatgaattctgtggtctattttttggtattcaaagaaattcttgctttccttcaacacagccaaggctgcatagaagtctatcacaaacgaataaataaatcccataagtttctatctaggtaatctccgtttcaaggtatctaaaatggataaggaaaaattacattttagttttacgaaatttaacgttttaattataataaatgtaggccagaaaaacccacaaaacatagtaatagtagcacttacatctgctcattctgtaagtaaagttttcacttaatttcttttaagacaccaaaaatatatggctccagcctaggagacaggacttacagatttaagtgttacctttctaatagccaggaatttgagataaaattatcccattaataactattggtcacaccaacaacatcaacgagaatttaatgactacttacctttgtcaggatgatttaaaagcataattcgtcgatgagcatctcttattttccctttattggcagtagggctaattaaaaaaagaaatggtatttacttcatcctacttctgcatcacatcaaaaaactgtacataaaggccaattaaagacactgtgaaactgtagtaaattaacacaacagtatgaaaagctgtttagaaacctcaacacacccaatgcgtatcctaaattgggaaactacttagaaaagtaaggcactctcaaaaatgtgttgaacttgcagtacccattacaacagtccttttattgataagaaacgcatgtttaaggatttgaaaatgaagaaggaagagttttgtttttttttttttttgagatagtctcactctgtcccctaggctggagtgcagtggcttgatcttggttcactgcaacctcggcctcccgggttcaagcgattctcctgcctcagccttccgagtagctgggattacaggtgtgtgccattacgcctggctaatttttgtattttaagtagagacggggtttcaccatgtttgccaggctggtcttgaactcctgacctcaagtaatccactggccttggcctcccaaagtgctgggattacagacgtgagtcaccgcgcccggttgaaggcagaatttcaccacaaaaaaaatgtcagttacagagaacaacactgaacactgtgataatctgctgaggagtctatctttaaataaatgaaaaagtgcctgtgttttagtaaacactctaggaaaaaagaaaaagtgcttaagtgctagtgtgccttctcatttgaaggattgtttacatcttaaaaataacatgaaggaacagtacagtttcattgattagaattggtaatatcaatcttcctaggacaaaatcccccatgaccctctcctattaaaggagagaaggtctttcttatatttcctcatggctctacagtggtagaaaaatgctaaaaatattagagattattttaccttacacctagtattaatgctgcttcccgttttgtcattttgggttcaaacccacctctataatagccaccactgaaggcctgaaagaagaaatgcatttgtaaagaaaggttaataaaataaagttgctttaaaaaagacgtctggaaatattcacagaactaagaaaaactaagacatttcagaggacttttagtgcaattcccgaggtattttagctaaagctgaataaagtttataaataagtagcaacaagtagtattttaatgatcattaaacagattcatttttttccagtcaatatgaactatcttagaaatataagacaaaataacagtgtctgaaagccaggtcttccgggagtaaaggaaagatcattccaaattagccatattctagataaaaatctgcaagaagtggctcaagaacagaagtcttttgagacaagaggttcaagtgtatttgaaacaagactttaagatatatatacagaaaataccactattaggtcctctgaccttgccatgtcagaaatcatattggtaaagcctacaatcactctattctgttacacttaatcacaacatattcaacaggtgatcacagccaaatctattcttaactgtgaccacagagagtatgaccataacatcaagccaaaccctatagcctaattaactagagtgctacctatgtatgatgtttgggagtgccagggccacatggtcagatcggatcactttagaatcatatacctctgtgtgtgcgatgcagagcagatgaaggaaaacaagaatatgtacagatgatgctgaaggtgatggtatgtgaaaaagtgaaacttgggtctagtggggtactagaattgtcaaaaccccatccaactctgtcacatataacatctgatgtttcagggtagcaccatcacaaagttcagaacttctatactctccttgcaggaagcaggagaatgggtccaaagcaatcacttagaacttcatggatatttggaaatttacccttccctaagtgtggctctaggtttcaaatagaagcagcaaagaattaacaaagtcttacagattttggtaggctttgaaaaacttgttttacttgaggctccatatgcttcatggcttgcaaaacgtaacggcctaaaaccaaaagcaacagaataagtaaactaaatctccaatctccccgacttcacttccatccccaaaccataaacaaacctgcaaatcctgcagcagcaatggtcagtccaactgctaccactgtactggcctggtaagggggagaagagtaaatatttacttctctaattcccaccctttctcattttgcccattcttccatccccaactcattacaaactgcattttaataggagaaacaacttttttttttctttttttttttttttttttaagagacggagtcttgctatgttgcttaggctggtcttgaactcctggcctcaagcaatcctcccaccttggcctcccaaagtgctaagattataggcataagccaccatgcctggcagagaaacaacttttaaggcggaaatattctgtccagtaatctttaaaactactgcatctgttatgctgaatgcattaaagttacaggattcatcatatgggaaagagggcaagttcgacttgcttatttatctttacaatagtgaaaaagatgattccctccctttgaaaacttctttcatcaccagacaaattaagtcacattaaagttcaatcaaaagtagtggaaataggccaggcgcggtggctcacgcctgtaattccagcattttgggaggcgaggcgggcgtatcactaggtcgggagatcgagaccatcctggctaccatggtgaaaccccgtctctactaaaaatacaaaaaaaaaaaaaattagctgggcgtggtggtgggcgcctgtaatcccagctacttgggaggctgaggcaggagaatggcgaacccgggaggcggagcttgtagtgagccaagattgtgccactgcactccagcctaggcgaccgagcaagactctgtctcaaaaaaaaaaaaaaaaatgtggaaataaggtttctgctacagaaggaaaaactgtttacagacggctcctgtaaaattctaacaacgcattttcgaggctaaacgtgggctaaactaggagactaatacctttggcactgccctgttgtttcctaacaagacaggcccaaatatgttcaggaagcatggagaagacatctgtcagcaaaagccaaagagaaggacatagcaaagtggagctagtgctgtgaagatgtgttagggcaagggcacttataatcaaatacgtttccactaatctccgagtccatgacagcctctgaccttacaggagttccaggcaagcaacacctgcagagcccgtgcggacaagaagctggagaaccgtgcagaaagacgatgtaaaaacacaaacccccaagagagcgagccaacagggttgtgtcctggtgagtgtgactccccaataaccgaaacctcccgcccgcagtcgcactaaggagcacaacttcaactccacacctccgaggcggggagctgaggttgaggcctgggccggaggtcgccaagaagaccggaaggccgcactcaccatggctccggctgggctcccttgcttccaccgggagcacggctcatcccagctcagaggccgcggccaacacctgcacgcctttaccagagagcgacgcaacccccaacctcaagcacaggcgccctacgcaacacggcaggagcagccgcaaactaggccggaaaactgtcg

SEQ ID NO: 3628 - DNA, 2215 bp, Homo sapiens
gagaacaacggaggcagaggagctgaagactccagtatgcaactgactacaaggaggtagtcgtttgaaaagctttctttccttctctgaactccttctttccctcctctcaggtcattgggtgaccccgggccgggcggagacaggtgaatcccaagagaggaggaagagggagggacagatgatggagggagaaccgcgtttaggcaatgaatgagcctgctgcatccgcaccacctgttccttccaagggtgccaccccgacctgccagcagggttcccacaccaaccgggccgcgactcctgccggtgtcgcccacttgcccgccaaaggccgggcctcttctcccccagatcggggagaatgagaaccggcagtctagaagccgggaggtcggggcctagtccggaaccagggcctcaagcgtggggatggaatgaagaagcctgtggtccctggcgcgcgggccatagtaggaaccacagagagggagcaaagcaatgcattcggcctgacgagagctatgaaggcggggtcccgggcgggagtggctcagtgcccgccgggccgaggttaggggtgacaggcccggttaccggctaaatcctccccaccgcttgcccggagcctcacacttaccaagatccgcttgaagagcgcattctccttgggcgggaggctcacggccggcatcgttccggctgctcccgctgctcccgccaccacccggctcggtcagtcagtttgtccgaccgccgccgctgccgttccgtagctgcttcagccttgaatatctcgatccgccgccaccaccaggcctcgggtgtcgccgcgttgccctacccggacacctcctttttcctcgttgtcttttttcctttctcacttaacgctgccgccgcctcccccactacgggtctccgtcggcggttcacgtggtaactgaacagaccgacagaggcagccaaaatggcggacgcggagggttttcccacccgggtcacgcttcctaacacgcaggcgcggtgacctcctttccccacctcctctgggtttcggagcttgccgggaaacctggaggctggcctgcctgtggaggccgggagggtcggggcaggccccgcccatcatttcagtgcgtggtaccctcgaagcgcccgcggagctacgggaggctaggcaagtacggttcagaccgcctcctcatcaaaaacagcctctctggcgccttcctgctagatcgacctttcattccttggaaagagtctcgcacactgtgtgatcatcgtttgagcccaaagtgctaaaatacaggtgtaggtgtttgagaagcgctgtagttgattatggacgaaatgcctaatttaaggagcagaggcggagtggaaaatgaaaaaagcttcaccgcagtggagacttgttaacagccctggggagaaaggggcttaacagagtctggaaatcgtgaaagagcttgaccgatgaaatgggcctggctgtcgtatcggtaatttggtgaatgttgcttaagatcagcctggaaaggtagttagtcagatccgaagtgacatatttgcactgccaaaggaggctctggaggttaaagtatgtgttttaatttcgttgttgaggccatataatgcagagttgacggaccgaccttatgagtcaccttggagcggagtagtggagacttaaagacagactaccctggagctggcttcaaactagttcttaatattgtgactcgaactccccatccccagaaattctcagatcttagaagccaaagactggcaaggatactagagggaactactcgagtaggcgaggtcagactacataccgaataggagtccttccaaaaatgtaagtcatttcattaacagctgaccgtaaaactttttcaaagtggcattccattgatctaaaaattttcaagttatatgagccacttttaacctttggtttttgattacctctttccaaatcctgatttcactctgtagcattctttgcatcatgaattattaaacaatatgtgcgtgttttttactgttttaaatttatttgcaaagatattttaattttcaaacttctcttaactgtccctgaaaggtgtgagttgagatacatgtttcccaatataaacttgggttttgtagctgctatattgattgtcctcgcccttcaccggggtcataaataaggttt

SEQ ID NO: 3629 - DNA, 111 bp, Homo sapiens
aggctgaggcaagacaatcgcttgaacctgggaggtggaggttgcagtgagccaagatcgcaccactgcactccagcctggacaacagagtgagactacatctcaaaaaaa

SEQ ID NO: 3630 - DNA, 1183 bp, Homo sapiens
tcctagaggtgctggcaagcctgagctcagatttaggaataatggggttgggacaggagaaggatgagatagggactagcagctgatgaaaaggaagggtggacatattcatcgtaggggtttcaggaactccattatctcacactcagcccctttgtcatctctgggatcaacacagtgttatcatcgatcagcccccagattcacttcagtgaatctgtaaagaacaagcatgtcctcctcatcccacgaattctgctgcttagaaagccacctgaaagtgatagcccttaaagtcctcagtctgcccctttagagcaccacagaaagatccctgaatggagatcctgacccttaagtatggaactgctgggaagagctatttggagattatcattacatggagggttagtaacatcactttctcttccctttatcctcatttttttcccttaaaaaaaaacacacacacccacacaaccatttctttgctatttgctgttggtatccagtatgccattgctttcttaattaatgagatacattttcccttcctgtatgcctattttaatggtcaatttctgatatctctaaacatgtctttgttgtcccctccctccatttccacttccactgtcctatttcagttctggactataacaattgcctccctacctttatctgagcatttggtctcactctcttgccacactcccagtctttcccctgtatggcctcagtgatatttctaacaaaaaactctgactatagtattcccctactcagtcatctttaatgattctccttcacctcttgagtaaaatctaaatctttttggaagggtgtttgaggttcctcatggttttgtccattgggctggactaaggttatggatgagagacttgtgaggaagaaaaaccagttctagagaaataaaggcatggcatctttgcacacttacaaatgcaggaagagaaggtttaaaaccatctttctagaatatgccctttggctggtgaaaagagcaaagttgatccttcatattcctcctttttcttaaaatcataaatctctcctctacttccttctcttttgctttcaaatcagcatttttaaaagccatttcttggcctggcacgatggcttatgtctgtaatcccagcactttgggaagccaaggcgg

SEQ ID NO: 3631 - DNA, 1183 bp, Homo sapiens; identical to SEQ ID NO: 3630

SEQ ID NO: 3632 - DNA, 427 bp, Homo sapiens
gatttttgtgcgattgtggcacaaccctgggtttctttcttcatgtgcctgttcttaatgggcccaggagaggtaattcaagggagcaagggacctgtagaatgatcatgtcctcttttttctagccataaggttatgaatcatatatctcgggggtgtgattctgaaggaaagaagtgtgtgccatagcaggagaatggaaggcagacagctgttgctattactagagttttagcagcccccgtaactcagctagcccagactaggatctcaatatggggtgagatgtattttccaatattgaatagcaaatgatgtaactttgtcatcttcatgttgatcttaaacatctctctgatgaacagtataagaaaacaaatgatcacttagaggatcctgtttggtagttaaaaccgtattaaaatag

SEQ ID NO: 3633 - DNA, 521 bp, Homo sapiens
gtgaaattttctttatcatttgtaaggctatttctagatccgtgaactgcaagttatatttttatgcatttttccccaaggaattggaaaaagtctcaatatcaatattctattctatatattcttttaaaaatcaatgtctgaagagggaagttgtaatgtaggtgtagagaatgtccttctctggctcagagtattaggaagttggactaggcattctgtagggcccagggctcctcttgactattgtagcctgagtcttcataccttccctgaacactctccattgatgactatatagccctttatttatcctttccctcatcagcatgttgaggtgtcacatttcctcagcagtcttgctggcgtgggtgtcatgtgttgtggggaggccggggtggggtgggggtgtgtgcggggtggtcctttttctgctgtccaaggtcctgaagatgtgtttctgtgtttcctgaaagtttctcagtttcccaaatgcaagtttgagattttatttgtttttg

SEQ ID NO: 3634 - DNA, 427 bp, Homo sapiens; identical to SEQ ID NO: 3632

SEQ ID NO: 3635 - DNA, 9210 bp, Homo sapiens; identical to SEQ ID NO: 3622

SEQ ID NO: 3636 - DNA, 649 bp, Homo sapiens; identical to SEQ ID NO: 3623

SEQ ID NO: 3637 - DNA, 201 bp, Homo sapiens; identical to SEQ ID NO: 3624

SEQ ID NO: 3638 - DNA, 709 bp, Homo sapiens
ttcaaccaaagctcttagattccttaagtccccccctcccaaccttatagttgttccacccagaaaagagcctctgtcatgcccatcgtctccttccctcctgaaggctcaatatctggttaattacatgacataggaattacttaccatctattttgcctatttccatacacattctgagaacaaaataaaagagctcttctccaggcccctctcaataatttcttcccatgccctttttttggggaaggcaggccagtcaaagcagtgatggctttgatcagagcaacgagcagatcatgatttattattgccggagtagacagtgggctacattagaggactgcttagacgcatgcttattctagaaaaggctgaaggaagaaagaaccacccctttccctcctcttctcagctcccttctgctgggagcacctggctgccagttcccaagttcctctccatggggaattgcagctccaaggtggcctcctggagctgcctaactccgccttcactgaaaataaggtgattgaactgtaaagctgaaatcctctgcagtcatgtctcctccagagtcttcaaggtcactcccactttttttctagacacaaatggggtcatttttgtaattctaattaacactgtctccagacataaataaaattttaaatttctcattgctatcagctgtttccactatgttttt

SEQ ID NO: 3639 - DNA, 1158 bp, Homo sapiens
cagtgggctacattagaggactgcttagacgcatgcttattctagaaaaggctgaaggaagaaagaaccacccctttccctcctcttctcagctcccttctgctgggagcacctggctgccagttcccaagttcctctccatggggaattgcagctccaaggtggcctcctggagctgcctaactccgccttcactgaaaataaggtgattgaactgtaaagctgaaatcctctgcagtcatgtctcctccagagtcttcaaggtcactcccactttttttctagacacaaatggggtcatttttgtaattctaattaacactgtctccagacataaataaaattttaaatttctcattgctatcagctgtttccactatgtttttcataaattggaatgcaattttaaacagttaataaaattctccagtacaagagcaaaacaagaagttaaaggaacacaatagtctagaaacagaagattttgatgtatttttaaattgatatgtatgttatctgttctatttagattacaaacttagagtaatgaatttgcttcagtaaatttctttgtgactgtgagtgctattgcttatattataattgggtctgggtccaaatatatattgaacttattttccaaaagaaatactctccttagattgtggcatggcaggaaagcatactgttcctagtagtcctctccaaactcctttaaaaactgagctttatggcaaatttgtaatgaagatgtaacactttcactacttaaaccatgacttcaatttgtgatataattaagggcaattactcctgttagagattgtagactaggttaggctgagttaataaatagctgtttggctctggcattagcaaggatgtcttcattagggtagtaatgtgtcaagagtgctaaataggttgccatggtatttgtgggtttcagcctggactctggctttccctgaaattaaaaatgttcagcctttaataaaaggcacttccttacacagcaaagcagacagaacactaaataggtgaaatgaccagggctcaggaacttgattgcagaggctgatgaatacacaacgtggatattttaaagtaagcattgactctgacaggctttgttaaaaaagacaaacacagagagaa

SEQ ID NO: 3640 - DNA, 1485 bp, Homo sapiens
gctgtttcacccaaagctcttaggattccttatgtctccccttcccaccttatacttgtttcacccaggaaagagcctctgtcatgcccatcgtctccttccctcctgaaggctcagtatctggttaattacatgacataggaattacttaccatctattttggctatttccatacacattctgagaacaaaataaaagagctcttctccatgcccctctcataatttcttcccatgcccttttttggggaaggcaggccagtcaaagcagtgatggctttgatcagagcaacgagcagatcatgatttattattgccggagtagacagtgggctacattagaggactgcttagacgcatgcttattctagaaaaggctgaaggaagaaagaaccacccctttccctcctcttctcagctcccttctgctgggagcacctggctgccagttcccaagttcctctccatggggaattgcagctccaaggtggcctcctggagctgcctaactccgccttcactgaaaataaggtgattgaactgtaaagctgaaatcctctgcagtcatgtctcctccagagtcttcaaggtcactcccactttttttctagacacaaatggggtcatttttgtaattctaattaacactgtctccagacataaataaaattttaaatttctcattgctatcagctgtttccactatgtttttcataaattggaatgcaattttaaacagttaataaaattctccagtacaagagcaaaacaagaagttaaaggaacacaatagtctagaaacagaagattttgatgtatttttaaattgatatgtatgttatctgttctatttagattacaaacttagagtaatgaatttgcttcagtaaatttctttgtgactgtgagtgctattgcttatattataattgggtctgggtccaaatatatattgaacttattttccaaaagaaatactctccttagattgtggcatggcaggaaagcatactgttcctagtagtcctctccaaactcctttaaaaactgagctttatggcaaatttgtaatgaagatgtaacactttcactacttaaaccatgacttcaatttgtgatataattaagggcaattactcctgttagagattgtagactaggttaggctgagttaataaatagctgtttggctctggcattagcaaggatgtcttcattagggtagtaatgtgtcaagagtgctaaataggttgccatggtatttgtgggtttcagcctggactctggctttccctgaaattaaaaatgttcagcctttaataaaaggcacttccttacacagcaaagcagacagaacactaaataggtgaaatgaccagggctcaggaacttgattgcagaggctgatgaatacacacgtggatattttaaagtaagcattgactctgacaggctttgttaaaaaaaaaaaaaaaagaaagaaaa

SEQ ID NO: 3641 - DNA, 259 bp, Homo sapiens
gaagattagtttacactaccagattatagatattagcattatgaaaaatttgaaaattctgttttttattagtaaataaaaacatgagcaactgatgtttctagaatctagatcctaattaaaggagtctcattccagtctttatatgtgcttaagtttatgtttttcttttatcaaaacatacatttagacattaagcttaacctctaatgtagcaactggctgattattaattcagaatgtatgtaaagcgtttacc

SEQ ID NO: 3642 - DNA, 258 bp, Homo sapiens
gaagattagtttacactaccagattatagatattagcattatgaaaaatttgaaaattctgttttttattagtaaataaaaacatgagcaactgatgtttctagaatctagatcctaattaaaggagtctcattccagtctttatatgtgcttaagtttatgtttttcttttatcaaaacatacatttagacattaagcttaaccctaatgtagcaactggctgattattaattcagaatgtatggaaagcgtttacc

SEQ ID NO: 3643 - DNA, 6284 bp, Homo sapiens
ctgtcttcagtccttaattgttggggaaaaaaagattttagaaacattcttggccagatgcggtgactcatgcctgtaatcccaacactttggaaggccgaggcagatgcgtcacctgaggttaggagttcaagaccagcctggccaacatggcgaaaacccgtctctactaaaaatacaaaaattagcctggcatggtggcagatgcctatagtcccagctactcaggagcctgaggcaggaaaattgcttgaaactgggaggcagaggttgcagtgagccaagatcacgccactgtactccagcctgggcgacagagcaagactccatctcaaaaaaaagaaagtaacatttttgtttcttagaaaaggagcataacaatttagcctttgaaaccgagtagcttagtcaatcttaggctaaaatatccaggcacagacagaggtgagaggtggcaaatgaactatttgagatcttaattggaccagaaatagaaggcagattacagttttacctctcatttactaaaaacaaaaataacagaatggaattagatagcatttttttcaggttgaaacaaggccactaaaacattagtaggcaaatagaaatttggaaaactctgggaagagtatccttgaagatttcactgcatatacttgaaagcaaagtaggagagtgggagattgcaagcttttcaggtggtctttagaaattctagtcatcctttttttaaatataaataaatctccattttaatacattaatgtctaaagtataccgaaaaaaaagtttttttttgttttattcctttattctttgtaaagaatttccaccatcaataggtatagtgaaattttatctcttagaaaaggagcataaaaaaattccacccattaatgaaacagtattacaacctgatcactcacaagccaaaaaaggtccatatacagccagggacagagggttaggaaattaacctcttttctcaatagctgttggcacgttcatgcttagtcggtaaacggggactcttgccaacatcaaaatcagtttaggtattgcaccttccctgcctcaggtgtccccacatgatgccatctgcttctccatagacatggtcggactctgtgttcttggcagagtgagggcgaatactatccatttctattttgagcaccgttcgttcccaaatgccacctgagtaacatacgaaattctctctctctttctctctctcattcatacacatacacacaatccatggagcccagggaaattaagaaaaaaaaaaagacatgtcatttttaatgaatattgctgagctgttgatttgtgatattgtgaaacatgttttgaaaggtaccatttgcagcctttagtagactacaggttattttaggtcagcaggttagagcattttgaggagttaatattaatgtgttgctgtgagcctgtagttggcctagggattataagataacaaggtagtaaatatagaaacgttagcattatctcttattttccatcataaatttaagttataggccagttagagcattcttggattttttttcaaaatcaaactgttttaaagaaacattctaaagctaaattcttcatgtatattacatttccccctatagtgatttaaaataaaggaacatttaaagatttaacatgatggaacttcttccttcagttgcacttgagtgcaaaaaatcaactttcacaatgttaaagcctaaaatactgaaattaaaagtatagtcttccccaagaatttctggaaaatgcccagaatctgttgtttgcctttctagtgcatattcaataagaagtcatagaatttacttcaatctcataaaagttcctgccaagtgaacaagacagctgttgtctggcagttgagccgtagagagttatgtgacttgttcaagtttacagtgaaggtaataatctctgcattctggctaaggtctgtgtgtatctttttgctcttgaaagcttgctctgtcccgccatggagtactctgaccggcaagcagaataaaataagcagtcattgggtattcacaaacacatagaactttgtttttcatttttaaatatctttattttttagagcagttttaggttcacagcaaaattaagctgaaggtacaaagataccccttatcccacctaccccaacacatgcacagccttttctattatcagcatcgtccaccacagtgggacatttgttacagctgatgaacagacattggcacatcattattacccaaattccataatttacgttagggtttactcttggtgttgttcactgtatggatttggacaaatgtatgatgacgtgtttccaccattatagtatcacacagagttgtttcctcagtatctatgggtgattggtttcagggcaacaccctccccccttgcccacccccacaaatccatggaagctccagtcccttatataaaatggcatagtatttgcatataacctacgcacatcctcctgtatactttaaatcatctctagtttacttatgatacctaatataatgccattgctacgtaaatagttgttatgctttagggaataataagaacaaaaaaagcagaacatgttcagtatagatgcaagcatcctttttttcccccattattttctatctgcagttggttgatccacagatatggaacctagggatatggagggctgactgtgcagaatgtttctttaatcattggtaaatcaccaacattaaaactcatgcgtgcttattgccatccgagtgtcttgtttcaagaagatattacagtcaaagctcaaacaagttatgggcagagccatcaagaattcatttagactgtaaacttttaatgacccacccaaccttctaaccagtttatttcccctttccaagtaaatattcttagtgtaggagagcatttctccccatctttcttctctctaagtaaaaatgcccgacgctatgggcagtgcctagattgggcgcattgccccatcttggtgtttgcagcaacagttcttagcctggactcaccaggacagggtgatcttggtcacatgcccagctcttctctccaactcaagaaaacctcatggagtgaaaatgagagggatgccattctgaggactccttcagcttttccaaccttgtaaaacagactcatgagcattggtgctttgttaataatactcgtgttagaaacaataatatttacatagtattaaaaacagtagtatttatggaacatttaataagtgctaggcattgtctagtgttttccttcatcatcccttttaattctctcaataatgctacaaggtagttactcttatcgtacccactttacagaggaggaaacaacttacctggttatagaacgcaccattaccagactgttgagcctgaactcagacccaggccagcttactgcagagcttatatcatcacccagtgtgttgtatccaaactccctgcacagtggagccccacaggtgttactgtgcttgtcctcttcttggtcctcacaggagcctgggtcatggagctgatgcctctgaagcttcatgggcacaggcagcaggggatggaggtagagtagaagacccctcagagatattgccagcgtgggctggggctcctgtggtaccataagggttgcctgtagctacatatgcctcagcctgaactcatactaaaatgactcagtgactttattgagcatatggtatgttccaggaaccgctatatatacattattccttgttgcttttgtcagcaagcgtgctcatgtcatgaaaataacaaagtgagcattttatttgtattccttggccaccaaattagatgagtgatttatgttggggagaactaaatgtctggcataggctgtaacagaacatcacagatttagatggacatgttcctgctgggtcaaaagctgtgaatgaccccagtagcctggggagaggcctatatagcaggaactgggagccagaggtcctcaggatacaattcagatccccaaaaggtgacctgtggccttcctggtgcagagtttggggccattggataatgccatatgccaggctcttactgtgtcctaggctcagtgctgaggttttaccaacataaatattgcattgactcttaaaacaatctacgaggtagatgctgtgcccattttacaaatgggaggaactgacacttagcaggggtgaatgatgtggcagtaaagcgcagagctggttagagcacaggtcttcctgggtccaagtccctgtgctccacttcctccaccgacagtgtcagagttacagaggggagtgaaggatggtccagtccttctcagcagcctagagcaggggagcagcccagggttaagcaggtgtgactcctcgtggagtgcatccctatttcctgagccccactcgctgttagaaaccaaggtattgagggcttagtgagagtttttcaccatttcctgctgctttaggtcctcccatttccagttgttttcttcctactccagggatctcctcccttccccagggttgaagcaatgcacactgaagtattaatagtagtgatcagcaccttcaagacagcaggacccttctgttgccttctggctgtggtgtgatgtcctagggcctgtggtgcataagcaggtggaatctaagcactgaccctggtcattctacatataagaggaagaggactaggaaagctcgacaaatgctgttctcctcttcatggcaaagccttgctctttggaatccttatctgcatttaaaatgtgtagtcttcaatcattgtgtcttgggatgcttggtatatttagttccatcacaaaaggcctctggcttacttattaatgaattctgaaattaagttgtcttttaaaaaagatataggagcaagaaaaaaattaacttagtctttgtaaaacaaatatttgatgaatatttgtaatctctccctgagtggttctagccacaggggtgttaacctacagagcttcctagaaagagcaccatacaaatggccataaatcactggccccgaagaaggaagattctctcttattttgcctcctggaatgatgggaaataattatagaactgggatgaaagaggaattatattattcttgtgttggcatatgtgctttttattatgttttggtaggtctttattgtctgatattggaggagcaaggggaaccagacattactgtcagcatgtacatttcatgctagggtttaccagaaagaaacttagaatcaacagttatctgaggcctgctgtgtcagagcttggggcttttatgtgagccgtcaaattcagacctcaccagtgtgttccaaggaagcgtctctgcctgtacttcactggcaggacccgcctgagggagagtaaacagcctcacagatgtagtcccacagctcatgtctgaggccaacatggcagcctgctctgcagggttgcctcttaccatgcggctgactttccacctagaaaaaaatctgtgttagcagtgatgtccgtggtctctcagaacacacagggagtcctttctaaaaattctgtcttcacagcattaagatgattataactaacacatattgagttattatatatcaggattagcctaagcactttgattttatttatttacttattttatttattattttgagacagagtctcgctcttgcccaggccggagtacagtggcagtcttggctcactgcaacctctgcctaccggattcaagcgattctcctgcctcagcctcctgagtagctgggactacaggcacgcatcaccacgcctggctaatttttgtgtttttagtagagatggggtttcaccatgctggccaggctggtctcgaaatcctgaccttgtgatccgcccgcctcggcctcccaaaatgctagaattacaggcctgagccactgtgcccggccagcagttttcttttattaacccatttaaacctcacaatatctctgaggttggttccatcatttcactgattgtacagatgagaaaactgaggcacgaagaggctaaactacttgctggtgtttcatagtctacagagccaattccagtctcagaaattgcatttactgagagcctaccaagtacccagatctttagggggtatagaagaagtttaactagaatctattttcttatgtatttaatgaatttttttgttgtagagagtaaa

SEQ ID NO: 3644 - DNA, 1851 bp, Homo sapiens
  SITE (552): n equals a,t,g, or c
  SITE (572): n equals a,t,g, or c
  SITE (580): n equals a,t,g, or c
  SITE (581): n equals a,t,g, or c
tgagaaaataaataactctgagaccttaatacccccaccacatcccaccaagagatggctaagtatttttaagaggggtgagccaagccaactaaatacaattttttagatgtcaccaaatcatcaatgaacacatttcagactttgacaggataaaatatggatttaagagcacttattctttaattcagaaaagactaaagagtctaaggaaaaactctagatcttgtacctgcattacttctacacagatgcaatcttccaaattgtatctgctgacatttaaaaaaaatcaagattttaaatattgtctaaagattttaaatcccagatttagaaaatgacagtttaggactgttggtatgaatcacagaaagtcctctgttggtatgaatcacagaaagtaccgtttatatacagtgaaaagaaaaggtgaggggagagtaagcttaaaggagggttgacttaatctacctttttatatatcctgtcagggaaaagcacactgagtttgaggattgcatagattgtattctaaaataaatcctttanaaatgcttactttaagtganaatagcannatttgtgtatataatatttttcaattggcattataaattcatataatcccatttaaattttatcaagaagtaatctgttaaatatttctgcagtgttttctttctaaaagtaactgacaatttccaaaatgtctttgtccctaaaatttctaggggcagagaaaagcaaaatcaaaaggagttctaagtaaaagaacactcttgggccagcccattacacacacaaaatctggctgggtagcataggggagaggtcttgttcacctttaccaaaggaggtcctttagactggaaacagcaacaattacagcaactaaaaactgcaaataaaaaccaatgaaattgaagtcctggggaatcttcaggaatttctgtaactatgcattgaaagggccattcatcatggtgacagttccagattctagaaatattatagtatttctttatattatagaaagtgacacacacacagtgaggcaagggtaaaaacacattaaaaagcattgataaatttttctcactgacaccagccctgagcaacatttgttccctagttctccttttccataacagactgaacagtgttattagaatgcagacatagccatttaaagtttgacaactggaaataaaggataatagaataaaaacaaaaccaattctaaaaaaaatagaattttcattacatgaaaacatatgaaattaaacacaaaattagtataacttacatgttttaaaagtatatacttcatttataaatatctctagttgataataatctattaagaatcataaatattcaagtgagcatttaaattttctatttaatagttcagaattcttgaagtcagattagtgtctttctgatgaatgtccataattaaaaggctttccacagtcactttatgtctctagttagacacataaaagcctttattacctactgtgttgtaataagactttaaaattctgtaagtctcttatacttgtagaaagcctatggaagaaagaaaaagcttattagtaaggctaacatgttgcatactgtttcaaattattgatattgttacataagctataatttgaaagcaaaacctaaaataaaaaacctcaaacactgaagcttccatgtttaaattagtgttctcattaagactggtttagaaggggcaaaggaagcctgttacttcatactatctacagacattagattaataatgggaacagtgatatgaataattcttaataaagaatctcaaatcatttacaa

SEQ ID NO: 3645 - DNA, 9558 bp, Homo sapiens
ggggaaaaacaagacagaaaagattgcagaaacatgtactttaattcacattttctagattctggtgggtacaacagtaaattatttggaattctgttcaaaatcaaagctgcacctgtagatattccttaaaatacagtacacatagatttgtgtgtgtgtttttttaccaaataatttccacgataccatgcacctaatcttgtattttggtgagtagctatggtttctgcaggtacctcagtttgcaaactactgagaggtttactgtgaactgttcccaaattttcagctgaaggcaatgctgatgaagatccaaatagctgtcctttcttatatacagtggcacataggcaaagttgaaaaacatggcagagtttcatatacatagattacaaatatcgaataattcacaatgttaaaaatgtcaaaataaaacgttttgacttatcaaatttcaaaagtgtggagtcttattctgtctgatcctcctcataatctaagaatcaaaacaggagaaacattcaaagtttaccaattttaatatatagtttgtctaacttacatagatgccacttaagtaaaaaataaacttacgccattgaaggaaggaatattttccttttcttcattttcattacttcatcagtgggtacaatcatttctgtcagttatattatcaagtgctgggtttttaaattaggtgatgagataaagacaaaatgccagagcaccagcaaagcatttttacaatgcaaacagtactctagtataatatcacttcacaacaaaagatgtgaattggaaaaacagtttagatcacaagaaccataaaatgtcaccaggctcacacaatcatttaagaaataaaaacacatacacaaaaatgtaggctgcccctacaatctaatttatgataaaataagatgaatttcagcctaagaatacttcatttattttcttagttgtgaaaaaattagttaagaaccttaaaaagaactttttactctaaccagatcttttaatttcctagaacatactctaatatactagttttcctaagcttgaaacaaatcacagtacagaaaaaaacaataaatggacatgagcgaggattttctccagtaaacagtttaaataatagcctttaactgagggagtggtgaaataacactatcaaaaagttctttacatttagagtgataaacaaagtgcagatttttcacatcttaaactctgagtgaatactaagaataattcttactaatttactagttaaattaattggatagtcactttttagacagtttgccttaaggcccccctcccccaccatacaatacttgcaaccctcaagaaaaagtagaggaggctccaatcaagtcagccttttaaacaacttaacaaaaaatactaccaccatcaacaacaaaaccccaagtttataaaggtttgaaattaggtgagaaaataaataactctgagaccttaatacccccaccacatcccaccaagagatggctaagtatttttaagaggggtgagccaagccaactaaatacaattttttagatgtcaccaaatcatcaatgaacacatttcagactttgacaggataaaatatggatttaagagcacttattctttaattcagaaaagactaaagagtctaaggaaaaactctagatcttgtacctgcattacttctacacagatgcaatcttccaaattgtatctgctgacatttaaaaaaaatcaagattttaaatattgtttaaagattttaaatcccagatttagaaaatgacagtttaggactgttggtatgaatcacagaaagtaccgtttatatacagtgaaaagaaaaggtgaggggagaggaagcttaaaggagggttgacctaatctacctttttatatatcctgtcagggaaaagcacactgagttcgaggattgcatagattgtattctaaaataaatcctttaaaaatgcttactttaagtgaaaatagcaaattttgtgtatataatattttcaattggcattacaaattcatataatcccatttaaattttatcaagaagtaatctgttaaatatttctgcagtgttttctttctaaaagtaactgacaatttccaaaatgtctttgtccctaaaatttctaggggcagagaaaagcaaaatcaaaaggagttctaagtaaaagaacactcttgggccagcccattacacacacaaaatctggctgggtagcataggggagaggtcttgttcacctttaccaaaggaggtcctttagactggaaacagcaacaattacagcaactaaaaactgcaaataaaaaccaatgaaattgaagtcctggggaatcttcaggaatttctgtaactatgcattgaaagggccattcatcatggtgacagttccagattctagaaatattatagtatttctttatattatagaaagtgacacacacagagtgaggcaagggtaaaaacacattaaaaagcattgataaatttttctcactgacaccagccctgagcaacatttgttccctagttctccttttccataacagactgaacagtgttattagaatgcagacatagccatttaaagtttgacaactggaaataaaggataatagaataaaaacaaaaccaattctaaaaaaaatagaattttcattacatgaaaacatatgaaattaaacacaaaattagtataacttacatgttttaaaagtatatacttcatttataaatatctctagttgataataatctattaagaatcataaatattcaagtgagcatttaaattttctatttaatagttcagaattcttgaagtcagattagtgtctttctgatgaatgtccataattaaaaggctttccacagtcactttatgtctctagttagacacataaaagcctttattacctactctgttgtaataagactttaaaattctgtaagtctcttatacttgtagaaagcctatggaagaaagaaaaagcatattagtaaggctaacatgatgcatactgtttcaaattattgatattgttacataagctataatttgaaagcaaaacctaaaataaaaagcatcaaacactgaagcttccatgtttaaattagtgttctcattaagactggtttagaaggggcaaaggaagcctgttacttcatactatctacagacattagattaataatgggaacagtgatatgaataattcttaataaagaatctcaaatcatttacaattggtctaataaatttattttgcacattcctcttcaaatgattgctctttactcaatgttccccaaacacactaatttgtcttatgttgttagctccctaagggtaaagactctatttcatctctctcctgtgccccatacccattgatgcttatagcattcagtaaatgattactgactgactaaatgaagtgcttctcagcccaggccaaaaagtaaaactctgggatgggaaatataaaaaagtaattctaaaagctcaagtatccctatgtacaattcgggggtgatagaagaaaaatctttaactatttgatagaagaaaaattattccttaatcacttaggaggacaggcaatgttctaagcccatcacatatatgatctcattatcaggaaacaaactaggaaagcagtgatttgcctgagttcataccactactaaagggcaggccaggattccagaactttaggacccctgattctgagtccattactctagggaacaataaaaggtaataagctctagatatagaactaaaacaagaaaggctgcatttgtgaatattttttatgagatcgaaggaaattttcaattgttttgaaattctcaattgttttcatctttctcaatttaatttggacttaagagatgcttaagttatttacaatatttttcatttcaatttatttaaatttcattcagtatctcctgtgttatctttctacaggcctcataagtggatggactgaattttttatgaaataccagttaatggatagtctatatctatcctgtgtctgaaatctcaacctacatagtcatctttaaatacagggaagcaacagctgaaatccttgttattaagatgggaaatggccaggtacagtggctcatgcctgtaatcccagcactttgggaggccaagacaggagaatcacttgaagccaggtgtttgagaccagactgaacaacaaagtgagacccccatctctacaaaaaaaattttttaattagccaggcaaaatagcatgtgtctgtagtcccagctacttgggaagctcaagtggaaggaacgcctgaccccaggatttggatgctgcagtgagccatgattgtgccactgcattccagcctggatgacagagcgagaccctcatctctttaaaaaaaaaaaaaaaaaaaagcaggggacatataataaatctgtttttaatttaactgcttctttttaacttaaaacacatgttaagaaaaacaagaaataatctttgtattacttagtcccctatttttttttttttaattcttcctcaagttgacttttttctctttttccccaaggaagcatagtattattttctgtgattcttttccttctgttctgtattcctcagttggcattacatgtatctctgctggcaaattcaaattattttttaaaccactggtgatgtaaacaagcaagcaaattatatgtctgtatacagaagtaaatcatgtagaaatgagtgaaagaaaaatgacctctgagcttcagaaataaagagcatagtgcaggaaaaaggtgagaaaagaaaaaaatagtaatgaaaatttaagaaaaataaggagcagatgaaggttttaattttcttttatcaccttctcaatcacacattccttactcctgctattgtagttgaacaagttatagccaagcaaaaagaatattagaagaaaatctcccttacaaaattaagacagcaaactgaaaaacactggcaattggaaacttagtttttcctatgacctgtagagaaactgacttgtcagcattaaggcctctctaagttagtacagatacaatataaaattttttttttttgtcaacaaaacaaaccctacttttagcaaagaagattatctttgcagtttgttgaaacccaatgggaaatcaaaaatcttcaacatataatggttcttaccttccaaaagcatttaaaagagcaactatttcctgtcgggtgagttggaagcctttagatggactattctctggaagcttttggatttctttttcagagaataatatcttcagggcagttcctaaaccctgagtctaaagaaaataccaataaactcataattaactttaaataataataactagtaaaaaggcttaaaggaatatatagccactgttatgccagttaggaaattcatatgaactgagcttttcacaaaaatattactacggtttctactttctcacaggttatgcatataataaacacatctgagcagttaaggaaacctgaatagtcttaacacttattgaatacatatcatactattccaaattattaaaatgacttttttaaccttgaaaataccatattaggattacaatgttcaatttgtaaccataaaggactttttacagcttttagcaattcaaaactcagagattattgatacccagacttaataatttctcaattattagcactatagaaaaagacatattttatttcagtatagcctccactgtaataattttgtctcttaattttctataaattaccatctttgttagaaagagataaaatattcaacaatccttttgacactggcttacacagagtaatggacctgtcttgcggcgtttcctattttgactaagtgaccttcttttgctcatttaaacaaattcaatgaccaagacttcatatttcaatctttttatgtaattacattttacctttctatatacatatgtaaaatacggatatacttggttcgtaatgaccaccaacttcacaaatgaatctggtattgtatcaatagaaacatagacacaataaaactaaaatcactaaagaataatatgagaaacatcctttcacatacatgtaacacatatactttaatattaattttttcatcaacagaaaaaacaccttggatctgcctatttctaaattctaattcaatgaacaatgaggacattttaataaaaagcttgcactcagtggaaaaaataaaggttagtaatggcttcaaaagagaagacaacacatatacctgtaattttccccataatctgcatttgtcacatccaacacagtccattatacgggagatattcttgaaatgtaatcggaattcctcctagcaagcagaaaatattttcagtctaattagacttttaaaattgaactgcatttggctaaacgataggtaagttttgatgcttattaataaatcagttgtgttttttgtttgtttgagaaggagttttgctttgtcgcccaggctggagtgcagtggtgccatctcggcttagtgcaacctccacctcccaggttcaagggattctcctgtctcctcagcctcccaagtagcttagattataggcgcatgccgccatgaccagctaatttttgtatttttagtagagacggggttttgccatgttggccaggctggtcttgaactcctggcctcaaatgatccgcccacctcgacctcccaaagtgctgggattacggtgtaagccaccatacccaacccgagttgtgtttttcaacagtaaagaaaaatacctgatacttgtatactataacatggtacataaaatactgacattaatggaaattaataaaattcattctgcatattaattcaataaactttccactgaggagctactttatgcaaagcaccaaaatatgcactatgggagatacaaaagtaaataatacatggtctttacttttaaggaacttaattgctgcttccatttgttatctacatacaaccaataataaatatgtctagtttatgtttcacttatttttgatcctttgctttgtgtaagcctatatcagaaagctagtcctagaacaatgatcaatttttgtatcactccttagtaccacactatgtttgtcatggttgctcaatcaatatgaatgataacaggcctgtgtgacacacatggtcccacagtcctctacatttgctaatgcagttgttatggagatgcttactggatccctctattttgctataatagtttcctacactggtcaggcagggtggctcacgcctgtaatcccagcactttgggagaccgaggtgtgatcacttgaggtcataagtttgagaccagcctaaacaacatagtgaaacctcatgtctactaaaaatacaaaatctgccaggtgtggtggtgcatgcctgtaatcccagctacttgggaggctgaggaagaagaatagcttgaacccgggaggtggaggttgcagtgagccgagatcgcaccactgcacaccagcctgggcaactagagtgaaactctgtctcaaaaaaaaaaaaaaaaaaaaagagaagtttcctacactggggaaatgcttctgcctataagcatttgtgtgcaatatgcctttaaggttggtctcactttatctgcggataagattggttaagagaaaatttcctcatttgtttcacatggcaactgcagaaaataaaaatcattttattgcattgagggaaatattttattgcatgaagcgggaggcaagtagcctgaaaactctggctaccacaagccctgaccagctgccagagggttgaaaggaatcaataccttggcaaagaaagacaatataaatagaacacaaaaactcctgtgctggtcatattctcatgtaatgtaagttctttgcagcagacggaaaagggacataggttctccttcatacattcttgacaaacagcaaacaaaatcccagcattgtgtagttaaaagcttgctgtgagacccttaggctttgcttagtctcactttcctcatctacaaaaacatacataattatagttgccctattacacaagatcattctgaagattaaaagtagaacatatgtgtcgatacttagaaaacaggaagcattataaaaatgaattaacatacaaaataccaaaatggcaatatacctctaaaacaactgtaaaataaaacaaccttccaacactaaaatatagttgtgactaaattacttatttcagaaataccaagaaagtctcgccaaaggagaatcactcagtattgatttattggttcctatagtacatccacatctaaaacatcttggggtcaaatgtgttttagaattcagaagtttttaaattttagaaatacagtacatgtactgtatattatgaaacatctcaccagagtgtgaggaaacaccctgcagtcaaatccgttaatgtttctgtagcaaaatataaaaaattcataccaagcagaatttgaaaacaaccccacaaaactacgaatatctgctatattgttacaccagtttaggtcaggttttgctaaaaaattaccttgcactaaacataagaaaatgtttcagtttttgaaactacccggatttcagaagtacatataaaagactatgaagttgtactcaaagattatttgtggccaggtgtggtggcttgtgcctgtaatcctaggtacttgggaggctgaggtgggaagacagctcagggccaggagtttgagaccagcctgggcaacatagcaagaccccatctcaaaaaataaatttaaaagtaaaaaaaaaaaaaaattgccaatttcaaatacttttatgaacattttaagggtacaatttgtttcttaatgtactttaagcaaatgaaaataaagaacacctaacatgaagtttggtaatgttcccaaaacatattctccttctgatgtcacatgttaacaggtagttttaaccttttaagttagtccaaagggacaaaaacataatatatgtttcaaaaaccgtaacattccataaaataaactttagaaaaatatttattgtcctcaaagtggctaaaagctcatggtattctgaaagctgcatcaaaacgacaatatacactgcttttaaactaagaaaactttccctcaactagtatcttttaaaaagacatttataaaggtgttataggacatactaatgaccaatgattcactaagcagttggtcaatggaactgagaaatatggaaaggctttttgtaccatttgtattaaaatccaatcagaccaactctgacaagaagctggaaaactgggaaagaaaacagtttggatgcacagcattaaagcataaccagcaaactgctcccaaccccgtgtcccaatcgagaactttttacctttagtgacttggccccttttttgtcacctgcaaacatggatttctcatcaaa

SEQ ID NO: 3646 - DNA, 503 bp, Homo sapiens
gtgaatattttttatgagatcgaaggaaattttcaattgttttgaaattctcaattgttttcatctttctcaatttaatttccccttaagaaatgcttaagttatttacaatatttttcatttcaatttatttaaatttcattcagtatctcctgtgttatctttctacaggcctcataagtggatggactgaattttttatgaaataccagttaatggatagtctatatctatcctgtgtctgaaatctcaacctacatagtcatctttaaatacagggaagcatcaggtggggtccttgttattaagatgggaaatggccaggtacagtggctcatgcctgtaatcccagcactttgggaggccaagacaggagaatcacttgaagccaggtgtttgagaccagactggacaacaaagtgagacccccatctctacaaaaaaaattttttaattagccaggcaaaatagcatgtgtccgtagtcccagctacttgggaagc

SEQ ID NO: 3647 - DNA, 1605 bp, Homo sapiens
ggtgaattactctattgctctggattgagaaaaacattctaattatgactcaaaatccagaaaccactaaaaaaactggtaattcagactacataaaaattttttaaaactcatgacaaagccatcataagcaaaagacagatgacaaattggaaagaaaatatttgcaactcattactgtcaaagggttcatatccctaacaaataaacaacatatcaacgatatagtagaaaaatggataggaacaaaacaatatgggaaacaaaaggaaatacaaatggctcctaaacatattaaaaggtggtcaaccttaggcatagtaaaaatttacatactgagcagtcaggtgtgtggcgtgcacctataagccaggctattcgggaggttaaggctggaggatcacttgagcccacgagtttgaggctacggtgaactatgatcataccactgcactccagcctgggtgataacgtgggaccccgtctcttttttaaggaaaataaaagaatgtacacattgatataaactttcatctaccagaatggccagaatccaacattttaataacatctacattggtaatgttgcaggttagcaagtactatcataaattttagatggtatgtgaattgatgactacccctatgaaggacaatatgccaatatctttcaaaattataaatgcacacagtctttgcccccaaaattcttatctttgggaatttattctacaggtacaatatttatataaatgtgaaatgacatatgtacaaggtctggaaacaacccagctgcccattaatagaggacgggttaattcaacactggcacattcacataacagaataccaagtatctacttcaaaaaatgagaaaactatctagtcatatgtgaagactgccaagaaatactaggtgaaaaaaatgaagtcgtatgtatatgatgtcaatttttgagtaaaaatgagagaaaaaataagactttccatttgtatatgtttgtacctgtctacaacagtgtgaatggaaacctaagaaaccaagagcacaggctattcatggtgggagatgagtgtgcagtggaggaagctgggccaaggacacaggaacacattcactgaataactttttatattgtttgtttcttttaaccatgtgaatgtattacctattcaaaaaattaaataagataagcatattttataagctttatgattcaatacaaatcaaacaatgcttttaattgttcccactttgtagctgaatggaaataggccaacttacaaaatgtcacaaaggttctagaatcagtctttctcgtctcaaattcttgctccacaacctagaatttgtgactatggacaggttacttagccttttttatcctcagtcttcttacttataaaacagagaagtaattgtacctacctactagtgctattgtgaagattaacggtgtattcttttaaagccaaactatgcatgtaaaagcccttaatacaatgccagccaatgcttgccattatgataagaaacaacctcagactacttataaatacattttctcccttctccacaggttacaatcaaattctcatgccata

SEQ ID NO: 3648 - DNA, 1350 bp, Homo sapiens
ggagaattgctgtgatcagaatggtatttaaggctggattatagaggtgaggatttaagtgtagtagattaactatcttacagtaccatctgtcctaaattctgggcttggggagtagtagtacaaataagtggggaggacagagaaagaaataatatgacagagtggaggatgagcagagaagtggagaatagttcccagatgttgaacctgagcagtggggaaggtgatggaccatcaatagaggcgagacaaagagcagttcaagaaagatagtatattgggttatgggcgcatgctaagtttgaagtgtatagttgggccttccatgtggaactgtttggtagagttgaaattttggagatgttgctttgaggatcgtggtagagaaattgttgatactactcaagtgcctgagacagccagagagaaaaatgtaattcccactcaactgccgctcttttcttctcccaccataggtacttctacatccctttcccagagcctgagatgaattttgtgggaccctaccatgtgcccacatcctctgcacaaggccactctatcttaatgataagaatataactagttctgagaacagccacctaaggaggcatttattcccattacttgaacagtacatagtgattgaaccactatccagggagtgattggcttgctaggggaaaggaaatcctgcacctctcttccagtaacctggctggcccctcagccattgtgtctgaaccaatcagacaaattacataaacttgtactcgcagaaaggtttgccactttgtggcacagagccatgcagtaaggacaggatagcctccctaaagcgtatttccttccttattggcagtctgagaaaaacctggaataggaccatatttgataggtttggcctaaaaaaatagtaataatcgtccattgttctccctagtcttctcattgtccttagaagctataatcagcagcctcagaagcatttatatttttcagtttctgtaattaatacatactcttataatcaggaaatttcatatgaaataaatgggctgcttatataaattactatgagagctgttcttctcagcatgatccgtactcactgattccctccctgttgccctaaaggaataactatctgcctcttgtgttatggaacttttgaggacctcttgcagtttttagttagctcctgtttatataaaacagtggttttctgaggcttcaaaagtgactgatctcaggcacagtgaattcaggcaagaacaccatgaaaaggcataagaatagaagaagaatagctttttctagttaaagagaagagagaaaaaaaaaaaa

SEQ ID NO: 3649 - DNA, 1350 bp, Homo sapiens; identical to SEQ ID NO: 3648

SEQ ID NO: 3650 - DNA, 1350 bp, Homo sapiens
ggagaattgctgtgatcagaatggtatttaaggctggattatagaggtgaggatttaagtgtagtagattaactatcttacagtaccatctgtcctaaattctgggcttggggagtagtagtacaaataagtggggaggacagagaaagaaataatatgacagagtggaggatgagcagagaagtggagaatagttcccagatgttgaacctgagcagtggggaaggtgatggaccatcaatagaggcgagacaaagagcagttcaagaaagatagtatattgggttatgggcgcatgctaagtttgaagtgtatagttgggccttccatgtggaactgtttggtagagttgaaattttggagatgttgctttgaggatcgtggtagagaaattgttgatactactcaagtgcctgagacagccagagagaaaaatgtaattcccactcaactgccgctcttttcttctcccaccataggtacttctacatccctttcccagagcctgagatgaattttgtgggaccctaccatgtgcccacatcctctgcacaaggccactctatcttaatgataagaatataactagttctgagaacagccacctaaggaggcatttattcccattacttgaacagtacatagtgattgaaccactatccagggagtgattggcttgctaggggaaaggaaatcctgcacctctcttccagtaacctggctggcccctcagccattgtgtctgaaccaatcagacaaattacataaacttgtactcgcagaaaggtttgccactttgtggcacagagccatgcagtaaggacaggatagcctccctaaagcgtatttccttccttattggcagtctgagaaaaacctggaataggaccatatttgataggtttggcctaaaaaaatagtaataatcgtccattgttctccctagtcttctcattgtccttagaagctataatcagcagcctcagaagcatttatatttttcagtttctgtaattaatacatactcttataatcaggaaatttcatatgaaataaatgggctgcttatataaattactatgagagctgttcttctcagcatgatccgtactcactgattccctccctgttgccctaaaggaataactatctgcctcttgtgttatggaacttttgaggacctcttgcagtttttagttagctcctgtttatattaaacagtggttttctgaggcttcaaaagtgactgatctcaggcacagtgaattcaggcaagaacaccatgaaaaggcataagaatagaagaagaatagctttttctagttaaagagaagagagaaaaaaaaaaaa

SEQ ID NO: 3651 - DNA, 450 bp, Homo sapiens
aaaaggacaaatgcaggccagctatggctaccaggtgcctttattagccatatgagcttttgttgagcacctactatgagcactatttaagtcctgggtagaataggaccatggttcttaaattttatatgcccagagagcctgttaggatgcagaatccctgcagtgggaattaataggtctgggaatgtgaaactctgcaaagtcatatgtgattctgatgaaggtggtcaatgactgcattttaagaaacattgatataaggagttcaaaaataaatgatagctgattcttgcttttgagatgatagcataggaggggtaacaaataattatgaggtagaatgacgtgcaataatagaattacagacagcagttttggaaactcagtggaaaactaaaaagtaaggaaggttttccagaggaagtgacacatgagggatgagtagga

SEQ ID NO: 3652 - DNA, 450 bp, Homo sapiens; identical to SEQ ID NO: 3651

SEQ ID NO: 3653 - DNA, 450 bp, Homo sapiens; identical to SEQ ID NO: 3651

SEQ ID NO: 3654 - DNA, 11027 bp, Homo sapiens
aggatttaaaccggatgaggagtgaattgctggtgcctgggtcacagcttattttaggtccccatgaatccaagatacctatacttttgattcagcagccaggaaaagtgactggtgaagatcgactaggctggggaagtggctgggatgtcctactcccaaagggctggggcatggctttctggattccatttgtaagttactttttgattctaacagttgcaatatttaaaatacattcctaataaatgctaagtactcaaaatgttccagactttatgtacaacttaggaggaattgagtggtgtatttctgcccttagagctatagtcctggatacaagatacttcatacatatagtccctggagccaggttctcattataagacctgtgctgacatatcgtcaattgttgaggtttttaaagtggcctgatattcgaatagtagtggcaacaaaaatgttgaggtatttgatttgaagaaatttgttataagtttaaaagcaaaggacttaacttttacagatggatagaatacttttttttttgtttttgaaatgttaactataaccatatactcctatttatcaactgcagctaaaaattttattagaatcgaatgtgtcttttttttcctggttatttcaaatattactttgaaggctgggtgtggtggctcactcctgtaatcccagcactttgggagaccgaggtgggcagatcacttgaggtcagaagtttgaggccagcctggccaacatggtgaaaccccatctctactaaaaatacaaaaactagctgggtgtggtggtgcatacctgtaatcccaactccttgggaggctgaggcataagaatcccttgaacctgggaggcggagtttcagtgagctgagatcataccactgcactctagcctgggcgacagagcgagactctgtctcaaaataaataaataaataaaataaataagtaaataaataaataaataaatattacttcgattctagagagtgtaaaaggcatgtgagacttttagattcatgccggtaattaatttttagcatgcctagtgcaagggacatccagttaatcattcaggagtaggaatatttaaaaataatcctacttaattttttactatgagatgctttcaagcatacaaaaaagaatagatgctgatatagtgaatgcctgtgtgccatttacccgccatccggcttaagaaatataacattacagatgcattgatgcaccctgtgtacctctctccagtttcatttccctccctccttttaaaataatcactccgctgatttcggtatttgctactaccatgcatatttttatagctttattaaagtatgtttgtatcccacaataaaataactatttagacttgacatgtttttaaagtatataccttactgtatatatgattttgcaacttgctgtattcacttggcattgagattcttttccatattggttaatgaagcatgacgaagctcgattttattcatttttactattgcatggtaatccattgtgtgtatttctatccattctccttttgaggggcgtttaggttgtttccattttcccccatataaacattaagcaattcactttaagttggtagactgacagtatctttttgacatttcttttagatttatcgaggtgtgagagtcggagggttgaaagagtctgcagtgcattctcagtataagaggtcgcctaatgtcccaggcgattttccagactgccctgccgggatgctgtttgcggaagagcaagctaagaatcttcttgaaaagtacaaaaggtaagaaactggcttctctaatttgataatgtattaaggaaaagagaagtgcctgcttatattggtatcccaaacattaggatggctttggtaatttcatagacttttcagtgagttcagcattactgagaaataattaagaagatattacttaagtgaggagattgtcttatatctatttggcttttgtaggcccattttggttataaacccttctgtttgttatttatttctatcaataatgatgtacacttaaacttggacatgagtctcagacacttgttaatagatttctactaccaacccgtgtctccctccaaaatggaaattgtgtttttaaaacttattatagaagtaatatatagttatcaaaatttaattaaactatgaaaatatataaaaagataaattggtatagtcctgccacccagagagataagtactgtttgtttgtttgttttttgagatggtggtcttgctctgttgcccaggctgtagttcagtggcgtgatcttggctcactgaaacctctgcctcctgggctcaagcgattctttcacctcacccgtgtagctgagagtaaaggcatgtgccattgtgcctggctaacttctgtattttctgtagagacggggtttcaccatgttgcccaggctggtctcgataccaattttccatagatccaccggccttggcctcccaaagtgccaggattataggtgtgagccactgtgcctggccaagcactgtttttatatcttagtacctatccatttagacttttcttttttcattggaagtgtggccgatgagggtcatgatttcctttatattgcaaagtatattctaacattgggaatttgttgccccctaaattgtaggctcccggaagcacagaagctgtctctctttattgtggcatttgcagtgtctagccagtgcctggtgcacagtaggtcttaataacctttatttgttgtctgatgaatgactggttgaatattgtagttccttgatggtgagcttcatgagggcagaattgtgttttcttgttcattgctgcaaccataactatagagacaggcagtctgcctggcttgcttttttttttttttttttttgaggcaggatctcactctgtcacccaggctggagtacagtggcgtgatcatggctgaccacagcctccacctcccggacccaggtgatcctcccacctcagcctcctgagtagctgggactataggcacctgccaccatgcctggctaatttttgtagagatgaggttttgccatgttgcccagggtgttcttgaattcctgggctcaagtgatccacctcctttggcctcccaaagtgctagggttacaggtgtgagccaccctgcctggcctgtgcctgcgtttcaaactatttgctgagtggtggatgaatgagtgactagtgatgtattcctggattgctaccttaccagctctttgagggcagcaatcacatgttatacatccttgtgcctcccatagtatgtagttgagaggcttctatgtgtttgttaaataatagttaaaaataatacttatttcttactcttcagagctttttatgcatgcaaattttccatagatatacatatttttttaaagaatggtattacatacattattttgaaacctgtctttttcgtttaacaatatggtatgtatggttttaccatatcaaaaaatatgactctaaaccaagtgttgacaaacttttttggtagagggccagatgataaatatttttgactttgtggagccctcggtctccatggcaactactcgactctgccactgtggctccaaagcagctgcagatgacacgtaagagaacgagcacggctgtgttccaatcgtgctttatatatggaccctcggatttgaatttcatataattttcatgtgtcgtgaaatattattcttttgctttttcaaccatttaaaaacgtagaaaccattcttagctcatgggtcatacaaaaacagacagcaggccacatttggcttgtgagtcagcctgccagctttgttcaaaatgtcactttgaatgctcacatgcaattgcagtgtggatgtcctgtaatttatcagtggcttttgaggttatttctgactttttgctgtgtgtttctgtgaacatcttcctgtatgcatctttatatatttgtctcatttattccttcatttaacatacatttctttagagcctactgtgtgtcaaacaccattgtaggcggtggggtgacagcagggacaaggcagacaagtctgtctctgccttcatggagcttatattcttcttttattttttgagacggtctcgctctgtcacccaggctggagtgcagtggtgcgatcatagcttactgcagcctccaactcgtgggctcaagcaatcctcccatctcagcttcctgagtagctgggactgtaggtgtgcaccacaactcctggctaatttttaaattttttgtagagacagcgtctcgctttgttgcccaggctggtcttgaactcctggcctcaagcagtcctcccatcccagcctcccaaaatgctgggattacaggaatgagccactatacctggccacgtagcttatgttcttgatggaggcacaagtttctaggctggttgggggtacccaggagaggggagggaagctaaaatgtaagagcgaagtccttggacaaggaagaagggggggattcagggcacacgtggaggaggcagcatctattgggattgagttcagttcttctgaatataagactgtgagactgccactgatacagtttaatctgcttttatttctttggctatcttccaactagatttacaaacagttctgactctttttttttttttttttttttttgagacagagtcttgctctgttgccaggctggagtgcagtggcgtgatctcggctcattgcaacctccacctcccaggttcaagcgattcttttgcctcagccttccgagtagctaggattacaggtgcccaccaccatgcccagctaatttttgtatttttagtagaaatcaggtttcaccatgttggccaggatggtcttgatcttttgaccttgtgatctgcctgtctcggcctcccaaagtgctgggattagaggtgtgagtcaccgtgcccggccctggctcttaatcctattttccaaaccactttctttctgtaattcttaagttggctagttctccttcctcagaaaaattaatataaggctgttagcctgccactgacatctgaacatggatttatttagctaggttagattctgcagtggggggattaagtagcacactcctgattgtgactgtcttcatgaaaaaagaggcacagctatcagccagcagtaagaaggggagagaggctgttggagatttgaggagagaggaattgtaagcagtttctgggagagtggaagacggaattgagaggagaaacatgggatctgtaagatgtagagggcacctacttgagatttgtgtttataaaggaagaccgttaagaaccatcatgagttcttcctccgctgtgctctgccactcgggctggcatggggtcattggagagttggctgcgcccaggtcagctttccagtggagggagtgggggtgtttgtaggggagggacggtggtgtgagccatctaggctgatgaagagcgaggcagctgctgcgagccgcagggaggtgctagtgtaaatgggtggttggggcattgttgtgggagggtaagtgggtggaaaacacgaggcatggctctgagagcaggatactgacatcgcagtttgaagctggagcacgtgttggcagtgaccacacctaaggtatgagcagggagtgggtgctcgaggtggggtgaagtaagacatgcgaagtgagggtgggaaggtgactggtgggttattggaaggatgatttaggcagatgctgaagccactgggagtgacaagagtcatagtggtgcaggggaaggcagcatgaccgtcaagatcattaattgcagccttgtttggaggaacaaaagcttaaagacaatcaaaatgtcctttaatagaggactgtctaaatcaattagggcatattcattcagtagagtaagatacaagatacacagcctattaaaaagaaagaatgagggagctttcagtactggtataaagtaatcaagatattttgttaaatgaaaaaagtgaagttaagcaaaaagtactgtacctagtatgctgctatttgtataaaaataaataaaaagaaagaaatatgtaatatctgcttgtgtgtacataagatgtctctggaaggctatgtaagaaactgataatgatatttattacctttgtggaggatagctgggtcactagaggtcaagagtaagacagaaacttcatgtagccttgagcttagaacctcgtaagtgtacaggaaaatcgtggcacaactctaggggcaccagttccttgtagctttcaggaatggatcccctggtgtggttcagtggccacatggggctacattgtttattgaagaccaaagaaaacaaaaaagcttggccagtagaattggttattattattattttattttttattttttggagatggagtttcgcttttgtcaggatagagtgcagtggcatgatcttggctcactgcaacctctgcctcctgggttcaagcgattcttctgcctcagcctccctagtatctgggattacaggcatgtgccaccacacccagctaatttttttgtatttttagtagagacagggtttcaccatgttggccaggctggtctcgaactcctgacgtgacgtgatccatccgcctgggcctcccaaagtgctgggattacaagcatgagccaccatgcctggcctattattattattttctgagacggagtctcactctgttgcccaggctggagtgcaatggtgtgatctcagctcactgcaacctctgcctcctgggtttaagtgattcgtctgcctcagcctcccagtagttgggattataggcaccctccaccatgcccggctaatttttgtatttttagtagagctttcaccatgttggccaggctggtctcgaactcctgacctcaggtgatcgcctgccttggcctcctaaagtgctgggattacaggcatgagccactgagcccagcctattattctttatcatatgtttcttggaaagcttttgtgtgtgtgtgtgtgtgtgtgtgtgtgtgtgtgtgtgtgtgtgttttaaaatagagatgcattataatggttataattattttagttttccaatcctaaattgttcaacattggttctcctgtatgtttttctttagacgccctcctgcaaaacggcccaactacgttaagcttggcactctggcacctttctgctgtccctgggagcagttaactcaagactgggagtcaagagtccaggcttacgaagaaccttctgtagcttcatctccaaatggtaaggagagtgacctaagaagatctgaggtgccttgtgctcccatgcctaaaaaaactcatcagccatctgatgaagtgggcacatccatagagcaccccagggaggcagaggaggtaatggatgcagggtgtcaagaatcggcagggcctgagaggatcacagaccaggaggccagtgaaaaccatgttgctgccacagggagtcacctctgcgttctcaggtaagtgtcggtgacttctgggtacattttggattatttattttaatattgaagaggctacaggatgtaagcgttatcactgtttgtttatgcaaaatccaagtgaatttataggctttctggaagggaaagccagtcttttatatttcatagagggctcagggaaacagcttaataatatttgatgtaaggcatgatgctaattgatgaaatgatttacaatattgtcatcaatagatccaagccaaggcagttttttttctgacatattttatgcagtttgagcaaggattctttgctttaaattaccaaattagatttcttctagttccttttgaattatatggatttgtgttagagcagcaacccattagatgtaatatagtcctagccagagaggctaccggatacactatgttctcctctcagtattggtgtgggccaggttctgctcatcagtgaccctgcattctgtgctttgctctgattttttttttttttttttttgagatggagtcttgctctgtcacccaggcgggagtgcagaggtgtgatcttggctcactgcaacctcggcctcctgggttcaagcgattctcctgcctcagcctcccaagtagctgggactacaggtacatgccaccacgcctggctaattttcaccatgttggccaggctggtctcgaactcctgacctcaggtgacccgcccacctcagcctcccaaagtgctaggattacaggtgtgagccactgcgcccggcctgtgctttgatttttaaaaagtgcttatccctctagccttgtgcttacttttccgtatagtagcctcataatttcctatcattctttcttactttacatgtaacagtcccttacagttcctttactcattgaaatcttagtggctctttattttcaccctcactgtgattacaatcctagattctatctcactgtcttgttttccctgccttcaacttcttaaatctttagtccctgagtttcagaatggcaaacacataaaaagaaaaatataagtactaaaatgtactacagtgtatttctaatttttaaaaaattgtagttttgattcttatatagtataaaagaatcaaattaattctagcagtgtctaatcttctgattgcatatttttttctggaacaaaatatcctcaaacgtatgtctccaacttcatgtaggagtagaaaattactgaagcaactgtcagcctggtgtgggcccagttctgaggatagtcggggaggccggcgagctcccggcagaggccagcaaggattgaccagagaggcttgcctgtccatcttgggccacttccccagggccctggtttgggtcagcctgtccctgctcagcaagggcagccccgagcctcacaccatgatctgtgtcccagccaaggaggacttcctccagctccatgaggactggcattactgtgggccccaggaatccaaacacagtgacccattcaggagcaagatcctgaaacagaaagagaagaagaaaagggagaagaggcagaagccaggacgtgcctcttctgatggcccggcgggggaagagcccgtggctgggcaggaagctctgactctagggctgtggtcaggccctctgccgcgtgtgacgttgcactgctccagaactctcctaggctttgtgactcagggagatttttccatggctgttggctgtggagaagccctggggtttgttagcttgacaggcttgctggatatgctgtccagccagcctgcagcgcagaggggcttagtgctactgaggcctcccgcctctctgcagtatcgatttgcgaggattgctattgaggtgtgaatgcgtgcttgtatcccagcagggcatagataatacgttattattgtctgccaagttctacatgtggagaatctgcttctgctttaaaatatcatgtgaaactccctggaaacaagaataaaaaattatgtattatgcagatgatgaaatgtttacatcattccagtaatgtcattgattttcatctttccctgtccttgctgtaatacttttaaattatttggccaaaagctttgtattatgatctcttggtctgtgtagttgtggctgaaaataatgagaagctctacgagttatcatcccctttttttgttagaaacaaagggcttgtcaggtctatttgaaaaacctcatagtcatgtgataagcaacaatagatgtttaatgatttcactgttatagcagaagacaagagaagacgcttggcctctgtacatgaaatatgggctcctgatggacctcattcaattctgtactgtgatttccatgccgaacaactcaagccttaaagagagaaatcatggacaactgatttctgcctgttttcaggcaggcacagtttatggcgtcagtgctaggctggaattagaaagtgggggtctatgacgtggacttcctgactctttgatctctttgttgttgaccaacacttgatcctactagttacttaatttttttaagtaaaaaattattattattttgtttctgcaaagattttctcaaagccatagaggagcatttctcagaatatgttctatgatatgtgtcacctaaaaaagtaagagattccaaggtcaggttgatatggaaactctaggttaaataaagttaagcatttctttatgaaagaacttctggaaacttccatgtgataatgtgcattgcggatctctaggaaggaaatgatagtgtatagtattttctaaatacttgtgattcctaaagttctcttacaaggagccctttgtaggaccagtgttcttagtagcgcgctttgggcagtgtggctgtgtagtgcatagctacctctgcaaggtgataactaagccggcaagctgcctttcaacactcatgcagtcacgttgtccacctgagattctcaacagggtataaaaggaaggtctcatcttgcctcacaggaagagtgggctcagtgtggcttttttccaactatggagaaactcagtgctcatctactttaagtttccacatatggcttgctcatagccttggtccttacctttcctgccataactttctagaagagcttaatgggattttttttctaaaaaatgtaaatatgcagttaggcattattttatgtaaatgcattgggtttttactgtagcatttggcactaaatggctttgggggtgatgaggtggggaaggatacagcaggtggtacagtagtcaggaagtacctgccaccaatgagatgtctgatgctttgcctcttaccatgcctctgaatgtctttggatccaacccagatgagactgaaaaaaaaaaaacagtgtaactaagtggcatctgtaaacagaataaatgaaaatgtcacctgatgttca

SEQ ID NO: 3655 - DNA, 11027 bp, Homo sapiens
aggatttaaaccggatgaggagtgaattgctggtgcctgggtcacagcttattttaggtccccatgaatccaagatacctatacttttgattcagcagccaggaaaagtgactggtgaagatcgactaggctggggaagtggctgggatgtcctactcccaaagggctggggcatggctttctggattccatttgtaagttactttttgattctaacagttgcaatatttaaaatacattcctaataaatgctaagtactcaaaatgttccagactttatgtacaacttaggaggaattgagtggtgtatttctgcccttagagctatagtcctggatacaagatacttcatacatatagtccctggagccaggttctcattataagacctgtgctgacatatcgtcaattgttgaggtttttaaagtggcctgatattcgaatagtagtggcaacaaaaatgttgaggtatttgatttgaagaaatttgttataagtttaaaagcaaaggacttaacttttacagatggatagaatacttttttttttgtttttgaaatgttaactataaccatatactcctatttatcaactgcagctaaaaattttattagaatcgaatgtgtcttttttttcctggttatttcaaatattactttgaaggctgggtgtggtggctcactcctgtaatcccagcactttgggagaccgaggtgggcagatcacttgaggtcagaagtttgaggccagcctggccaacatggtgaaaccccatctctactaaaaatacaaaaactagctgggtgtggtggtgcatacctgtaatcccaactccttgggaggctgaggcataagaatcccttgaacctgggaggcggagtttcagtgagctgagatcataccactgcactctagcctgggcgacagagcgagactctgtctcaaaataaataaataaataaaataaataagtaaataaataaataaataaatattacttcgattctagagagtgtaaaaggcatgtgagacttttagattcatgccggtaattaatttttagcatgcctagtgcaagggacatccagttaatcattcaggagtaggaatatttaaaaataatcctacttaattttttactatgagatgctttcaagcatacaaaaaagaatagatgctgatatagtgaatgcctgtgtgccatttacccgccatccggcttaagaaatataacattacagatgcattgatgcaccctgtgtacctctctccagtttcatttccctccctccttttaaaataatcactccgctgatttcggtatttgctactaccatgcatatttttatagctttattaaagtatgtttgtatcccacaataaaataactatttagacttgacatgtttttaaagtatataccttactgtatatatgattttgcaacttgctgtattcacttggcattgagattcttttccatattggttaatgaagcatgacgaagctcgattttattcatttttactattgcatggtaatccattgtgtgtatttctatccattctccttttgaggggcgtttaggttgtttccattttcccccatataaacattaagcaattcactttaagttggtagactgacagtatctttttgacatttcttttagatttatcgaggtgtgagagtcggagggttgaaagagtctgcagtgcattctcagtataagaggtcgcctaatgtcccaggcgattttccagactgccctgccgggatgctgtttgcggaagagcaagctaagaatcttcttgaaaagtacaaaaggtaagaaactggcttctctaatttgataatgtattaaggaaaagagaagtgcctgcttatattggtatcccaaacattaggatggctttggtaatttcatagacttttcagtgagttcagcattactgagaaataattaagaagatattacttaagtgaggagattgtcttatatctatttggcttttgtaggcccattttggttataaacccttctgtttgttatttatttctatcaataatgatgtacacttaaacttggacatgagtctcagacacttgttaatagatttctactaccaacccgtgtctccctccaaaatggaaattgtgtttttaaaacttattatagaagtaatatatagttatcaaaatttaattaaactatgaaaatatataaaaagataaattggtatagtcctgccacccagagagataagtactgtttgtttgtttgttttttgagatggtggtcttgctctgttgcccaggctgtagttcagtggcgtgatcttggctcactgaaacctctgcctcctgggctcaagcgattctttcacctcacccgtgtagctgagagtaaaggcatgtgccattgtgcctggctaacttctgtattttctgtagagacggggtttcaccatgttgcccaggctggtctcgataccaattttccatagatccaccggccttggcctcccaaagtgccaggattataggtgtgagccactgtgcctggccaagcactgtttttatatcttagtacctatccatttagacttttcttttttcattggaagtgtggccgatgagggtcatgatttcctttatattgcaaagtatattctaacattgggaatttgttgccccctaaattgtaggctcccggaagcacagaagctgtctctctttattgtggcatttgcagtgtctagccagtgcctggtgcacagtaggtcttaataacctttatttgttgtctgatgaatgactggttgaatattgtagttccttgatggtgagcttcatgagggcagaattgtgttttcttgttcattgctgcaaccataactatagagacaggcagtctgcctggcttgcttttttttttttttttttttgaggcaggatctcactctgtcacccaggctggagtacagtggcgtgatcatggctgaccacagcctccacctcccggacccaggtgatcctcccacctcagcctcctgagtagctgggactataggcacctgccaccatgcctggctaatttttgtagagatgaggttttgccatgttgcccagggtgttcttgaattcctgggctcaagtgatccacctcctttggcctcccaaagtgctagggttacaggtgtgagccaccctgcctggcctgtgcctgcgtttcaaactatttgctgagtggtggatgaatgagtgactagtgatgtattcctggattgctaccttaccagctctttgagggcagcaatcacatgttatacatccttgtgcctcccatagtatgtagttgagaggcttctatgtgtttgttaaataatagttaaaaataatacttatttcttactcttcagagctttttatgcatgcaaattttccatagatatacatatttttttaaagaatggtattacatacattattttgaaacctgtctttttcgtttaacaatatggtatgtatggttttaccatatcaaaaaatatgactctaaaccaagtgttgacaaacttttttggtagagggccagatgataaatatttttgactttgtggagccctcggtctccatggcaactactcgactctgccactgtggctccaaagcagctgcagatgacacgtaagagaacgagcacggctgtgttccaatcgtgctttatatatggaccctcggatttgaatttcatataattttcatgtgtcgtgaaatattattcttttgctttttcaaccatttaaaaacgtagaaaccattcttagctcatgggtcatacaaaaacagacagcaggccacatttggcttgtgagtcagcctgccagctttgttcaaaatgtcactttgaatgctcacatgcaattgcagtgtggatgtcctgtaatttatcagtggcttttgaggttatttctgactttttgctgtgtgtttctgtgaacatcttcctgtatgcatctttatatatttgtctcatttattccttcatttaacatacatttctttagagcctactgtgtgtcaaacaccattgtaggcggtggggtgacagcagggacaaggcagacaagtctgtctctgccttcatggagcttatattcttcttttattttttgagacggtctcgctctgtcacccaggctggagtgcagtggtgcgatcatagcttactgcagcctccaactcgtgggctcaagcaatcctcccatctcagcttcctgagtagctgggactgtaggtgtgcaccacaactcctggctaatttttaaattttttgtagagacagcgtctcgctttgttgcccaggctggtcttgaactcctggcctcaagcagtcctcccatcccagcctcccaaaatgctgggattacaggaatgagccactatacctggccacgtagcttatgttcttgatggaggcacaagtttctaggctggttgggggtacccaggagaggggagggaagctaaaatgtaagagcgaagtccttggacaaggaagaagggggggattcagggcacacgtggaggaggcagcatctattgggattgagttcagttcttctgaatataagactgtgagactgccactgatacagtttaatctgcttttatttctttggctatcttccaactagatttacaaacagttctgactctttttttttttttttttttttttgagacagagtcttgctctgttgccaggctggagtgcagtggcgtgatctcggctcattgcaacctccacctcccaggttcaagcgattcttttgcctcagccttccgagtagctaggattacaggtgcccaccaccatgcccagctaatttttgtatttttagtagaaatcaggtttcaccatgttggccaggatggtcttgatcttttgaccttgtgatctgcctgtctcggcctcccaaagtgctgggattagaggtgtgagtcaccgtgcccggccctggctcttaatcctattttccaaaccactttctttctgtaattcttaagttggctagttctccttcctcagaaaaattaatataaggctgttagcctgccactgacatctgaacatggatttatttagctaggttagattctgcagtggggggattaagtagcacactcctgattgtgactgtcttcatgaaaaaagaggcacagctatcagccagcagtaagaaggggagagaggctgttggagatttgaggagagaggaattgtaagcagtttctgggagagtggaagacggaattgagaggagaaacatgggatctgtaagatgtagagggcacctacttgagatttgtgtttataaaggaagaccgttaagaaccatcatgagttcttcctccgctgtgctctgccactcgggctggcatggggtcattggagagttggctgcgcccaggtcagctttccagtggagggagtgggggtgtttgtaggggagggacggtggtgtgagccatctaggctgatgaagagcgaggcagctgctgcgagccgcagggaggtgctagtgtaaatgggtggttggggcattgttgtgggagggtaagtgggtggaaaacaggaggcatggctctgagagcaggatactgacatcgcagtttgaagctggagcaggtgttggcagtgaccacacctaaggtatgagcagggagtgggtgcttgaggtggggtgaagtaagacatgcgaagtgagggtgggaaggtgactggtgggttattggaaggatgatttaggcagatgctgaagccactgggagtgacaagagtcatagtggtgcaggggaaggcagcatgaccgtcaagatcattaattgcagccttgtttggaggaacaaaagcttaaagacaatcaaaatgtcctttaatagaggactgtctaaatcaattagggcatattcattcagtagagtaagatacaagatacacagcctattaaaaagaaagaatgagggagctttcagtactggtataaagtaatcaagatattttgttaaatgaaaaaagtgaagttaagcaaaaagtactgtacctagtatgctgctatttgtataaaaataaataaaaagaaagaaatatgtaatatctgcttgtgtgtacataagatgtctctggaaggctatgtaagaaactgataatgatatttattacctttgtggaggatagctgggtcactagaggtcaagagtaagacagaaacttcatgtagccttgagcttagaacctcgtaagtgtacaggaaaatcgtggcacaactctaggggcaccagttccttgtagctttcaggaatggatcccctggtgtggttcagtggccacatggggctacattgtttattgaagaccaaagaaaacaaaaaagcttggccagtagaattggttattattattattttattttttattttttggagatggagtttcgcttttgtcaggatagagtgcagtggcatgatcttggctcactgcaacctctgcctcctgggttcaagcgattcttctgcctcagcctccctagtatctgggattacaggcatgtgccaccacacccagctaatttttttgtatttttagtagagacagggtttcaccatgttggccaggctggtctcgaactcctgacgtgacgtgatccatccgcctgggcctcccaaagtgctgggattacaagcatgagccaccatgcctggcctattattattattttctgagacggagtctcactctgttgcccaggctggagtgcaatggtgtgatctcagctcactgcaacctctgcctcctgggtttaagtgattcgtctgcctcagcctcccagtagttgggattataggcaccctccaccatgcccggctaatttttgtatttttagtagagctttcaccatgttggccaggctggtctcgaactcctgacctcaggtgatcgcctgccttggcctcctaaagtgctgggattacaggcatgagccactgagcccagcctattattctttatcatatgtttcttggaaagcttttgtgtgtgtgtgtgtgtgtgtgtgtgtgtgtgtgtgtgtgtgtgttttaaaatagagatgcattataatggttataattattttagttttccaatcctaaattgttcaacattggttctcctgtatgtttttctttagacgccctcctgcaaaacggcccaactacgttaagcttggcactctggcacctttctgctgtccctgggagcagttaactcaagactgggagtcaagagtccaggcttacgaagaaccttctgtagcttcatctccaaatggtaaggagagtgacctaagaagatctgaggtgccttgtgctcccatgcctaaaaaaactcatcagccatctgatgaagtgggcacatccatagagcaccccagggaggcagaggaggtaatggatgcagggtgtcaagaatcggcagggcctgagaggatcacagaccaggaggccagtgaaaaccatgttgctgccacagggagtcacctctgcgttctcaggtaagtgtcggtgacttctgggtacattttggattatttattttaatattgaagaggctacaggatgtaagcgttatcactgtttgtttatgcaaaatccaagtgaatttataggctttctggaagggaaagccagtcttttatatttcatagagggctcagggaaacagcttaataatatttgatgtaaggcatgatgctaattgatgaaatgatttacaatattgtcatcaatagatccaagccaaggcagttttttttctgacatattttatgcagtttgagcaaggattctttgctttaaattaccaaattagatttcttctagttccttttgaattatatggatttgtgttagagcagcaacccattagatgtaatatagtcctagccagagaggctaccggatacactatgttctcctctcagtattggtgtgggccaggttctgctcatcagtgaccctgcattctgtgctttgctctgattttttttttttttttttttgagatggagtcttgctctgtcacccaggcgggagtgcagaggtgtgatcttggctcactgcaacctcggcctcctgggttcaagcgattctcctgcctcagcctcccaagtagctgggactacaggtacatgccaccacgcctggctaattttcaccatgttggccaggctggtctcgaactcctgacctcaggtgacccgcccacctcagcctcccaaagtgctaggattacaggtgtgagccactgcgcccggcctgtgctttgatttttaaaaagtgcttatccctctagccttgtgcttacttttccgtatagtagcctcataatttcctatcattctttcttactttacatgtaacagtcccttacagttcctttactcattgaaatcttagtggctctttattttcaccctcactgtgattacaatcctagattctatctcactgtcttgttttccctgccttcaacttcttaaatctttagtccctgagtttcagaatggcaaacacataaaaagaaaaatataagtactaaaatgtactacagtgtatttctaatttttaaaaaattgtagttttgattcttatatagtataaaagaatcaaattaattctagcagtgtctaatcttctgattgcatatttttttctggaacaaaatatcctcaaacgtatgtctccaacttcatgtaggagtagaaaattactgaagcaactgtcagcctggtgtgggcccagttctgaggatagtcggggaggccggcgagctcccggcagaggccagcaaggattgaccagagaggcttgcctgtccatcttgggccacttccccagggccctggtttgggtcagcctgtccctgctcagcaagggcagccccgagcctcacaccatgatctgtgtcccagccaaggaggacttcctccagctccatgaggactggcattactgtgggccccaggaatccaaacacagtgacccattcaggagcaagatcctgaaacagaaagagaagaagaaaagggagaagaggcagaagccaggacgtgcctcttctgatggcccggcgggggaagagcccgtggctgggcaggaagctctgactctagggctgtggtcaggccctctgccgcgtgtgacgttgcactgctccagaactctcctaggctttgtgactcagggagatttttccatggctgttggctgtggagaagccctggggtttgttagcttgacaggcttgctggatatgctgtccagccagcctgcagcgcagaggggcttagtgctactgaggcctcccgcctctctgcagtatcgatttgcgaggattgctattgaggtgtgaatgcgtgcttgtatcccagcagggcatagataatacgttattattgtctgccaagttctacatgtggagaatctgcttctgctttaaaatatcatgtgaaactccctggaaacaagaataaaaaattatgtattatgcagatgatgaaatgtttacatcattccagtaatgtcattgattttcatctttccctgtccttgctgtaatacttttaaattatttggccaaaagctttgtattatgatctcttggtctgtgtagttgtggctgaaaataatgagaagctctacgagttatcatcccctttttttgttagaaacaaagggcttgtcaggtctatttgaaaaacctcatagtcatgtgataagcaacaatagatgtttaatgatttcactgttatagcagaagacaagagaagacgcttggcctctgtacatgaaatatgggctcctgatggacctcattcaattctgtactgtgatttccatgccgaacaactcaagccttaaagagagaaatcatggacaactgatttctgcctgttttcaggcaggcacagtttatggcgtcagtgctaggctggaattagaaagtgggggtctatgacgtggacttcctgactctttgatctctttgttgttgaccaacacttgatcctactagttacttaatttttttaagtaaaaaattattattattttgtttctgcaaagattttctcaaagccatagaggagcatttctcagaatatgttctatgatatgtgtcacctaaaaaagtaagagattccaaggtcaggttgatatggaaactctaggttaaataaagttaagcatttctttatgaaagaacttctggaaacttccatgtgataatgtgcattgcggatctctaggaaggaaatgatagtgtatagtattttctaaatacttgtgattcctaaagttctcttacaaggagccctttgtaggaccagtgttcttagtagcgcgctttgggcagtgtggctgtgtagtgcatagctacctctgcaaggtgataactaagccggcaagctgcctttcaacactcatgcagtcacgttgtccacctgagattctcaacagggtataaaaggaaggtctcatcttgcctcacaggaagagtgggctcagtgtggcttttttccaactatggagaaactcagtgctcatctactttaagtttccacatatggcttgctcatagccttggtccttacctttcctgccataactttctagaagagcttaatgggattttttttctaaaaaatgtaaatatgcagttaggcattattttatgtaaatgcattgggtttttactgtagcatttggcactaaatggctttgggggtgatgaggtggggaaggatacagcaggtggtacagtagtcaggaagtacctgccaccaatgagatgtctgatgctttgcctcttaccatgcctctgaatgtctttggatccaacccagatgagactgaaaaaaaaaaaacagtgtaactaagtggcatctgtaaacagaataaatgaaaatgtcacctgatgttca

SEQ ID NO: 3656 - DNA, 99 bp, Homo sapiens
aggctgaggcaggagaattgcttgaacccgggaggcggaggttgcaatgagccgagatcgcaccattgcactccagcctgggtaacaagagcaaaactc

SEQ ID NO: 3657 - DNA, 32192 bp, Homo sapiens
gaacaaggtggcagatgtctgtgggatataaagcataacatttgctcattaactatcattattctggagattttaatagcttcctttctctggctcaattctgaacccaaagtagggagaggtaagactcctgctacctttagctgccactcagaattatgctccaagtctaacctctggggctggccaataaccactgaggcagtggcgtgaggttcagtgttgtgtaacaggagagagagactctgccttaacaaaagacttaatatttccacaacttcaaagaagtatgaaaaggaagaatacccaaaatacaggttatagatggtaaaggctctttttcagagcagtgcatgtagtagcaagacaagatgcatttagtaactttaaaaataaacatttcacatacttatctcaagaaaggctatcatgtttcattttttatatattataaatagcaaaaacagatttctaatcccacaaatgctaagatacttaaaatgctattataactcatgtgtatgaagaccacccagtggtgaaaatgatgtcttactaattccctcaacccagggacgaatggctctcatccccctgtccagtggcccctcatctgtgggaagaaattccatgggaaggagggaagcacaaggttaaaaagaaatatgcctactatacatacatatttacaataaacttcagtaaccagaatattaacaaaaatagcttcaagtagtccttgatttttttccatctatttaatactgatagtctgagaaaaggaagataaaagttagttagttagataggtcatattaaaaacctttttattttttggcagctttctgtaacacttacttacttattcatgcaatattgtatgtgaatgtttttggaaactaactaaacggtcacattatttgtttgtttgtttgagtctgagtctgtggtgggaatccaccagcagatgaacaggctcatatgcggttttcggtttaatctatacaaagagaaaagcctgaatggcttaggatgaaaccttcataagtttagggatcaccatgtctctgggaaactaaaaaataatgtagaagaatctgatcctaggaccaagaaacatgagaacagtatggctactgacacttcagcccatgcaatgtatttggcaggaactaaacaggagttaaaccagcactgattactatgacatcaaacatcatcaaaaaaaataggtattctcttcttcactgtataacaagatatctgagacacgctctgatggcttaatggaaacaatcacggtttttttttgttttttttttttgtttttgctttccccagaatataacatggagtgttttttcagaaatcttaaaatagagggattaggctttttgtttgtaagtaagtttttggaaaaaaattatattctaccctagctcctaactatcccaaaataaacccaaaggcttttgctttcacggttaagaaagatttatacgttttcttcaaatgtcagaaatgagagggtccctcaggacagcaatatcccccctagttcaacacccacctttgggaagggaaaagagggtgggggagaggcaactacaactgacccaaatccccaggccctaggtggctttgtatagtaaaaatctcaattcaaatacaacagccaaggcacagctggcaccatccccagcaggctttctgcttctgcaggaggcccaggaattcagcacatacagtcttagccatatgcttagaaaagaggcaggaccacaattaggattgactattgtggacgaggtgatgaaacgcagccccaaaggtgagatttgtttaccactctgtagccacggagggacacacatctgccggttcagaccataaattcattatttccaaagagtgctagctgttggttggaggtgcagtctgggtccacagtttttctgcggccagacatgactgtcccctctggggtctctttggttttctgaggtgagtttttcacattctttaatttttgtttgcccttttccgggttgaaggttcctctgctgatgaactgaggcttgtcttccaggaatttggtctggcccaatggtccttccattcccagggcctcattacctgaggcagctcggtagaatggagatttggaataaatctgaaatagttttctggtcccatgagatgatgccgtgttagacagacataaagaggagaccgaagagtccacgacatctaaagagtcttgctgctttttaagttgctttcgcaacttgctggaaggttcagacttgccagctgtcttcagggagctaagggctaagcttctttctaatgcaaaaaagagaccaaagatgtaaatgacagtgccctctaaagcaaatcatcatataatgaatagatgccactgttcacacatgaaattgggtgggataagattcagagggtccaggatgacttactatgggcacagtcacagtaagagctcaccatccatttctctatgtagcatttccgaatcatctccaaggaaatctggtgtttgactatgccatcagcggaggcctagaacagtcactatcatttcaaaaactgccaggatatgcaggtaagtcctacatctccctgagacatgccacccagttaaacacctcctttgtatatgtatatagtcccacctcacagtggggcacaatgcctgccaccctcagaaaatgggttatgggtcagtaagacaacatatattgtgattattggcttttctctgtggtaagtacaggataaaacattaaattaccaaaaaacaaaacaaaacaaaacaaaaaacaaaaaactcaatcacgttgaagagttggtttgataaacaatgtatatggaagctttacaaagacaacaggaaaaaaaagaccttccgtggaagtcaggaatctaagtagcaaagacaattatatttcttatccccttatatttcttatccccatccaggtcactacctgtatgccaaacgatgaaggctaaaattatatggataaaaggacaaaattcctcaagactttgttattgctgatgtacagtcagtaaattcttaaaagactttgtcttagttttggaatctttattcctcctttgcaaaacaaatctggagtctttggtctaccatgttcacttacctgatttctcagagatagcatattcagactccatattcaaattctctgagctatcagcagtcccaatggaggcctcagactcaagggtttcatcatcagaggcacggggttccagtacaagcatctcaaatgttagctcctccctgtaagacacaatcaagaaaccattagcatttgataggaagtggaaggaagataacagaaaaaaagatcctccatggaagtcaggaatctaagaagcaaagagagtccatttttactgtccccatccaggtggtgatgaggacctgtatgccaaatatggtgaaggctaaaactatatggactaaaggacaaaatgacagatagccaatctaggaccaataataggggtaagggtagggtgaagaaagatgtagtggtgagatctttcagtaaaatgaactctggactgataagcaggagatcagggctctaaccttgttcataatatccataatgcatcaggaaagtacctttctcttctggacctcagcttcctaccacaaaacaaagagattaaactagataacctctaagattccttccagctcttaaactattttccatgaagcttactaactggctatagacgataccctctatcttcaccacagagacctctagacgaagaaaaacactgattgatcttttctgtcctttgaagcttatgccatcttcagttgtcgtattctctagtctcccttcttcatcacggtcacccagctacctctcagtaatgccccacattctgtgaggtctttggtactcagatcctaatcttgctttttcactaatgcctgacatcacctgatctattcaattaatatctttgtaaaaactcatctgaatattctaacactgaagttcctttatgtctgcaacttctaacaatattctcctctactttatctaagctactttctccaatgcacagatcctggagcttgtcattactctgaatccaacactccaccctgttcacaacctccttatccttccaattcttactcaccttctaatcaagtctcttccctaacagagccccttacctttacttcccctttacctggcttgagatccatgaacaatcatttcaagaacagtatcaccagcattacaattgtctgaggccatgtgcattctgagactctgctcgttcttctttctttttctagagactctccccttccttgaaaattcctattaatccttcaagactgccaataccatctgcatcaaagccaaactgggtcttcttttcagatcactcttctagcaaatagcccctggtcaatgtacatcatctttgccttatcatgttttttacagctgagccccagctgcttttttagctggcctatattccagaatcaatcatgagagaccaagaaagtattttaacagtcttatatccccttataaaccaaactcaagacctgggatcctggaactcaggaataaagatcccattaagacttcctaagagtcatcaatgtcgaccagaactattacacagcacctgtagggagaaccatggcacgttcatattatccccaaggcatactgtcacccaatccctgcaacagtgatgaatggaggtaaaagagcttctcatttgtctctctcctaaattgcaaccaatttccctatctagtatcctagcaccctctagggctatagccttactatgaccatctagttgctgttcccatggtcatatggatctttggctaataaccttccttcatggatttgtgaataatgcccattcttgaaagggactttggcttagcctaagaattccttctcttctttgcaaaataaatctgttcatggaggctggtctccgacctgttaggactccagtacctcatcttggctccccactgttactgctagatgaatcgtgactaagactgacatgccctgtggatactgtgtcctcctcccagtcagcctctacagaccatcactgtagcagcctcaggtttcccagctcatggaactggcttcccagagggaacaactctcacactgttacctgagtatagacaacacgtctttgtcatctcaacatctcctgtatcatctgacacagtgtttaacacacaggagataataaataagaaaaaataaagaaacgatagaaggaaggaaacaaaaacagactataactgtctctccccttcctcctggatactcacttctccttctgtaggttctcaatctgctcagtcagtactctctcctcctgctgcatagctgcttgctgctgttctgtgatgtcagtctccatggctgcctcactagtcaaggtctcctctgagacatcagacacagaaggcaaccgaactacaacaggagacgatggacctggatagtttcctcgacgaatacgcccctttccctgcagagaaaaattcatgttagaaagtaaattgagtgactgcatcagttttacattgctcttttaggataacaagtgtatttccatcacaccaggtgaatgataagaataaatggaaacactctgcgaggcctaggatatttagtgagacatattcatacaacacatttaagttaaaatatttcttgcaggagtactggaaaacggatactttggtaggtgggagtgtaagaacccattgtgtactgagatgagtttcttcttttaatataagctgcatccattccaaacaaaatagccacatctgggtatttatttttaaattaattaaaattgaactaacatttcagttctgcagtcacactagccacatttcaagtgctcaatagccacaagtagcttgtgacccccacactgactggtacagatctacatttcctaccatcatagtaagttctgatggataacagtgctctataactgtagccttggaatgcataatctctctaggaagaccatagaagtatgttctaaaactcagttttgaaaaacaaaaacaaaatgtagtcatttatagaacacagggtgctagtgagatatattttcttaggaaacttctatccttgagatcagagtgtgaaaatctcattgctgcttcttcctttttttttttttttttttttttttaaacattggttactttatatatgactttcttctggtagtggcaaactaaactttttaggttaatctcctgctaagaaacataaaaactcaacatatgctagaaggcactgaagagctaacaagatagattaaggagacactagtccagcatttagtgctgatctaaatgtcagaagtggctgtgactctaaacagagcttttgacatgctacagcagaggacggcaaactatagcccgtgtggcaaatctagccttgcacatattttgtaaatacaggttcactggaatacatttatctcattaatttattgtttattgctgcttttgcagaacaatggcagagttgattgttgagacagagattggcctacaaagactaaaatatttattctctagtcctttacagaaaaagtctgccatcaccttgggatagagaataaaagttggagccagacccactcaatggtgtgggttgctgcctggcaaaacctccgtgcctgacactgggatccccaaggtttgtttcttagacataagagtaaactgaaattataaaagtccttgcagatactgtagtctagcttcaagtcatctgaatggtccagaaaattctaatccctaaaaatgaattaatctcagattgctaatactttaggaccaggcagaaaaaaatgaaaacattcttggaagaaagtaacattatctaggcctcaaaatattttaaaaatagtttttcaaatactctgacaaataatcaaaggtaacaggcacaaaaggagacaggacaatgtaaatgaaaactagtaaaaatgacagaaaacagaaaccctaaaagactccagatattgtggctatcagatttaaaataaccatgctgaaggagacaggaagacatagctgaagtagtggactggaaattaggtcaaaagaaaaatcctgaaccaagcaggaagaaacaaaagaatggaaaaattcacaaaagaaagtaaaagaatggctgggcaccgtggctcatgcctgtaatcccagcacttcgggaggctgaggcaggcagatcacctgaggtcaggagttcaagaccagcctggccaatatgaagaaaccccatttccactgaaaatacaaaaattagctcggtgtggtggcatgcgcctgtagtcccagtactcaggatgctgaggtaagagcattgcttgaactcgagaggcagaggttgcagtgagccaagattacgccactgcactccagcctgggcaaatatcaggacaagagagagatcctatagaataaatattgaagagatcatggcagagaattttttaaaagcagttaaagatattaacctaggaatttaagaaagcctacaacccctaagaaagaaataaaaagaagtctatacctagacaaactactgttaaaaactaaaggcctaaggcaaaaaaaagacttaaaagcgttacaaaaagcaaattccttgcaaaaaaggaataactattagattcaaagtttatttctcaacagaaataatggaatgcagaaaacaatggaatattttcatggtgatgaaaaagtaactgccaagcttgattgttatatacagaaaataattttcaggaatgaaggtgaaataaagacatttcagacagactaagaggagaatctcacaccagcagacctgcactaaaggaaatattgaaggaaagattgaaaatgtctcgaagaaaagttagaggtgtgagaaataatgaaaggcaatgaaacgtgagtatgtttaaatagtgactgcataaaacataatagcgatgtgttgaatttaaaacatacagataattaagatacacaacaacaagaggaacaaaatcatatcacagtaaggcatattaaaacacctgtattatctgggaaaaagataaaactactagttagcaaatactgatagatcacagatctgttttcaccatttggttaatgactaaaataatagtaaaagagtaaaacttccaaacaaaagaaaaaatggaataaaaaagtagtaaaaaaatgcaagaaagagcaaaaaaggcaaggaagaaaagaaaaaggaacatatatcaggcaggacaaataaaaagcacataaaaaacagtagattttaagcccaaatatattggtgagtatattaaatataaatagatgaaatgctcctattaaaatttgaagattgttgggccatataaaaaaaaagaaaacctatctatatgatgtttataagagacatgtgaattcagaaaggctgagagtaaagaaatgggaaaaaaaagacataccatgcaaataccaaaataaagctagtacagctatattaactgtaaacaaagtaaactttaagaagtattacctgtgataaagagggatacctcacaatgacaaaggttcatattatgaagaataacatttccaaatatgtatgtacctaagaaattgcttcaaaaaatttaaagtaaaatattgacaaaactatttttaaaaaatagactataatcagtactgagagaacaagtatgcacacgcaatcagaaatgatgtaaaactgaacttgatataagcaatctaacagacatatacagacttcagtatctaactagagaatactcattttaaagcgcacacagcaagacaacaaaattccaagggttgaaataatttatctgaccgttaaagtaatttaaaacaagttttctaataatgtagttacaaagagaaaattaaaaattcttgtatactcagaaattaagaaatagactttaaaacaaaccatggtcaaagaggaaatcacaatggaaattagaaaatattttgaatgaaacaatataaaaacccatgtaagctctgtctactttaaagttacagccttaaatacatacattagaaaagaattaattaattaaagaattaattaattaaggatgtaagactctatttcaggaaactaaagaacaacataataaattccccctgcaacaaaagcaataaagaaaagagcaaacaaacattagaataaagacaatcaaagccaaatgtagctctttgaagaggctaataaaatttttaaaaccctagcaagactaaaagaagtcacaaataaccaaaggttgtaatgaaaaaggggatatcactacaaatcctgtagacccaaagaggataagagactactaaaaacaacttcatgtcaataaatataaaattttagacaaagtggagaaatttctatgaaaatctaattaataccatcaatgaagaaattaggaatgtgaataatattaaagaaattgaatccagagtcaaaatctttccaaaaacaaaactctaggcctagatttcagtggcaaagaagaagaaataacaaattcttccacagaattaaaaaagaaactattccctaacttgtctttagaggcaggcgttaagtttgataacaaaacacaacaaatacattaaaaagaaggattattgccaggtgcagtagtgcatgcccacaatcccagaactttgggaggctgaggcaggtggatcgcttgagctcaggagtttgagaccagccttggcaacatggcaaaaccccttctctaaaaaaaaaaaaatacaaaaattagccaggtgtggtggcacgtgcctgtagttccacctacatgaagcactgaggcgggagcccaggaggttgaggctgcagtgagccaagatcatgccactgcactgcagcctgggtgataacagtgagagcctgtctcaaaacaaacaaacaaacaaaaacaaaaaaggattattatgggttaactttactcataaacacatgcaaaaatcctaaacaatatcctaactacaacggaatcaagtaatatagaaaatgtaatataaaaattttaaatatatgaaaagttggatttattgtagtagtatgatactactacatacacataatataatgatactactacattataatgtagtagtctaatgtagtccattagaaatggactcagtgtagtgtgtcatatcaatgcaataaaaaagtctgataaaacctcaatacatgcagtaaaggcatttcataaaattcaacattctgtcacaataacaactcttagaaaacctggaatggaaggacacatgcttaatctcataaagtacctacaaaaattctatagcaaacatcacacttggtggtaaaaggttgaaagcttttcctttggggctgggaacatgccagtaatgatcactatcaccacttccattcaacactatactggaggttctaacttacataagaaaaagaaagaaaaggtataaggattacaaaagagcaaatgaaactatcattattcatgaatgatatgactgtacaggtagaaaatccaaaggagtccacagaaaacttattagaataagtgaattcagcaaagtcactgaatacaagatgaaaaataccaaaatcaattgtatttttatacaataagcaacagaaaataaaaattttaaaataatacctatgattgcatttaaatattaaatacctagtagtaattcaaactaaagatgtgtaaaatctcaacgtacaaaactataaaacacttttgagagtagctaatgatctacatgaatgaagagatatatcatgttcacagatgggaaaaatcagtatcgtaaaaatgtcagttctccagaaggcaatctatagatccaatgcaatcccaataaaaatcccaagagaattttttgaggctgatttcataatttatatggcatataaagagccaagaatagtcaaaacaccactgaagaaggtaggatgacttattctaccagttatttttagaaagctagggtaaataaaatagtggtggtgttggtacaaagatagtcaaaacagagcacctagaaacagacccacacataagaaggctcccaatttataataaaaggggaactgcagggcattgtggaaaggaaaaattttcttaaacatgactttaaaaggtattcatcctaaagggaaagactgattaacaacattaaaatccagaacctgtgttcatcaaaaaagaaaggaaaaaagcaaaccatagaatggaagaaaatttgcaacaaaagtaacaataaaggatttgtatctggaattcataaagaatccctacagaacatcagaaaaagacagacaatccaattagaaaaacaggcaagagctttgaacaggctcctcacaaaagaggatacagaaatggccaacatgtatatatacacacacattatacatgttagagtcacaacaaaaaatacaatttttaaaaataacacacccatcagaatagctaaaattaaggaatctggcaaaagaagtgctggaaggaggtggagcaattgggaattcctacacattgctaacatattaacaaccattttggaagaaagtttggcattatctactaaagctgaagacacatatatcctgtgaccctgcaaatccactcctgtatatttctccaacaaaaatacatgtatgagtccattaaaatcataattccccaaaacacaacccaaatgtccatcaacagtagactaaattgtggtataatgcatacactgataaactatacagttatgaaaatgagctacaacaaaatatgaataagtcttacacacataaggttgactgaaatgaatcagagacaaaataatacatcttagatgataccatttatataaagctcaaagttaggtaaagcaaaactacagtgctcagggatacatactttggtagcaaacaaaaaataaagtaagtcattaatgtaaaaatcaggttactgcttacctttggaggagaaagaggattgtgactagaaagggaaagaggagagcttctggggatgctggcaatgtcctatttcttgagctggggtggtatgtggatgttcatttataataattccttaaactgaatatgtttctgtgttttgtatgtgttttgttgttatgtatgtgttgtattttgcaataaaaaagatatttaagagttccttttcaaagttagctatttatggaaatatacgaatagcctttgaaaattatgtgactttaaactgacaaatttctgagttgagtttggcaagaaagaaaggaaaagtgctgtctcaaaaatagaaatccatgatctagggcaggtgatagggtaaaggctggagggtagttctaagggcattcaggctaactcctccaaaactaaaacacttaatgggataaaatcaggaggattacaatattgctattccacttttagttctaaaatcaacaaggaaaaaacatgttaagaaaaacaagctaaaaacagaagatcactctgcaaatttaacaaaaaatgacaaagtattctttatgttataaattccaggacatcatccagttccatttgacattgactatttctagccaaatgaataaataatatgatttaaaagcctcaaggagcttgaaaatctgagtttattcctagtgtccacattccagtattcaataaaagagctgccttttttcagtgttcataccatcagctggccaccggagtatttcaccatgagttagctgcaaatcttttaatatggctaaagaaaatcaaacaagctcaacagatctgatctcttttaagaagcattaaacaaaacaaagaaaaatggaaactcctacagcctagaattatcttaaaaagattaaagtaatttttaaaaagttgattacatggagcttttagaaacatgagaaaatactaatattgtgttaaaaacagtacataaggttgtataccattggttttaaaaatgagtaatacaaaatttgcaaatacactaaattattaacagtagtttcctgactggaataatatccttcactttcccactttcctaaaataagcatgaatttacttttttcaaactggaattttttcttttggatccatgttcactgtatattctcttgtagtgtttttttccataattgtttttctaccaccagtgtgtcacagagtgaaaaaggcaaatattttcttgacagtatcataaaaataaatttgaccttgtagacctccctgaaaaggatctgtagataacactgagaagtggtttatagtatcctttgttcatttttcactgggtagctaatctttctatttacttataggagcttctctttattaaggaaaattagactttgaaataggaattgaaaatattttcttatggtacgtcacttcccttttactttccttatggtcatttttgtcacacaataatacctggtttttgttgctgaacctttcaacttttttctttaatggtcttatataatagcaaagccctgtccaagattatatttttccatcataatagggattgtattggttttgactgatcacagactacatgaataatttgtacccaactcttaatgcaagtactggaaaaaatataaagccatattgtcatcctttttctcagtaactattccagtgacttcctggcttaaactttgcaggcaaactgttcctaaaatgagaatatcaaatacaattatcttgaactgttgataagtagtaggtctcaagtcctactaaatcacaatttaatattatatacaatacccagatttccaatcctttatagcacattaacaggattatcagaaaaatctggactggactaccactaccaaagacatcacagataatatgcttttgacagagagccaagatcaggaagcagtttaagacattattaggcttatagagagctaactattctcagtttgtacagaaaaataaactagcactgaattcattcctttcaagtgggaggaagtggagttctcttcttaaaagctgtgttttcagagctctaaaaaggtacacttataaaataatttaaaaattcttctgaattgtacaatgagatactgggacccctgacttaataagagatctttaatcacacttaagcttctttctggcttgttttcagtttctgttttatgaagataaatgttttttggttaatctctttccatttgctccccttttccctttttatttgcacttttttcaccctaaagatgtatcctcttcagccaccttttatggcttggtttcaacttttgcatgaaaaggtttagctgataactttgctgatttccccttgtgctccttcccgattgccctttgagctgagttaaactacttggatattttggcagtattaaggtagagaggtagggtacttgagttctacaggatgcagggcagtgagaacctctgccaggatggagtgccagagctgtacttccagtacttttatgttttagtctttgatgtgaatcaggttttttttttctttctttctttttttaaagatacagggtcttactcttgctcagcctagagtgcagtggcacaatcatagctcactgcagccttgaactcctgggctcaagggatccttctacctcagtgtccccaattcgtcggactataggcatgtaccaccatgcccagctaactttttaaattttttgtagagatgatatctcgcattgttgccacggctggtctgaaactcctggcttcaagcaatcctcctgccttggccttccaaagtgctgggattataggcatgaactactgtgcctggcctgaatcggctttttttttgtttcttttcttccctacatggatattcattttccccacatcatttagtgaatcccagacctttgaaatgccactcacattataatcctttatttttctcttttagaattttcctattctgcttctttattttcttatgaattttagtatcaacttgtaaagatccccaaagtattcttttgctgtttttgttgagacctcatttgtaagtagttatgaaactctttccttgtctgtgtaagaactgatctttggtcaaatgttctagctcaggacccctggaaacctgataaaggcaggatgcaaatgatgttattaggcaacatcacctctggcaaaaattaatctgattgataaatcgcatctggagaagtaatttataaatatcccataggaagtcatatatttccaattccctgaaagtggagtctgttgtaactggacataccccttgaggggaccctggaaacaatatctatggaatttcacaagaggttaattcctgtacaggcataaaacttctaaggcagaatagttctacatccattggatgtggagtcctttttccttgcacctgagttgtgacttagaagccaaagataactcattgatggttgtgtggactgctgcaagggctcccacacgaggatgatcttaggctctctgcaggcatgctatactcccagtcccatatcctcagtgattctgatgccaagtggagcccatggtagtcatatgagtctgaaagttgagcctaagaaaatatcctctttccctcctagtgggtattgaaacaatatatgaatagattaatttagaagaactgacaccattacaaaatttagcctttctttccaaatgtatttaagtcttcttttgtaatatttgaggttttaaggctttctttttttgttttttttgagacggagtcttgctctgtcgcccaggctggagtgcagtggcgcgatctaggctcactgcaagctctgcctctggggttcacgccattcttctgcctcagcctcctgagtagctgggactacaggcacctgccaccatgcccggctaatttttttgtattttttagtagagacagggtttcaccacgttagccaggatggtctcgacgtcctgacctcgtgatccgcccacctcggcctcccaaagtgctgcgattacaggcgtgagccgccgtgcccagccttaaggctttctttgtacaaatcttttacatttcttgttaagtgtgttctttggtatttgatgttgatgtttaaagtgtgtgtgtgtacaatatacaaatgggcatttttcttccatcatatcatccaagtgattgtttgcataagtaaaatttattaattgtactcagacaccttattgaattctcttatcatctttaagttccttcattgattttcttgagttttgcatgtatataatcataatggaaatggtgataattttatttctttattttatatctccaattctttttcttaattgctttatctagtaccttcaaatcaatgtcaaataatagtggggataatggatagcattgccttttctgattttaatcagaatgcttccagtgttcttccattaagcaagatgttggattttgggttcagatatattttttatcatgctaagaatgtaagatatccctgttttaataagaatgtttttaaaaagaatgctaatatatcaaatgcttttaaaatatctatgaggataatacgatttttctccacagatcaacaaacatggtgaattacattaacagctatcctaacatagagtcatccttgcattcctaggttaaaccctccttggtcaagatttatatttttatatttataggctattgaattctgcttgctgattcatttttattttattttaaatttttctttattttttatttttttgagatagggtctccctctgtcacccaggctggagtgcagtcatggctcactgcagccttgacttcctaggctcaggtgattttctcatctcagcctccctagtggctgggactataggtgctcgccaccaggggtagtttttttttttgtttttttttgtttttttttgttttttttgtagagacggggtttcaccatgttgcccaggctggtctcaaactcctgggctcaaggatccacatgccttggtctcccaaagtgccggtgatattttaacctaggatttttgaattaatattcatagatgaggcagtcctacatttatatatcaagtgctatctgtgtatgggggtgtgtgtataagaactctctttctctctatggagagaggtccataacaagcataattcttaatggttttacaaatattaactcatttagactgggcatggtggctcacacctgtaatcccaccactttgggaggccaaggagggcagatcacctgaggtcaggagttcaataccaacctggccaacaaggcaaaaccccatctctactaaaaataaatacaaaaattaaccaggcgtggtagtgcacacctgtagtcccagctactcgggaggctgaggcatgagaatcgcttgaacccaggaggcagaggttgcagtgagccaagattgtgccactgcactccagcgtgggtgacagagcgagactctgtctcaattaaaaagcaaacaaaaaattaactcatttaatcctaagtttggtactattaaccaatttatagatgagaacactgaggcatggagattaaataacttgcccatatcacaactactagtaaactagagctaggatttacacccaaaagtctagtccagagtccatgctgtgctctgctgcttttaatatttctatatgtggctgggcacggtggctcacacttgtaatcccagcattttgggaggctgagacgggcagattatgaggtcaggagatcgagactatcctggctaacacggtgaaaccccgtctttaccaaaaatacaaaaaaatcagccgggcgtggtggcgggcacctgtagtcccagctacttgggaggctcagacaggagaatggcgtgaacccaggaggcggagcttgcagtgagctgagatagcaccactgcactccagcctgggtgacagagcgagactccacctcaaaaaaaaaaaaaaatttctatatgcaatttttattagcttttctttgtgtatgcatgtgtgtgtgtgtgtatggggcggggggtggtgaggatcaatgttagactcttttagttaaaaaaaagaccttttcccctctctgctctgagacagcttaaattatattgtaattatgtatttaaagagttggtacgttttctctgtgaaactatttatgtctgatgtttttatgagaggaagttcttagacaactctcctatctcttcttctttttaaattagtctgtttggccaggcatggtggctcatgcctgtaatcccagcactttgggaggccgaggtgggtggatcacttgaggtcaggagttcgagaccagcctggccaacatggtgaaaccccgtctctactaaaaatacaaaaattagccaggcacggtggcaggcacctataatctcagctacttggaaagctgaggcagaagaactgctggaaccggggaggcggaggttgcagtgagctgagatcatgccattgcactccagcccaggctgacaacagcaagactctgtctcaaaaataaagtaaataaataaataaatagattagtcttaggattcttttcagctactcttttgtttgtttttgtttaagacagggtctcactctgtcactcaggctggcgtgcagtggtgctatgttggctcactgcaacctctgcttctcaggctcaagcgatcctcccacctcagccttccaagtatctgggactataggcaaacaccactacatctgactaatttttttgtatttttggtagagatggggtttcaccgcattgcctaggctggtcttgaactcaagtgatccgcccgcctcggcctcccgaagttctgggagctaccactcccagcccctttttggctattcttattgagaaccttgaagacgacccaggaggaaattgtttttatggctaaaaaatagtagctaacatcagttcccattccctatcataaatataagatataaagcaccaaaatttacattaagtactaaactctgagactttgtgagtcctggctcactcttcaagaccccatagtactaatgtcttagagtttgcttcaaaacaaagcctattttggttttaacttaaggtttcccttctgcacaattatatatacaagtttatatgtaagctatatagctttttacagaattaaaccttgttgacttttaccaactggtagttctttctccatctgcttaatttaaactcatcccttaagagctagctcacatgtcacttctacagcctttccctgtgccaccaggcagaattaagtacttcttccttagtattctcaccatatttggcacacagtactgtctaatccatctctccctccttccttttgggacaggctttctaatacccacattcaatcacctaatcatatagatttgccatgctctgtctaaggaagtctatatatgattctatggtctattttttctaagaatgatattctgaaacagacagtcttaattatttaatttgggtgagaattctgtgagaccagtccattacaggcttctcagactgtaacaaaaatattgagagtcaaatgctctaatgtgggggatctgagtgatacctatttgagggaaataggataccctatttgagggaatcagttgaaactcactttttcattttctcctaagactttaagaagataacagtggaaacaaatagaagatactccagtgttagaatgaataaggcctatgaggagagctttgatttcttctgaaaattctgtaaggctcacgatagcgaaagaatgcaagaaggaatggcaaggcatgattgatgggcacaaagaaattaaatactataaatcgaagtaagcctaaacagtaaaagagactcatggtgataatgaaggaatgaattgcattgcctttagtaaacctgatgactatttagaaaaagacatatattaccctcatgcagaaagtcatgatactttatgaagacccaaagaaagtacacgttactagggtttgtctatgggttaaatgtgtgaggaggaggaactatgcattatctagacagaataataatataactagctaaaacacaaatctcagaatcctaatgaaattttactcaaaaatagcacttcagggcaagacggaagatcactgttgagtgccttttgttaagtcacaaaaataggaaggaactgaattatcagaccacttcctgaggagtttgctttcctgataaggagagatcctttatccaaggcttttttttgaaaagactggttgttttgtgtggtattataactaggtatccaagcttgttcaaaaatcatatcccaatgcctgcagttatggttcaccagataatcagggttagtaagcactttaaatacagctagtatctgtttgtaggtatttgtatcttgcatatgaaaaggaattattctcatcaaatatttctgtgaagtgcagtgagccggtagtattatatgtattatagtgcagtggttctcagagtgtagcccacagatccccagcaaagatgctggggtgtgatgatgtcctcaaaaccatttcacagggtctacaatgtcaaaattattttcataattatactaagatgctatttgccattttcacttgttgacatctgtactaattacatacaagcaattgtgggttcaactgctgtcaccgttacgtgaatcaaggtaatgataccaaatggttctagcagtcttcatattcttttgctaccacacatttagtttttaaaaagtcagtttcacttcatgtcattgaacaagaggtgtaaattaattttatttacttcttaactgttaaattaactattttcaactttctgtatgattaactggaaattacacatacagcaactctgtcacatactaatggttatctcaagaaagagtattagtgcaattctttgaattgcaagccaaattagctgctttattaatgaaacagtatttacaataattgacaaagtttgattattcttcttgagtacgtggtttgaaattatatgaagggaatctgttactgcaagtgaaacaaatggcgatatttgttgtcagtgagtaaatttcaagctttcaaacaaatatgagaattttggaaaacttgtatctgccctgtgagtttgacagcttcccatatggtgtgaatgccaacacccaggatttagccagaagatgtaaccatatcttgcaagggactatcagtgcctacagaaatgagatagaactgagttcactgtcaacagggtaaactggagctactacttatctttacttagcctactgacaatgagccagaatagcagtgttgaacaaccaagaaagtggactgccatctcaacaccaagatatcatacagaattctgcctcccctatcactcctcccagtctcaacatcaggggagaaagggtcaagaaagacgaagggcagaagtgtctgacaaacagaaattacccacctaccctccaaagttttaagttccagataaaggtctagtctgccctgggaggaagtgagaagagcactggattaaaactgactgaagttttaatatgaagagaactgactcttaaatactagaatgaaatgaatttttgaaaattatagaattggtttcaagatgctgttaaggtaactgatatctaatgggaaagggaagtttgacaggctggagttaagaggcagttatagacaaaaagaaaaactgacttgtattagcatcccaacaagttaagcctcctcaataaaatggttacaacacaggtggacagttttccacaaatattggtgttctcagccttccatccccccattcctttttttgtacaatcaatggaactgaagagggataccagcaatgagatcctggtatgagttctagcataccataatatttaagtctagaactagtccaccaatttggattagttcactcctatttgtagctctgtctgataaatgctaagtggataagaaccatatttctacatctgggaggacaccatcggagtcacagatatgaatggacaaataagcattactaatgataggagatgctgaaagtaatagtaagtatttcaaataataaagtggaggagattgctgggaacacagctcatagagcagaaattaatttgatatctcaatgcttttaactttcaccttttaatgattcaaccaaagaagaaacccaaaaggaggctcatctaacaaagaggaaaaaccagtgtattttaaatggatgctgttcaactacacaatacagaggaaggaaaatgaaggatctaaagaaagagattaagagaaaagcaagtgaaaggtaatcaaaaagtagaacctgacttggggccgaacatggagggtggacaggcatgaatgatagacagggcggaacaattcctggatgaacgagagacaataatgtagagtggctgtgacacattgcattattaatacataccgagactgaattgcgggtaatgttcatgaatctaactgcaattagtacaggtttctggattaggaaggacatgaaaaggaaagcagaaggttagaatgtacatgtcattgcctcattaaaagagaaggtttaatcttgcaatggactgaatatccatcttctgcagcactggaaaaaagcgcagcttatctatctgctttgaaaagtaggtttatagcaaaaggctcttcccttcctgcctggatagccaccactaaattgggcctctcagaactgagctcctgaaaattcatactacagaaatgtttcacttttaagtgggatttctgtttttaatttctggggaaaagatttagatagtatcccctatgatgagttttatttaatatctttactgcctgcaaaaagcccatgcttatgtttgtttttacagaagacccttcactaccttaatcaacagacctttgttaagcacttattctgtgccaggcagattaaataataaaggaagaaaaagaattattttagtgctaatttgcaaactgtgaagatatgggaggaagtactgctggacccctgaaagagtaagggcatgatgaagcctgcttctctttagagatttattgggaatctgaaatgcgtgctcattgtcacaattttattttacaactgagaggaagggtggcaaatgggcaataaataaaccttaatgcagcagttttccagttatcctgaaaactgacttcagggtaacatatatggataactccagttctcaatgaccactaatcaataaggctgaagctactgattagtggtcattgagaactggagttatatgttactggttgcaaaggaagatattaaaaagtgggcaaaccaaggaaataaattatcggttttacaaggactgtctcaaaacctaaccctaaactcaaagaaatactttttgattacagtagactcatagatggaattccatttccttaagaatcaaatgattccatttaaattcagttacaaatgattaagttctctacatcccaggggtcttggcaggaccaccaaaagtgacacgattaaaggcgggaacagacagtggaaggaagtggagaaaaaagttagaagaggattacgttttcatagaaaggacatgaaaagaaagcaaggcagattattaagacaccaacattttatctaaatacttgatttgaaaaattctgcacacttaatcacatagattctataatgtaactaaagagagccagcagattaaacatgaggaatccatagcaccttgagatttggtgacgttttacttgttttttataaaaaagattctgataataatccttgtatacaccacaaaagcacatttaaattcccaagacaactcccatttttccactattccatgtgttgcatcttaccattgatctacgaatcagtgacaacctggtctttgccttattctcagcaaattccaagctactgatatctttgagacgagccttgtatttattcatttgttccacaacaatcagttccacacaactgaaacagaaggaaagagaaaaaaactgttaagaggtgaagtaaataaagtatagcactcacagactgtttttgtggtagacagttgaaagatgaaggaaaaaattaacatcccttacttgataaactcagagacaaggtttagaatggtggttcacaactttggctgcactttagaagccatctaaagagcagttatggctgagcacagtggttcatgcctgtaatcccagcgctttgggaggccgaggcgggtggatcacctgaggtcaggagttcgagaccaacctggccaacatggtgaaaccctgtctctactaaaaatactaaatcagccaggcatggtggtgcacgcctataatctcagctacttgggaggctgaggcacgagaatcgcttaaacctgggaggtggaggttgcagtgagccaagatcatgccactgcactccagcctaggcgacaagagtaaaactccatctcaaaaaattaattaattaattaattaaaaataatacaaaataaagagcagttacaaatcccaatgcccaggctacacgctacaccaattaaatcagactctctggggatgggatccaaatattgatatattttttaaagttccttttgcagtcaagattgaggagagcaaaagaaaaccatgttagaaggaaagcagagcctcaagaaaaaagaccaaggtgaaatacaggaatactgaagtattaagaccaaaggattcagagccattaagaccacagttagactagattacaggaagatactaagtgtccataatttggtaaaatggaaatttaaaatctatttagaaactacaagcagtcctaaagaaaagccagattttaaaaataagatgctttaagacaaatgatgctcagttgaatccaggagtttgcatcctcagcataagaaaacccagcagtgtccaacaatcttcttaaaaacacctgaatttatgaacccattcactatgtttgatatctggatacagtgactacatagtcagaagtccctgaggtcttgcaaaggttatggtaactggccttacgtggtagtcttactgatgtcctgtacactttgtagtgggtcagtggtgtcagggcagcggagaatgcagggcgcaaacacaatggccaaagcattagcagacattcgattagtgtcttcctgcagagcaatcctaagaattaaaacaaaacaaaaaacaaatgagtaagggataaaaagggagcaccatagggaaataggcagaagagatgagcaaaagaagacagtatgacatgaactgcatagtactagaaggatatccattaagtttaagggtctgcagacttttcccaagttgttcctttgttcctttgtctctggaaaatgtattttcacttgttctttccttgaagcagtctaggtcagccgatagcttcccaagggaaatttgtgacctacctgctctaggccaagatcactagatgaacatgtccaaagaatgcagaatcggccaggcacggtggcccacacttgtaatccagcactttgggaggccaatgtgggcagattacttgtggtcaggagtttgagacaatcttggccaacatggcaaaaccttgtctctactaacaatacaaaaattagccaggtgtggtggcgcacacctgtaatcccagctatgtagggggctgaggcaggagaatcacttgaaccggggaggcggaggttgcagtgacctgagattgcgtcactgcactccggcctgggtgacagactgaaactgtgtctcaaaaaaaaaaaaaaaaaaaaaaaaaaaaaaaaagaatgcagagtagaggctttaaccaaaaataaagatggctttcttctcaactactgctgatatttacacacaggggaagagacactactcctgacgcctctttggtcaattcctgagaatgatctgaacccctcatatgaattaggtcatttcaatagattatatatcctttctagttcagctgttagaaaacaggctaaactacacactgccaccatgaggctgaagctgttacatggttcaaacaagggcagaaaagcaactgccatgcattccagctcagctgaatatttctgctccaaggtatcctaaccacctgtttgagacactgactttataaatagaagaaaaaataaatacctgtcagtcttccaaatggagaaattccttatctatttaaaataatccaagagaaactattaaaaatcgttcccttgcttcttaaagttacctgactagatgaaagatgaggcgttccagtgtattgagatgagttcgggagagttgatcaatcacagagtatacaccacggattgtctccttcctctcctgaaggcctaaaaacagtaagagcagaaactaagactaaatatccccccttatacagtgtatcttcctcccagacactatgaagcaaagaaggctggctacagagttttaggagtagttgtacctgtagggcaggagaagagcaactcacagtaactatttaactccttttgcttgagttctatattcataaacagtctccttagtttgaacctatatcacagtaatccttaataacagcaaggggatagagatgttctagtttttcagtcattgtgtagcagattgatttaccattaaagtcaacataatttatgaatcctcagggcctaaatacctctaggaaggcctttatcaatatcctacgcacttacagcactgagaaactaaactctgaaacctgttaagcttggcataaaacagccagctttacacatagttcttgcctagatttccaatttaaatgaacataagcctaatcttaaaacttatttttaatattttaatctgttttataaccccagtctttccatttctttgtaagaagcaaccaagtgtctcactcagaaaatttttaggacactaacgttttgatgagtctctaaaaagtcaacatttgaataggtgacagtatactagccgttttgtattcactgtcaaaagcttacctttgaatctataagaattaaaccactagaggatggcttgataatctatactcaagatggcatttctttcccaactataggccttctctctaacccaggaagcctatgcttacccatagctcgaagaaattcctcatagagttcaaaggtcatgagaggattgggcaaatctcgaagccattgtttgaatacacttgcaatgacgtgtatgttatagtcatctagatttacactctcagcatctatttagagacaagagttagattaacagagccaaaacatgcaaagagattcaaataattcactttagaaactatcatcattaaaggaaggcttcatgtttctttttttttttttttttttgagatggagtttcactcttgttggccaggctggagtgcaatggtgtgatctcagctcaccacaacctctgcctcccgagttcaagtgattctcctgcctcagcctccggagtagctgggattacgggcatgcgccgccacgcttagctaattttgtatttttagtagagacggggtttctccatgttggtcaggctggtctcgaactcccaacctcaggtgatccacctgccttggcctcccaaagtggagggattacaggcgtgagccaccatgcccggccggcttcatgtttcttagtcaaactgactaacctattttccacaatgtaattccatgctttggaactgtgcttctaactgtggtgaaagaatacgtcttgtgtatttgttttccaaacctgttgtggactgaaatgtgtaaaataaaagatcatggccaggagcagcggctcatgactgtaatcccagcactttgggagactgagacaggccgattacttgaggccaggagacagaaagcagcctggccaacgtggtgagacctgtctctactaaaaatataaaaattagctgggtgtggtggcacacgcctataatcccagctacttgggaggctgaggcagaattgcttgaacccaggagacggaggttgcagtgagccaaggtcacaccattgtactacagcctgggcaacagagcaagactgtctctgaatgaatgaatgaatgaatgaatgaatgaatgttttcgtgctgaagcactgttatactgctataaacgtctctacatgcttgctctcaatttctgtacttacctggttttggatttgtccacagaccacactttgagtaacaatggtttacatgacaaatgaaaaaacgcatacaggacactttctgaaagtaaggctaattttaagtcattcttagagataaaaggacagtgataactgagcttagaaaatgtaaaggaaacaccttcacccgtttcacttataaactccctaaggttatacagattagatgactggggaagattcaggatgattgattttcacttgtgctatttcaaggtatcagagacaaagtcagtaactgcctgtaaaccaaagtagaccaagtctcttgtagacggaacctcctgcctgagtcttaccagtcattgttattattttcatactcaattcatttctcattgatttgttcataagaaacagcattgaacacaggttcttgcccacacaaggacatgctttactctgtttagttcaaaaagatctattccttcccaacagtggtaaaatgtagaagttgagaatgaaaccagagtcagtcccctgcatgaattccagtactaaaactacagctctacaaagatacatgctcaactcactaattatcagtttgagtaactgtcatcagtgtaggcaggcaagaagatgatacacaggaaagagtaccccttggagtcagaataataaagagaaaggggaaatagattatgaattcagaagatctggggttaactccaatttggtcacttattggcgatcagtctttgggcaagatcttctgtaagcctcagttcctttttctgtaaatggggataataatatccctaattcataggattgttgtgaatattataaaaacattagtacagcaccttgcatcatcatcagcagctcattatttaatttccctataccttagtttttctctttgtcaatcagaggtatcacaatcttactaaattattacaaaaattaaatgagatctgtcccaagtgcaaattatatgctcaatatatgtctgctgagttgaccaaatgaaaccaaagactctttagaaagccaaaaaatgataacaaagcatcacagaaaagaatgcattcttctggctgctaagtaaaggattgacatgtaatgaaaactttaagagcatgaaaggaactatttaaataaaagtatttcattatgatttagagggcactatcttacctgtatctagaccctgccgaagctccttgattttattagtcgaaccagactttcgataaataccttctgtatacagtccatgcatttcaatgtagtttatgagcttttccactactaaaggaacagttcggtcttcactggtcaaacgggacagttcaaccccaaattgtcgagatgacagctctggatcatactaaatgaaagataatttttagtttccaaatgcattcaaacatcttgaaacatgtttaaccatttctttaccaggagctacttttttatttctctgaagttttatgagcatagttagaagagttgggagaaagggaattatgtttaagtaagtataaatgagatattagtttcaatccttttccaccagaatctccaaaagaaaataatggagtgaagaatgaaggcagtggcaaagggctacagcttctcctatcaaaaaattgcttcaaaagcaaaggtgggatttgggtgtggggaaaagggttggattttatatgcaaacagcttgaccacctaccagataccactagaaaatctactaatttgataagaattagagttgtcagcaagttcttaagcataagaatgctttgatgtttatataaactttacggaagtttaactgaaaaatgatttcataattaaaggcagaggtacacacagatcagcccatgactactgttacagctcttttgtatggacttgaatagcgtatctgatatcacactttatttattcatgcattcattcattcattcatttgagacagagtctcgctctgtcacccaggctggagtgcagtgatgcgatctcagctcactgcaacctccacctcccaggttcaagcgattctcgtgcctcagcctcccaagtagctgggactacaggcacatgacaccacgcccagctaatgtttgtagttttagtagagacggagtttcatcatgttggccaggctggtctcgagctcctgacctcaagtgatctgcccgccttggccttccaaagtgctgggattacaggcatgaaccactgtgtccagccaatattatactttattaacctataggttactttatatcctatgtgactgcaacagaacagcttacccttaagattatttgaagtaattcactgaaaagaaaaatggcaggtattatctctgagactgaaaattgttttgcaaatctgtctttccttctcctgtaccattgtccttccctaactatatattccattttctcctttaacctgcatccaaccagttgccaagtcaatcagttcatcctctttattgtttcttttctgttctaagtgtcatcaccccagctcaaaactatatcactaaccaattagactatttcaacactttcttggtgagttttccccatattcatatgtctccttttaatatattctgtagtatatataatctgttttattatcctcaaaaacctttagcagctaattagtatatagcaaactaaagtgcaaacattcttgagtctcatactcaagaacttacttgaactgattctaatttctactttccagccttacattcatacatttgtcatttatgtgttaggtaccaaggaaacaaaatcaaggccttctgcttaagactagtagtgttaggcccggcacagtggctcacacctgtaatcccagcattttgtgaggctgaggtgggtggatcacctaaggtcaggagttcaagaccagcctggccaacatggtgaaaccccatttctactaaaaatacaaaaattagccaggcatagtggcgggcacctgtaatcccagctactcaggaggctgaggcaggagaatcacctgaacacaggaggcagaggttgcagtgagccaagatcacgccactgtactccagcttgggcaacaagggcaaaactctgtctcaaaagaaaaaaaaagaaaaagactagtagtgttagtgtgtggagataagtaaaattataaatagattaactattatggaaacacagaagagagacaactagatcaggaaagactgggctggataacaaacaactaatgatcttgaaaagacctgatgttcaaccttagtgttggaaagcaagtaatagataagtaaagaaagcaagatcttttaggcacaggaaatataaaactacaaaggtaggcagagcaaagtggctacggaaatgaagctaccagataattttaaataaaggaataatcagtttattagttttagcagtattatcagtattattttgcatcattcatgcatgtatctacatgctctgcattccagctcttaatccttagagtattaatttcatgtctattttgacatacattaaattatcttaatatcacacaacatctctgaaaagcatttccaagtctaaggcagaataggacacaatcttggaatatttagaggatgcatattaaaagttttgccttgtcactatgtgaacttggctaggttatttcacat

SEQ ID NO: 3658 - DNA, 1768 bp, Homo sapiens
ttgctgcttctggaagctttgttctttaatgagccatggggtgatttgttcatcaagctgcttttgtgtagccatacagtgcatattttgagtgacacaaactgcactttatacagatgatatcttgttacccctcaaccccccagcaaagaaaaaaaaacaaaaaggaaattacaaagtgcctattgattgcatccggaatgtaatcagttccgtgggtgagataaatcattcttcttatagaattattctattaaacagtaaaatgttatatttcacaggatatgtccttttataatacagtttttaaaaaaaatttacactcagcatacttataaattacttaaaatccattaaaataatataatacgaatctgtagtccacacctttcccatagtaaatacaaatacttggttcaaaaggtgcaacttttatatgacctcagagggctgataaataggcattaagaatggatgactagcaaggtgacaggcccattgttggggcttttttgaaaatagtttcaaccaggggaccaacatgagacctaatagatccatctccacaatcatcattttgctgttaccctttcaatacccaatcaaatgtgggagtcattccagagaaaagtggttaaaagtagtctagggcatagaaaaagaggactctcacagataccaaggagttttactaccaaggccagcatggtattgcaggacagtgctggggagttgtcacaagagtatgggtggacataacacatttgtccatacagaatgatgcatgccccgcatccagcttcccaccaagaagaaaaaagagaggaggatgaggaaagccatggagtgagtatgtatgtttctttttaaaatgaaaactctcttagctttgaacacatcctgagaatcctttcttctttctagtttaccaaagtgcttgttacagtgaaaaacacagcccacaggcactgaggtgggactacagaaccttgctggaccacatcttttcagcacatttctgtgaccctctgtttttgatggagaaaacaacgctactgttatgaaacacagaatggagtcttcattaatcttccagcagggtaagcgctctggcaggtttccaaagcatgagaaggtgggggctctagtattccatcccaggacctctggcccttttgtctctctctgcaaggctcatagttggagggctgtatctccctttgtgttttcagaagcccagagtggcaaaataatttaaatggcaggaggtacaaagtacgttgtaaactaagcctccctgaatcctgctgtatttgctgttgatttgcttcaatttgtgatacagaatgaaatcacacttctctgcttttgttacattttccataataagtacatactaaattacagggatacattcactttaatgggcagagttgaaaattcaggttttgtttggggctgggaatgtgtgctgtgagaagagtgctctgcattttggagtatgggctccaaatgtggagctgccccactgctgccatgcagagatcaaacaagcaaaggagaagcactatggaaccacaaatgtgatgcatattaagggctaacagtttcataagtgattgtaatgcggcatcactttgtggtgacataactttaccatgcagagggccagtgagaacagatggatgcagacacagcgtttggttctgaaggtttttaagagttatggcttcatctcttgatcatagccaacaaggcctactaccct

SEQ ID NO: 3659 - DNA, 518 bp, Homo sapiens
aaccctcaggtactgcaggtgggattgtaaagtggtgcagtcacttggaaaacagcatggcagtttctgaaaactggaagcatagagttgccacttgacccagaaattccactctcaggtttatacacaagataactgaaaatgtacgtccaagaaaaaacctgtacgtaactgttcatagtggcattattcatggtagccaaaaatacaaaacaactcaaatgtctgccaactgataaaaggataaataaaacgtgacatatccatgcaatggaattctatttagcattaaagaagactgaactatggataaacacaatgatatagatgaacttcaaaaacattatgctaaaaagccacatgcaaaaaccacagtgtattattctatttacatgaaatatccagaaaaggtaagactatagaaacagaaagtagagtaatagtgcctgaggctagtaaagagcagtgactgtaaactggcatgaaaaatccttttgggatttttctaaaattggatt

SEQ ID NO: 3660 - DNA, 13444 bp, Homo sapiens
caagcaggctgaatggaattttttcttgcatgttctacaggcttttttgggaagggaatagttgaaaccgtgaatgactgagaaacagatcatgcaatcttcaacaccctcaaaacgtttgtctacgttatttttccataaagctaagccttccataatacttccattctgttaacaagaagaaaaataagtcactacacactgataaccaccaattttatttttattcaatttcacaaattttaaagttgaattacaattctgaaagaagagaatctgcttggctatgttcatgtctcccaacttatgaatgttggtttttaaaataacctcccaagtttttggaaccagatgtaatttttctccattaaagacatactttaaaggcttctggaccaatacttaaagtgttatagtctaagcttgttgcttgataaaactctcttaataattaaatcatttaggttagttctaatgtttaactgaaaatgatgaaattatctcaaatgatttgttccagctctacaatattggtgagcatatttgttttaaaatagtttttcttggccgggagcggtagctcaagcctgtaatcccagcactttgggaggctaaggtgggtagatcacttgaggtcaggagttcgttgaccaccatggccaacatagtgaaaccccatctctactaaaaatacaaacaattagccaggtgtggtggcgggtgcctgtaatcccagctactctggaagctgaggcagcagaatcgcttgaactgggaggcagaggttgcagtgagctgagatcatgccattgcacttcagcctgggcaacaagagcaaaaactcttaaaaaaaaaaagtttttctttattgtagaatgcctgagatacacaatgtgcacacagaactgaagatttaaaatgtgtttagaggtcaaaggtctttgagggtcctgggacttctctaaccaaagaggagttgaaatgtaagaataaaagtgaaagtagctcagaaggcattcatctgtccagtatctttcaaaacatcctctccgaaacaattttgttaatacaccttctacagtgttaatgaaataaagtcaatccctctcaaacaccagaaaataaattacagaaccttaacaattaaaacagaaaggcaggtttaatccatttaggcatatctctgtatttatccaaggaagtttaatatctacttttatcttaagcagaaaagatatattttatgtttaaatgcccttttaaatagatcatcttttccaagtttgtaaagccaaatgtgtaaacagaaacttacctgatgggtgaggtaagtgcttaactgcagcatccagttccgccactgctgaacagctactcctactcttttcccactttctactattattgaacccagtggataatttgaaggcagttgtattataagttcaataactatgtcctcaatagtataagtagccattacctctcgagtagtagctcgagctttaacctgcaatacaacaaaggatattttgtttgccaaatttctgtctttcaaccagaaaacattttgataggttgactattaaaagctaaagacttcattcaaggacagtgcaggtaaatacattcacttatctgacatgagataattaagaaatacgtttaaatacctgcctggtatatttttacagtgattttgtgatattcaaagtttgttttaaaagaaattaattgctcataaaaaaggttttattatattaggcttgtcacataatagttcaataaaccttgaatagataagtgacagaatgggttattatgcttctcttccacacccagagtatcgaatgtcacttctacatctaacaattcttcctctaccatattatcctcctgagctttggagccaactatcaactgtcagaacatttatagttatttgtttggttttcaaaccaacattgcaaactcaacataaaacgcacacattattatcctttacaaacttcatcttctgaatttcctacttccaggctaaaaaatcatgatagctcattttaaatttctgcttctacctcatcctagatattaactaaatcactagcacaaaatctctcacatccctacttttatattcccactgttactgcctcacccatgccctagtcctttgctcatgtctaccccaatagtctcctctaccattcatttgaatccaaactgtttgccaacagatcatgctatagattgtggtcagagcaatttcaaagattttaactctgatcatgctactgcctgaatgaaaaatgttcagtggctgaattgtaccactttagaccgttatttgaggcccttcccaacatacctcttattcaccgttgattctattcacccttgggactcctacgcattatttgggttggagtactgcattatttatcatttcctgggcaacgactgaaatgacattctcacttctatgctttttgcttttgcaatactattctctctctctctctcttttttttttttttttgagatggagtttcactcttgttgcccaggctggagtgcaatggcgtgatctcggctcaccacaacctccgcctcccgggttcaaaaaattctcctacctcagcctcccgagtagctgggattacaggcacgtgccaccacacctggctaattttgtatttttagtagagatggggtttctccatgttggccaggctggtcttgagctcccgagctcaggtggtctgcccgcctcggcctcccaaagtgttgggattacaggcgtgagccaccacactcggcctattttctttatagtaaatgccattcccttcattttccccataacaaaatcctgcccacctccaagtgattttcttccataaaatctcacttaatcccctcagccagatgaatctttcccactcagatcacaaggcactctttctcttaatatgctactttccaatgcaaaaataattatcagtctcgctcttttccctttattagactgtatgttattacaggacaagaatctggtcctactaaactgttcatatccttggtgactgggacacagtgcttggcatctgtaagtattccagtacagattttgaatgaactaatgaatgctcaaaaactatttggtgggtgaaatggtttggatctgtatccccgctcaaatctcatgctgaattgtaatcccaaatgttggaagtggggcctggtgggaagtgattggatcatggggatggatttcccacgggtgctagtctcgtgatagtgagtgagctgtcatgagatctggttgtttaaaattgtgtgacacctccccgcctctctccctcctgctctggccatgtgaagtgctgactcccatttgccttccgccatgattgtaagtttctgagtagctgggattactggcgcccgccaccacgcatggctaatttttatatttttttagtagagatggggtttcaccatgttgcccaggctggtttcaaattcctgacctcaagtgatccacccacctcggcctcccaaaatgctgggattacaggcatgagccactgcacccggcctaaacctcttttctttataaattacccagtttcaggcatttatagcaatctgagaatagactaatacagtgtgtgaatgaaattataccactgtttcaatccacgcatgaagtaatgttgagatttgacacacaaattagaaaataaaataggctggtcttgaactcctgggctcaagtgatcctcccaccttggcctcccaaagcgttgggattaaggcatgagccacgactcctggccaccagtttctataaattctgagttaagagctacagtctgttatgatattaacaatgacagacatacccaatattaaaacaacttttctagagaaagtcaagacaatactaaccgtcatgccattaaatagttgtgtacttgtttgtacagaagatatttcttgaaaagaaagaacactgctgacatacttgcttgtaaatctatccacaatattgaaaacacgcttctcactgctattccaccacaacctaaccatggcaggcaagtcttttaatgtcatatgatagactgaacaagccaagtgtggaatgtggtatggaagcattgttgtttctgaggaaaaaacaaattattgattagtaacatatatttcttatatagaataacagactaatattagtattttctttagaaagtgatccttaatttctcaacaatagtgctatagctcataaaaacaaacataccagagaaaccagaactctggagtatgagcatctttccacacattcaaaatgaaccataagaatggcaaaagaatttttttttaaagtgaaaatcccgccgggcgcagtggctcacgcctgtaatcccagcactttgggaggccgaggtgggtggatcacgagatcaggagatcaagaccatcctggctaaaacggtgaaaccccgtctctactaaaaatacaaaaaattaggtgggcgtggtgatgggtgcctgtagtcccagctactccggaggctgaggcaggagaatggcatgaacccggaaggcggagcttgcagtgagccgagatcacgccactgcactccggcctgggcgacagagcgagactccgtctcaaaaaaaaaaaaaaaaaaagtgaaaatcccaattgacactgaaaaatctacctagaaacagatttctgtatttaacatgaagaccacaaataaaatagaatacacatattttaaaaagaaggaaaaattaaagatgcttgctgttataaattatgaaaaggagtttggcctcctttactttccccagagcttgctgaactgctgtgcagaagtcttggaatacccaactcaatactcacaagatgcagtccatcctcagatctccaaggcatttaaaaaactcatattcttagtaaattgtttccaatactgtagtacaaccagatacatgcatatctgtcctctcagctcacatgtgagctcccagaatgaaatgttattcaactttatttcccctgatttatatgcctataaaatgttatcacgtaagaaatatttgtttacagagtcaaaagttaatagtctcaccacactaagcttcaaaaatgtattaaattcctcacagtcttatgggtaaaaactaattattcatcctatttagagaaatatggaaaatggtcaatttcaacattctcatagccaggacccacctttggggttattctccacattctcagggaaaagtttaattcaacctagtctgaatctagtgtccaagaaagaacataaacacatatcttactgacctctaatactcagctggagctcctcagtaaagaatgttttagggtccttatttgggacctcaactgctgtctctgcataggttggattttctggcataagcctgaacaggtgatagagcaatttattcaaactctttgttttccgaagatacatggaatacaaagcccgaagctggtggagagcaaagaatttgttagtaaaccaaatacaccaagacaattggtataaaagaacaactcaaagtgtaacaaatttcctttcctcataaactagcagacattctatcccctcattattgtaacacatttctaatatctttctcaaattgtcttcctgtattacaatgcactcaccttggcttagaatgtctgagacaagaaaatctattcaccattcccacagatgactccctcactctcctcccaagtcttccatacattccttccacaccattgcccttaacctttcaaattcctgcttaaaactaatcccatttttatggctgacctcaccctgtatcaaaaactccgacatccctttacgacagagagcacaaactagtggtccaaaatgtcatgggggtcttctcagagttgttttttcaatcaggaaatttcacataaaaatatggatttctgatttctcttttaaaaacagaaaaacgagccaccagtgggagcactgcaggtatctgtgtgagacctgtacttcacaactcctgctttccctccataaagtagcttgcattttccacattgactttgcagttctttggtatctgtattggttttaagataatttctactatatcacatatctcctcacagtacaaagatatcattttctttcccttttctttttaaaaaatttgtatttttaatttttgtgggtacacagtagatatttatggggcatatgaggtattttataggcatataatatgtactagggtaagtggggtattcatcacctcaagcatttatcctttctttgtgtaaaatatagcattttctgaacactatgaatacttaagtacaaggatcaagtcataggatttggaattgatttttaaaatatgttgaccaaagtgctcttatcatcaaacttaacatcactaatgaaggatgaacatcccaaatctgaaaatccaaaatccaaaatgctccataatctaaaacttgttgagcaccaacatgatgcttaaaggaaatgctcctggagcatttcagattttcggatctgggatgctcaaccagtaagtgtaacaaaaatattccagaatctgaaaaaatctgaaatcagaaacactactggtcccaggcattttggataagggatactcaacctgtaaaagaacacaatgacattatatggctcctgaggtaagacactgagaacacataacaacttgtgcagtaagtactattgctaaaaattaaccacaatctaatgaggaaacgatcagacaaattcacattgtatgacaggctaaaaacagctggccaaaacaatgacaagaaagaaaagaaaggtatagaaattataggttaaagaaactaaagaaatatgacaagcaaatacaaacatgattcttgattggatcttcaatagagaagaaaataaaactatagagatattactgggacaactgaaagtatctaaataaaaattagatattattgcatcaaaattaaatttcttgagtataaaaattatattatgcttatgtagaaacatgtccgtgatcttaggagatatatgcttaaatacttttggtaaagcatcaaaatatctgcaacttactttcaagtagatcagcagaaaaaaagtaaatacagagaaagtatgtgcaaatgtagcaatatgttaaaagatgtatgtaacttttttatctaaaagagtatgtgattttccattgaattattcttccaacttcattgtttaatttttcaaaacaaaaagttagagatttttaaaaaattaatcaccaatatcaatggacttttaaaaacacacatatacgacccagcaatcccactccaaggtatacaacacaagtgaaaacatatttcaacacaaaagctcgtacacgaatgttcacagcagctttattttcaatagccaaaaaaaaggaaacaacctaaatgcccattaatggataaacagatagataaacaaaatgtgatagatctacaaaatggagtattattcagccacaaaaataaatgcaatacttatgatacatgcttcaatttgataatcttgaaaataatatactaaaataaaagccagacacaaaagaccagatatgtgaaatgtccagaacaggcagatgcatagagacagaacacagtttaatggctgtcaggagctgcggggtttgagaggaaatgggaagtgattgctatcaattacaatgggatgttgaaaaggttctaaaattatatagtggttaacagttgcacaactctgtgaatacagtcagccctccacttccatgggttccacatctgagaattcaaccaatcgcagattgaaaacatttgaggggcaaaaaaagtgatttaaaaaaaccaatacaacaataaaaatactaaaaactttaatacagtatagcaactatttcaatagcatttacactgtatcagtgataactaatctagagatgattttaagtagtatacaggaagatgtgcataggttagatgcagatactatatgccattttatataaggaacttgagtattcgctggggtgggggtcatgggagggagcctggaaacaatccccagcagatatcaagggatgactatatactaaaaacaccaaactgtgtatgctaagtgggtaaattttatggtatgtgcaatatctcagtaaagctttataaaacagacacaaaaacatacacatgtacatatacaactttttccagttcaatctgatttgctagtttttttgagaaaaaagttaacccatgatttaggaacatttaaagttttccgaagaaaaattctgtttatttcaggattcatctaattagtattacttagtgggttattctggtttatctgcccacagctcagttcaagtttcagactcaataataataaatgctgccgtataattttgcaccctaacccaatcccagcttaatgaaaaaggtgacacatggccattttcctaatttctgaatataaaatgagaacaaaactcttatacacaaatgcctcaatctgctgctattttttaaagatcaacaatattttaagaaattgatgtaaaagccaaataaggagctcttgaaatatatcatcagcaaataaaactagcttaagtcacaaaaataagtgacaggcctaaagagaaaactaatctatttaacagctagatcaatgctgcttctgtgatttgacttttccccacagatatacaaatgcaaagatgcaaaaattgatatctttgtaccagggtatagggtatgagcaacaacataaattataatttaaaaattccaaaaagtcacattggaaatgaatgccatgaatacttaatcacactaaatgataaactaaatctttttgtattgacctgtcaaaagaaggcacatattttattaggctaattcaatcaaagattgacagagatttggatcttccttgttctttttgagacagggtctggctctgtcgcccaggcttgagtgcagtggcatgatctcagctcactgcaacctccacttccccggctcaaactatcttcaagtggggatccttctaacagaaaaactagagagatctttccagtttcttcttggacaaggtcttacttcctaaacatgagacaacagagacatctagtggctgctagaataatttggacaaaatatttcagatattttcaccacttaggtaacagtttgaattattacataggtaatgtttcacagatctctctccaaacagtgattttcaagtaaggtaaatttccaatgatgtattaagttatatctccacaacagagtgacaaactgactccctccgaaaaaaaaacaaaaaacacaagatccaattcttttgaaatcattactatgatagtacaaaattaaattatataaatattatttcctgaaataaaagaacctggtgactacattcagttagaaaaaagttgatctggccacctatcagagtaattacttttgcttggaaggtaaggtataagggacaggagtaaacttattaagcagatggaagttagttggataaaatgagattaggctgggcgcagtggctcatgcctgtaatcccagcattttgggaggccaaggtgggtggatcgcttgagctcaggagtttgagaccagtctgggcaacacggtgaaaccccatctctacaaaaatataaaaattagccaggcatggtggcttgcacctgtagtcccagctacttagtgagaagatcggttgagcctaggaggcagaggttgcagtgagccgagattgtgccactgcattccagcacaggcaacagagtgagaccctgtctcaaataaacaaaataaaataaattttaaaagatgagattaaaacataaggattttccttttattaaactgaaaggaaggtatttagaacagtatcagaagcatattaggacagaactatcgaaagttgtcacatatttatttacctgtgatgatgcagctttgaagaaagttagtattaatttccaagtgagaaggtatcccagaacataacagaagtcttcactcagtggtttaatagtaactatctgtccaacaggaatacaccccaaaacattttctagtaagtcctcttgaatgctaagaagagacatcagtgctgctggtggtgacctaagaatcaatgattaaacaccacaagttttctttataattcattccttaacaaattgacagtacttgtaaacttcaagcattttagaaaaatttctctgttttccaaaaaacgttttaaaaattcccctctattgagccaattttaactcctaatctcacataacagtaaaataaaaaagacatattatagcacttgaaggaaagacatttttagaaaacgtctctttcaattttctaagtgaaaaaaaatcacacacccagagaagccaaatgatgagtccaacgtctttcagttagtaggggaaactgttagggattctaaatcctacccggccttttatcatcttataaaagacaaagtgaagattaagacttcgaactttgtcacttcattctagtttctattttattgcatattatctacttagtactattaagaaatatcacaatgatactattaatcggataaacacagaaaataattatgtgcctgtttaaaaaatcatgattgtaatctttttaggaaaataaatgtaccattcagattaattcacaacaatgtaagttaattttcttctttattgaactactctactcatttatactttcaggtgaacttatgagattctcaaaaagtaaaatacttaactctcttctccatgatactctagcctggttctctcctttcacttctgtgatcgttcttcccttgtggcttccttctcccagcccacaagtacaggccttctccaaacttctgctcttaggtcttttccttcaacacctccatctcatgtacccagccttctatattccatactgatagtcactagatcttataaaataccagctccaaaatctctccacttttcacattgccctccatgcattgttatttaacttctgcaatcagctccacctctgcttgcttctttttacaattcatgtttcacattagtgtcagaatcggctggtggcgccctatctcctaccaagtaatgaccaaatccccccaaaaaagtcatttttaaggccatttattataggccaggaagcattctggcctacagcattctagcctatttctctctcagaaataagagagagaaattcctgccctcacagaacttacattccagtaaagaaagatattatcaataaaactatacattaagtggtaactactcaatattccccaagcacatcctcacattcatgactcagtgcctttgtacatgatgttctcttaacttatgttgtctttcctgtcctgcagaaatgctacctaaccttaaaggtccagtttaaatgcctcttcctcaaaagaaagtcttcccttcctgatgtacattaattgtgccctcatacatgctatcttatataggcctaactgacctttaaaaaaaagttatctatcctttttcttagcacttatcatatactatattttccataacgctacagtatcatctgtatcagataaattccttaaggaaaagaaagtgctcactaaacactgcatattcccctcagcatttaattaatactctgcacaaagtggatgctcaatagatacttgaaccgatacactctttccacagccaccatatggccaaagatagttttactgaacagtagcaaacggaaaatgtgatttaagaacaattaagagagtgacacaatcttttgggtgaaatctatatttcatttatatcttacagataactaaaaagatctatctgtagaatgaatataactctatagcttctgtgctgcttcagtcctctaaagacattataagtgagatggattataagaatttaataaaacaaattatttaaaaaaaccttacaaggctggctcttcttcttcatctccgtatgactttagattatcctgatcatactgtggtaattcaggcatcaatctagaaattagaacattatttttaaatatgtgatattaaactgtttattaagtcgtgctcaagagcagaaagaccaatacttattttataatgagtaaatgttttaatgagttttctttaaaataactactatagccaggactattgaaatataaattgtgtatagagaacaataacctaaaagatgaggcaacttagggtccctataagtgaagcagtcagatctccttcttttaaaaattttactttaaataattaaaagtaaaaactaagcatatattctatttttttagaccactgtaacattgattcaattggatgaattcttacttgtatagcatatgataaacagcaatttgcacaggcctagctctgaagaggagtaatggggccaatgtatttaacaaagtctggagatattctggtaagtttgttttttggtcagcaactaatcttgcaggaagtttgtgactcaatagctgttcctttgagatatacgttaatgtttcacacatgggtttcagcattgcattctgaaaggatgtttcagacacatctttgttttctcctaatgacaaaaaggaaagaaacatgcacgtctcaaaagaaagttagtatagcttaaatgattcacaaacaatcaaatgtcatttaagaaaatgaaataaaaactagacataaacaataaagcagtcttaactagaaacatgaactgaatatatattccagttaatctcaactgttttaatgacttttatctgatccagcaaatgttcaatagcaaggttctattcacatcatccattcatgttatctgaagtattattattttaatttgcaacagtcattggataccttgccatttttcaatttctgtctgtaaagtaaagcatagatgatgcttctgagaagccaagctttctcttctggctttttcttttactatttagtattatttgatttaaacatcaaaatttttgcttttgaatttttcagtaagtcatttccaatgaatcaatctcactattattccctttttcacttgcctgtaacagtcaccaaaataggtaaaagcaaactgtggatgccttgggaaaaaaattctttccattcactgattagatttacaggaagattgccaatggtatccagagttgtggaatcaaagaaagcactgaggtcacaggccaaatcacagctgacacaggcaaacagttgcacaagtggaatagaatacaatgcctgattctcacttgttgtct

SEQ ID NO: 3661 - DNA, 2938 bp, Homo sapiens
tttttttttttttttttttttttttttcagactgagtcttgattgctctgttgcccaagctgcagtgcagtgccacgatctgggctcactgcaacctccctaagtagctgggattacaggtgcacaccaccatgcctggctaattttttttttacttctactagagacggggtttcaccatgttggccaggctggtctcaaactcctgacctcaggtgatcctcccacctcggcctcctaaagtgctgggattacaggcgtgagccaccgtgccgggctgaaattccatttttagacatatgtctagaatatctagcacatctgcatgaggtgacatgatcaagaatgtacacttgcagcactgttcaaaatggcaaaaaaataacaatttaaacaatctttagtaagggaactggtaagtaaactgatatgacactaaacagcattatgttgagtggaaaatcaggttacaaaagattacatacataaaacatcattaacataatttttgttaactattatacattgtttctggataaaaacacatggtaaagtataaaatcttaaacaggaaggagtcacaccaacttcagaattagtacgttagctctagggaaagaaggaggagaatggcgccagggagaagtacaaaagagtaacattttatttatttaaaaatcagaagcaaatatggcaaaatagtatgtgaagggtacaagggcatttatattattatttttctgcatatttgaaatatttttaattaaaaagaattttaatgggcacatatggtataacaatcaaataataacattaattacttgcaccacaaaaatgtatcaaataacaacatattatttaagccacagacacttatgtacatacattggagcatgtgataaaagagtcaaaaataaattttaaaatttgcaatttactttggggttttaaattaataattttgctaatctcatgcaattttaaaatgtccttaagctaaaattttaagggctgtaatccttttagttagagttgtcaacgctgtacagatgtggtattctgaatttcagtcttatcttgtaaagctttttctttagtatataaacagttaacaagctttacaattatacttacaagtcttaaagaaatgtattaagagtcctaagtatgaagaacagttatttaattataactacttaattatagtgtttcaccaagaatctgatgccctaatactaatgtggaaaaacaatgctccattattccattttcttttctgcttggggtttgggccagaagccaagatgtaccaatactggaaaggttttaaacagtcttattataaaaccatttttaaaggaaaagtaataactttcacggggagtaacacaatcctttgggattactatgtcagaaagagacatagaaagatagagaatattttaagaaaagggttaacgaggtagtaaaattttgctatctgtacttcacttactgaccctcagaggctcaaggctagaagacaataaatattttacagtaaaatgtaggaggcaaacaaaactgggcaggacactgcatctataaatataattcgagagatctataactcacacatagtacttcactctcaactataatcctctgaccacattcatactatttcaatagtcattttacccagtagatggaaagcagtaattttatttatcatgaattgctttttgccaattaaacatgtgcaacagagatgattagctggtctctcaagtaacctagatattagatatgctatttccatgtaatggaagactgcaataaaattattccaagttctaaagttccacacttttatattttgggcacaatttttaagagtggcaaaaggcaggttttcacttactccacttcagcctattatactgaattttacctagtgctaaaatccttaactttcatttctgaaggctgaaaaacatttgctcccccaagtctcttatttagtataactttggctggtaagaatagctcagtttgcttccaaaattgaaagtctcctacaacatttttaaatgttttttttttccactgatctttaagtttcagtaatactcatttatttcttccctctcaatagaaggataactaccactccgcttcatgaatgaaataatcaaattactatttctctcaaattctcaccctctagagactcgctcagagtgataaattcactgacaagtttacaattcaaatttcactaatatatagaaataattctcccacaagcaaaaaggtcagcatcaagaatttaattttctgagtttcataacccttgataaatggaggcaccttaaagttcagtttaaactcttttatataggatttcagagcatgcctccagatatcttaagacaagccgtattaatagcttagtgtcatttttatcattaaaataatctacaaatatcagaatactaatttattgtcataactaataaataaggcttaaaatatctatagatgtaaatcagctctctcagttcgttttgcttcacttggactattctaaaacacagatcaacaaacggaatgggtttatcaataatatagttgtgcaatcttttcacaaattccaattctgtaatttaggggtttttcatatttatttttaaatatacaaagaaattaaaccattaatagaaatattttctctcaaatatgtaatattcttttgtaaaagaaagtttccaaacatttacaaagcaatctaaagttaagtaaacctgattttaggattattacattaaccaaaataattttccagagaaggtcctatttaaaagtaatgctcactggcttccccacatccacactttcagacggatccaaatccaatgcctttgtttgatgtacttcagggatcccttccagtgaa

SEQ ID NO: 3662 - DNA, 5741 bp, Homo sapiens
agggtttgctgacatcccgacaggaaagactagcccatatatcctgcgaagaacaaccatggcaactcggaccagcccccgcctggctgcacagaagttagcgctatccccactgagtctcggcaaagaaaatcttgcagagtcctccaaaccaacagctggtggcagcagatcacaaaaggtaaactactgtcaacatccgtctactgtttgagatccagaaaattgcagtagtacctgggtgaggattggacactgcacccccgattcaggagcgctttcaaaaagtctgaccttcttggtgtggtgtaagtcagtcagtagtgagcaagtgaccgggtgagcattacagtatcagggtacatgatctcatccttcagtcaacaggccgcttatatgtagtttgatggaaaatggcattgttacatcaaaactcagtggatttctaagaaagtttcaggcgttactgatgaaggatttgaagaggtaattttccctttcgccactggtattagtcattgtttgtttcaaactttactctcacttatctgcccccagctgctaattctttattgtttttattaatcctttactttcttaaaaaaaaaaaaagcacatatttcaatagatatctaaggaaaggaactctgtttatagatctctctattttgattgttgaggatacaacaggatcttagtgacttctgtgtaccctacaacatcccagaaaatgttatgtagagcatagagaatatttgcttaacagatctttattcctgttactatgatccataccagcagctgccatttaagtatgcaaagtatatgcattttatttatctttctcattttattgaactctcacagtaagtggtattataaaagagtgaagaacgtgagactcataaagatgtaacctcccagtgtgaacccctacttcctctcaactccacagtcttgatctttctacgataccagtgtttctcagactggggactagggggatatttttggaagttgctggaatagcttcaaagagtttgaacagtctgtgattttaccttgattgctcacttgtcagagtttgatcaagtatgcgagctgataaccttgaaccagaaaacaaagctttgaaagtgtaataacccctatttgtgtaatgtgataattcataagtgagcaagcacgttcttaggatttgggataccaaatatgaacacattggtggttacacgtgggcgatctaaagagtacaatatatttagatttcttgatctaaacatcacaacaacagatttgcaaatttctttttgttgatgtataagagctataagcattaaggaattatacttagtaataaatttgttcatcatatacattatattaaaatttttcttcaagtatgaagaagaatgctctgagattttctttcactaaagtggacccatttgttactcttattagaaatagtctaccattttgtgcaaatttttctcccctcccctaccaaattctctctgttactcacattcggatttaactttggcatgctgccaacaacaaaatactgaagtatatactggagaatatatatttaatatactgaatatactgactttccaatgaacatgagaacagcttctcttttaagcaactagtgcccctaaaccgtggagctaccaagcttgtccaaagctgtcaactacaagatatccactggatactgaatacaggagaagtcaggtttagggtcccgatatgggccataccattttctcagaagggtgactgggagccaccctttcccaaacctcagtaaaaagtaacatccattcctgtttgtctcacacttctggagatcaaacgaagtatttgactctcttagaaaaccatgacatatagctggtactctatgcctccactgtctttaggcagctcactttattgtaatctcttgtttaaatatctgtcttctgatttgcaatctgagttctgtgaggttactgattacatctatagtttatgtctatgcagtgtctgacattcaacaaatattcactgaatgaatggaactgtgaatgtcctgaagtgattgcattaatagatgtttataaaggcatgctaggaaatggtcttatgaaatcatcacaagtcattttttttctgttgcgaagaactgatggtaaaagcagtttgcatgcggcgttcagacttactatctaggaaaaagagctttgcacgctagggggcctgctctcctcactgctgttgaatctgctgagtagggagtagtaaccatggtttctgcagattttgttcagtgcattagctacatgctgttcagtaggcaccagcagttatgaattgctaagcaattttgtgcacttgcaaatgaggagagggaccttttgagagcagttataggagaattcatgattagattcaaactcttcaaaacctagcccagtaatttttaatttaattcagcattttctgagttgccctgtaaaatgcttgctgcctcatctgttaagcgtattacatcacttagttttaaaaatctagaatgaggtattatttcccaaagcagttgcttagaaactcagggttgtgagttctcctttgaggtgactggctgggttatgagagacagtttcctaggtcatttagcaagacctttagtaacatctgacaagttcaaaggggaaaaaactggcaaaatgcacattaggtaaggatcattctctattatgtcactgggatggattagctcaggaacccctcgtttgttgggaacaagggagacagcgcttgtagacctgatctcctgaacctgggctttgtgatcagttccagaggactggccagtaagctgtagagcccatcgtggatggtggtgttagttttgtggggatcttgcattttttcctacttgtgagggtcattttcactgaactacatgcatatttgccctctctctgttgctactgcagaatcatttatgagacaattagggtatgcttgcactttttttttttccctcccctgtgttattctaggaggatgtactatcttaatagattaaatacttggtgaatttgactttgtctggttatagaccattctgaagctaactaaccaacaggagggtcaaatccacagtttaaattctgatcacaactaaagtgtcctcaattcagtatcagaaattgagtctagaggggagaagccagaaagagtggacgttagccatttgattgggataaagaggcttataggctcaaactttctgtttcctatgggctatctgtctctctctttttaaatggcaaacctaaagatttgtttcttgtacatctggtgggttccagggaaaccttgtctttggaatcactatttctctttaaaaaaaaaaaaaagtaccagcaaaactttgttttatttttttccttcaactttccatggatggtaattttccattaagtcctgaccttccaaggctgcgtcttttcagtgtcctggacacactctgagggagaagtgagctttcctgggatttgatctgttggccagatttactatgtttcatgtaatgaaaagtatttaactgcctttttcaaatcacatgcttcctatggaaagaatataaatgggaaaataatttccattcccttttcttcttgcatcagaaggagatccctggaagtcagttgctcagggagtgtctgtcacgtagttacttcccagcaactgtgctggacacagatccttgtgtccattatgcaagaggcccttctcctttctctttgaaagatcttcctacttgaatcttccactcttgcctttaactttgcttaggtgaagctttcctatacttcatttttcttgcacttttttctcttttttgaccgtgtatcttttttcactactatataaatttcaatttttttttttttaaatcttgctctgtcccccaggctggagtgcagtggcactatcacggctcactgcagcttcaaactcctgggctcaagcgatcctcttgcctcagcctcctgagtagctggaactatagatgtgagccactaagcctgacccaatttcaaaaaatcttcactcaccagttaccttactctctcatctacttaaagtctcaaattttctgagatatctctttcctttaaaaggcaggatgtttgagaggggatttattctttccggactttattgttagatagctgcccttctgctctagtccaaattcaatatggaaacagtcagccataaagggagaatgattaaaataccctgaactggtccttggtcattttaaaattttccaccctgtggaggtagtattactcatttgggttacacttgttttaaacaacaggaatggctagttaggacaacagaggcaggtttttcacttaggaattcactggatgtgtaccatgtggtcaagcatgttgtgggctctagggatacataggtaaatagggcatagtctttgccatcagaggtgccaagggacgtctgatgactggttagaggttgtacctggtatcctcctaagttctctgttagatggggcctgttctcaaggaagaggaaatacttcaattatatataactcctagagaagaagaacttaatttaaaacttagtgacatagtgctttatttttcatgttgtggaaatgtgaatgtgattgaacctctaacagagatgtttgtgttgcaggtcaaagttgctcagcggagcccagtagattcaggcaccatcctccgagaacccaccacgaaatccgtcccagtcaataatcttcctgagagaagtccgactgacagccccagagagggcctgagggtcaagcgaggccgacttgtccccagccccaaagctggactggagtccaacggcagtgagaactgtaaggtccagtgaaggcactttgtgtgtcagtacccctgggaggtgccagtcattgaatagataaggctgtgcctacaggacttctctttagtcagggcatgctttattagtgaggagaaaacaattccttagaagtcttaaatatattgtactctttagatctcccatgtgtaggtattgaaaaagtttggaagcactgatcacctgttagcattgccattcctctactgcaatgtaaatagtataaagctatgtatataaagctttttggtaatatgttacaattaaaatgacaagcactatatcacaatctctgtttgtatgtgggttttacactaaaaaaatgcaaaacacattttattcttctaattaacagctcctaggaaaatgtagacttttgctttatgatattctatctgtagtatgaggcatggaatagttttgtatcgggaatttctcagagctgagtaaaatgaaggaaaagcatgttatgtgtttttaaggaaaatgtgcacacatatacatgtaggagtgtttatctttctcttacaatctgttttagacatctttgcttatgaaacctgtacatatgtgtgtgtgggtatgtgtttatttccagtgagggctgcaggcttcctagaggtgtgctataccatgcgtctgtcgttgtgcttttttctgtttttagaccaattttttacagttctttggtaagcattgtcgtatctggtgatggattaacatatagcctttgttttctaataaaatagtcgccttcgttttctgtaagaatgattcctaagtgt

SEQ ID NO: 3663 - DNA, 465 bp, Homo sapiens
gggtcattttcactgaactacatgcatatttgccctctctctgttgctactgcagaatcatttatgagacaattagggtatgcttgcacttttttttttccctcccctgtgttattctaggaggatgtactatcttaatagattaaatacttggtgaatttgactttgtctggttatagaccattctgaagctaactaaccaacaggagggtcaaatccacagtttaaattctgatcacaactaaagtgtcctcaattcagtatcagaaattgagtctagaggggagaagccagaaagagtggacgttagccatttgattgggataaagaggcttataggctcaaactttctgtttcctatgggctatctgtctctctctttttaaatggcaaacctaaagatttgtttcttgtacatctggtgggttccagggaaaccttgtctttggaatcactatttctctt

SEQ ID NO: 3664 - DNA, 377 bp, Homo sapiens
cagggcatgcgctagtaaaagatcatttgttcttggctttcagtccaaattgatgcacaaattccgataagcaccatcatttatatttaaaagttgtccttcgcaaggtggcctctgttgttggataatgcttcaataatattaagctacttaatattcatcagctgaaagtgatatcctgactttcctcttgtttcttcagttgcttggggttgaggtctggtgcaatatccttaccgtaaatcatcccagggcccccatgtgctcaagggcatgaccccgagcagacattgttgggatcaggccatcagctttattggctgtctccagtgattggaagattccactctgtaggctttgctgggtagcatcgtggg

SEQ ID NO: 3665 - DNA, 1001 bp, Homo sapiens
caggtcaaagttgctcagcggagcccagtagattcaggcaccatcctccgagaacccaccacgaaatccgtcccagtcaataatcttcctgagagaagtccgactgacagccccagagagggcctgagggtcaagcgaggccgacttgtccccagccccaaagctggactggagtccaagggcagtgagaactgtaaggtccagtgaaggcactttgtgtgtcagtacccctgggaggtgccagtcattgaatagataaggctgtgcctacaggacttctctttagtcagggcatgctttattagtgaggagaaaacaattccttagaagtcttaaatatattgtactctttagatctcccatgtgtaggtattgaaaaagtttggaagcactgatcacctgttagcattgccattcctctactgcaatgtaaatagtataaagctatgtatataaagctttttggtaatatgttacaattaaaatgacaagcactatatcacaatctctgtttgtatgtgggttttacactaaaaaaatgcaaaacacattttattcttctaattaacagctcctaggaaaatgtagacttttgctttatgatattctatctgtagtatgaggcatggaatagttttgtatcgggaatttctcagagctgagtaaaatgaaggaaaagcatgttatgtgtttttaaggaaaatgtgcacacatatacatgtaggagtgtttatctttctcttacaatctgttttagacatctttgcttatgaaacctgtacatatgtgtgtgtgggtatgtgtttatttccagtgagggctgcaggcttcctagaggtgtgctataccatgcgtctgtcgttgtgcttttttctgtttttagaccaattttttacagttctttggtaagcattgtcgtatctggtgatggattaacatatagcctttgttttctaataaaatagtcgccttcgttttctgtaagaatgattcctaagtgt

SEQ ID NO: 3666 - DNA, 2391 bp, Homo sapiens
tagagctgagtgacatttaatgtgtggcaaagaagaatgacatggtaaaagactgatatggatttaatgacaaatattccatattggttgctgaacaccagaatgctgtccaaggaaccatcgttaaataaaacaacctgaaaataaggcaaatctcacgtatacaagcacactcacacgaaacctgttacttttaggatcattaaattattcactattttaacaaacagctgtaaaataacattacagtgaagaaaaatgtgcacaaacttcagaaacacagtttagattgtctatgaacacaggtccttaatttgtattttttcacatatgtacagtctcttgattgtaaagagaccacatggctcaaggggttaacttctcattttctccttccaactcggagctcaagatttaatcaaaaccatttagcctatttaaattgctccaggttttgcttagtaaagggcagcagaggaagactgctcttcatcaaattctccaggaaacaaataatacacttgcttccaccatcattaatgagttggtggaaaaagtcctcagattaacgttttcaagggtgaaccgcagttagcagggtttgccgaagaaatattattctaaaactagatagaagaaacaaacaacctcctgaatgcatttaacctcacttaatgcaggtaagttccctgaagaattgtaagaaaaaatggaatcacattttaaatgcaccaatagagtcgggtgttggtagttggattgttttcttctgctaagaatgtgctcatagaagggatatcaacgtagcagctgacttttttatccatggtaatagaaataatgagagaggtaaatgaagtccaaagattcccactgccactaaactattttacattagcttcactctccactccctgttgaacccattctctaaagttgctgatatgtagtatatttgatgcagacgagaccaggcatagcaatggcagcaaaaaagcaaaaaaaaagcggataatcaatccatgaataatcaaaagttggatgagatttcataggcacagacttgagaaaacttaaaacagctggaagaggtagatgtacatggaaagaaacccacaaagcagtaagattacctagaaattggctatattattttcaggtgggtctaatatgtttagtattcagattacaaatcagaattcaaaacggacacttgtttgcttgtattactcctgactagaagaaaatgagaattaatgtctttcaaaactgtctgtagtttgaaaacctatttgcatttgtgaataacaataaactgattaagagggcaagatcaacaggcattatacaagcccagaattatcaggatttttaagtgtttttataaccacaaaaacatgctttcctacagtccccaaagaggttctttactagaatacaactgatcaagtataaattactagcatccacagaaactttgctaaaagtgtaaaaacaatctcgtagctttttttcccccttccactgtgtctgatattttgtgaagatgcttccatgaaatgtgtagggtaacaatcactagagaagaaaacaatactgctttccacaactctaacttctaaaggctaacctagcacagggatcttcagcataagtaactgaaatctatacaagagtcatctaactacagccccttactagaaatggaacatagctaggataccctaattaggcgacaaagaccagctttgtcaataaggacatgtttggcccttctaggctagccttaagtttttcatcaagcataagaattttcagtgtccttaattttattatataaatcatgacaagtaagtcttcctagcagctgagctggagaatgcaaaaggtcaggctacaattattcacactgtcctcagcctctcttcaggacagcctgcacactcctgttcccaggccttccctaagacagcggtcataatactgatctaactcacaatgatgtgagaaacagctaacaattattaaaaagcataaagcactttgcaaatatcaaagtgctattttggcatctatataacaaccagaaaacattcattgtttgtgctatttggcaattttgcatttacacctctccctgactgggctcttctgggtaaagccttgagatttctactgtgcctccacgcgcaggcaaaagacattcttacttagactagatccctcgtcaatatgcatggaagtgggggttagtggaggtcactaacaaatgcaaagtgaaggcaaatgagaccaaggagtctcgcatcccaaaaaagtgaacactttcttggatttctcacataaaggccagcaaaactctgagctagttgactttttagcaggtcactg

SEQ ID NO: 3667 - DNA, 763 bp, Homo sapiens
cccttccccacttccttcccctgggtcagtcccaggatatctaccccccacaggctccccagacggcagcctcccgcggacccagcccctaacacaggtgcagcttctggtgctgcgcgaggtgcgttttatagcggaagcctttgccgcagcccgcacacttgtgcggcttgttgcccgtgtggatgcggcggtggcggatcaggtgggagctctggataaagctcttgccgcactcgatgcacgtgtagggcttctcgcccgtgtgcgtgcgctggtgctgcgtgagcgtggagaagtcgctgaagcgcttctcgcactggccacagcggaagggcttctcgccggtgtgcacgcgcaggtggttcaccaggtgcgagttacgcccgaagcccttcccgcactcgcggcacacgtagggccgctcacccgagtgcgtgcgcttgtgcgtgaagaggtgcgagctgacgctgaaggtctcgccgcactcggagcacatgtagggcttctcgcccgtgtgcacgcgctggtgcttcaccaagtccgagcgccagctgaagcgcttgccgcactcgccacagccgtgcggcttctcgcccgtgtggatgcgctggtggttggccaggtgcgaacggcgcacgaagcccttgccgcactccccgcaggcgaagggccgcagcgccgccgcccccgcgccgctggccgccgcgtgcgcgcgccggtggctcaacagatgcgagctgaggctgaaggcctcgccgca

SEQ ID NO: 3668 - DNA, 409 bp, Homo sapiens
tagccaaagggaatgtttactgagtacctacccggtctggcactttgcaatacacttgtatattgctaagacggatagttcaaccgttacatagttatatgattgatagttatacatgcttaactgctggggattggttccaggaccgcctgtgaataccgaaatctgcaggcgctcaagtcctacagttggccctgccaaacagcagatatgaagtcagctcttcagatctgtgggttctgcatccttacaatatttcctttcctttccttttcttttcctcccttcctccctcttttttctttttcttttttgagatggagtcttgttgtgtcggccaggttggagtgcagtggcgcgatctcggctcactgcaacctccacctcctgggttcaagcagttctcctg

SEQ ID NO: 3669 - DNA, 266 bp, Homo sapiens
tttttttttttttttttgaggcagagtttcactcttgttgcccaggctggagtgcaatggcacaatctcagctcaccacaacctctgcctcccaggttcaagcggttctcctgcctcagcctcccgagtagctgggattacaggcatgcggccaccacgcctggctaattttgtatttttagtagagatggggtttctccatgttggtcaggctggtctcgaactcccgacctcaggtgatctgcctgcctcggcctcccaaagtg

SEQ ID NO: 3670 - DNA, 4516 bp, Homo sapiens
gggtccgggagcaagggcgtggcctggatgcgcgggcgcccgggacggcacgtcctcagaccaaactacaactcccaggacccagcgggcgctgccgcccacgcgacgtcacggcggcggagggcgcaggcggctgggcgcctggcgagtggactgttcgagcccttccgctgggacccgggccctggctccggccccgcggtaagtggggcgaccccagcctactcagtccgcggaggccccgcggcgcacgtccgcagcctccatcacagcgcgggcgcgcagacggggctggcatctaccatatggggggcatccgggccgaaccaagtgacccgcgtggggggtcccgctggggactccgtgccgcaccctcccaagccggccccaggggcccagggctggtgtcgcacgttcgctggccgcgctcccagggcccgggtttgaaggcgctgggcaggcaggggcagccccgccccctgagaagggtacccgggaccccggggcgctggggcgaggttttcgggctggaagggtctgaggggctcctcccccgacagccctcccaccgccagtagagcctcgggttggggaatagaagcccccgggaggctaggtcctttgggcgcggcctgtgtgcatctggggagacggtgggagtggtggggagaggtcgcccgggtctggggagaccgatgcacaggtggagagatggtgcgggttctgtggattcggatccttacaacttcctcttccccgccccggtagatgggagctgctctccgcgggctgagcctgtcagcatcctcgacgcaccctggtccctgaagtcggagaagagcccctacccacccacacccccttgccccattttgggtcgcctgggtcctcagtcctagcggatcctcagtcctagcggccaccgggtctgaaaggagcaagacgatgatcctggcgtcggtgctgaggagcggtcccgggggcgggcttccgctccggcccctcctgggacccgcactcgcgctccgggcccgctcgacgtcggccaccgacacacaccacgtggagatggctcgggagcgctccaagaccgtcacctccttttacaaccagtcggccatcgacgcggcagcggagaaggtgcgcaagggggcagccagcccagggtccgggatgtaggcgggagggagagtgttgggggttctctgctcaaggcctctctccctctctagccctcagtccgcctaacgcccaccatgatgctctacgctggccgctctcaggacggcagccaccttctggtaagattcacgccctctattttcctcgtggatcctggagctctcccagacactcaggctccagccccgccttcccttctcattttctcccagaaaagtgctcggtacctgcagcaagaacttccagtgaggattgctcaccgcatcaagggcttccgctgccttcctttcatcattggctgcaaccccaccatactgcacgtggtaaggtagagaggaccttaggtcagcgggccaccctgccccgggggcaagtggggagtctggggcccagagtggcagacgattgcttgcctaaaggtgtcagggccacacaggattcaaccccaggccttcagaagccaaaggtgtgtattcacggagcctggaagggtcgaagtgggggtttgatcacgtggtcgaccagctgggtggtgatccccatgggtaggtgggggtggctgttctctgctcagtgcccatgcggctttgtgaattcccacacctcttccttgcagcatgagctatatatccgtgccttccagaagctgacagacttccctccggtgagtgctgggccagagcagggtgaggggctgagaggttgggcttggaccacccttcctcatgactctgtgacctgcagatcaaggaccaggcggacgaggcccagtactgccagctggtgcgacagctgctggatgaccacaaggatgtggtgaccctcttggcagagggcctacgtgagagccggaagcacatagaggttggggcagcaaaggagaggccgggcctgctgggggtgggaagggcacgggattctgagacctcactctttacaggatgaaaagctcgtccgctacttcttggacaagacgctgacttcgaggcttggaatccgcatgttggccacgcatcacctggcgctgcatgaggacaaggtggggctctgggacctgagacccacctgggaacattaagtgagacagaggagactgggctggggatccgggtcaagggcctgggggctgaggctgtggggctggtgctttggggcagttccgaagttgccagcatcttggggtggggctaggggcgtgggtagtcctgacctcctttctccggccagcctgactttgtcggcatcatctgtactcgtctctcaccaaagaagattattgagaagtgggtggactttgccaggtgaggcaagaatggctcagggggtgggcagacatctggggcagggaaggcttgggtctgagcccttgcccggggcatgatctgcggggagcagggtttctcaaccatggcactattgacatttccagccagataattctttgtcacaggggctgccccgtgcacgttaggaagttcagcagcatccctggcgccagcagtactgcctagttgtgacaaacaaaaatgtctctgcacattgccatatgttacttaggggggcagaattgtttccagttgcaaaccactggtggaggggcccctgactgaaccctcgctcctatccgcagacgcctgtgtgagcacaagtatggcaatgcgccccgtgtccgcatcaatggccatgtggctgcccggttccccttcatccctatgccactggactacatcctgccggagctgctcaagaatgccatgaggtggggtggcttgatgtgctggcttgggggcggacaggaaccggggtgcttgtacctactggtctttcccctctgcatagagccacaatggagagtcacctagacactccctacaatgtcccagatgtggtcatcaccatcgccaacaatgatgtcgatctgatcatcaggtttgccctgagtgggagttgagctgaggtggatgggatgggggtctaggcactgtttctgacttgatttaggaccttgagccccttcctgccccattctgggacttggtccctgaccagacaaactattctctgaatcctgagatggccatgagctgcttattaatggatctggggccagctgcaggcctaggtatcctgcctctgtcagcagctgaggagcttgaaattgagaaatagtcaggagtcggtctaggatgctgggccgaggataaatgtcacatcctgtgagaaggtataagcagtcagtggccctggcaggggtgaggatgatataaacaaggcccaagggtctaggtggaccacattccagctctgggtggaaggaacaggaaggcagactttgcactgtctgcttggggggtggtgagtaccccatcaaagctgagccaagcccattgttgttgccatcttgctaggatctcagaccgtggtggaggaatcgctcacaaagatctggaccgggtcatggactaccacttcactactgctgaggccagcacacaggacccccggatcagccccctctttggccatctggacatgcatagtggcgcccagtcaggacccatgcacgggtgagaccctgccaggccaggatggaggggtgggggaccccaggagactcaagcctctgaagcctcctgtcctgtccccctgcccacccccagctttggcttcgggttgcccacgtcacgggcctacgcggagtacctcggtgggtctctgcagctgcagtccctgcagggcattggcacggacgtctacctgcggctccgccacatcgatggccgggaggaaagcttccggatctgaccccacagcctttggcctgctcacccgaccagcctgggccgcattccctgcaggacctcccgggtcaggcagggcggccccctgctccacacactgctgcatcttgggtctcagggacccagacagatggacttacatggagctgggcactgccctgcctcaacagggtccattgcctcctcgcctccagaacttggagcagggaagtgggcaccctgaggcctccagcaccagttccgtcattctcgttcctggggaacccccactctgacctgttattaaagttcacattttgaatgccctctcgggccccgtgtgtggggagggcaggtgaacttttgtttctgcccccattcaggttcactgagcccttgggttgaactggttcgtgtcccagtctcttacctgccctgagagcctggcaggccaggagtagaatgggtcccaagtctgttgcatgtttgatttggtgggagtgggatgactgcagcaccttatacaaagagctttcattcatcttgttgaacaa

SEQ ID NO: 3671 - DNA, 602 bp, Homo sapiens
tttctatgggaactagggccccaacctggaaagcttccattcagcaatctagcagcccaaatctgtcaacctatgatgtgccaggcctctgctaaggcattttatttttttatttacttgattagtacagcaaccctatgatacaggaactagtgtccccattttacagaagagaaaactgaagcacagggagcctgctaacttgcccggggtcatccccagcagggaagtgctgggccagggtcttcaggctgagctctgtctgcctctgggggatgagattcccttccccaccctgctgctcacccttggctgtgaccagaaacctcccaggtctggaaacaccttcaagtgctctgggcaaattctcaaagtttctgatgaccgctgctgcatttctgaaaggctcagataacccccgaggcaggggacaagtaagagtgggtacggtgagactttgaacaaatgtacagaaccatgaaccaaataaaccacttttctttatattaaaaaaaaaaaaaagagtgggcacggtggctcatgcctgtaatcccagccctttggaaggctgaggtgggcggatcacttgaggtcaggagttc

SEQ ID NO: 3672 - DNA, 281 bp, Homo sapiens
ttccacccacgccccgccacacacacacgcatacacacacatacccccgcagagggagaccctcactgagtgagcagccagttctgtaaaaagcagccggatggggcgaaccttccctgggccatctgaaaaagagctttgccagtctttcctctcttttcttgcttcattgctcccagcctcttcctttcaaacaaaaatcctacaggatttaagttggctagatgctatgaacatagctacaagcttgaaatgtttattgtcactagttattttaagtc

SEQ ID NO: 3673 - DNA, 521 bp, Homo sapiens
tgccgtcttagatgtcgtagtgtgtgactttttgtttaaattgggatgctggctaaaatttacaagccttaatggccgctttctcctctttttatctcttgcctcaatgttttggaaatgacatcagagtacagaagtctagaaacccctttaccaaggtcattcagcagaccctctatggaagggatagcccagcctctttgaaggcaactgttctcaggggttttcataaaatttttatttttaaaatttgaggacctgtgttagttattgattgctgcataactagtcaccacgtgctaagggcctcatgataacacagattcgctacggcccagcttctgggctcagatacctggcacattttggctggatcctctgctcacggtctcacagggcagagttcacggtgttgacagggctggaggcccggtgaggtccagtgaggtccagtgaggcccagtcaagcccagtgaggtccggtgaggtccagtgaagtcagtgaggtccagtcaggcccc

SEQ ID NO: 3674 - DNA, 521 bp, Homo sapiens; identical to SEQ ID NO: 3673

SEQ ID NO: 3675 - DNA, 306 bp, Homo sapiens
gtaggagccggatcgggggaggggccgggcccaggagcctcagccccgccggcagccctaagggcaaggtaaccgccacggggtccccgtcgcgaccccctccctcccggagctcccgtccccgggatcccaagctccgccccgccgacccccgtctcccctggaccccggctctagcctgacgagatccccaacctcctgaggtgctctggccccggattctcccgggctgcattctctgctcctcctcgcctgcgaagcatcacgtccgcttcccgacgctgagggcagccccgtccagggtag

SEQ ID NO: 3676 - DNA, 84 bp, Homo sapiens
gatcacctgaggtcaggagttcgagaccagcctggccaacatggtgaaaccccatctctactaaaaatacaaaaattagccggg

SEQ ID NO: 3677 - DNA, 7834 bp, Homo sapiens
aagagcttcgacagcatggcccacctaatattgtagttgccattgcaggaaataaatgtgatcttatcgatgtaaggtaagttattagaacgagagattacaatacctattatgtgttccttttcttaataagcaatatccagtttaagaatcttgcttttattttatctctgacattgaaaaattccttttggttgtgtggttggagtcctaaatttttaaactaaaattaagatttcaggcatttggagctaattatattatgtatacagacaggtgtgcaatttacggaaatactggttgcgttgcatccaacattatctgagatcagagcagcccccaggctcccatgacttagaatacttgaatgcagaaagcacatttattggcagtttccctgggccacttccatcattcccaaagcaagggctttttgaaaattttggctggggaagaaaaccctgccatccctaatcattccattagctacattactagtggtaccgagttttgtttcactttgtttgtttacccatggatgtggtgtaatcgagaagaccatgtctcagggcccatccagcagccatttagtccatcctttgtcatcataaatctggttaactactgggtaggtgggggtacaactaagatcttcatgggtagaatttctgatatgtagttgttgccttccagagaagtcatggagagagatgcaaaggactacgccgactctattcatgcaatttttgtagagaccagcgcaaaaaacgcgataaacataaatgaactctttatagaaattagtgagtatctctgtgccttatccatttcctctgtaaaagccgcttaacacagaatgatcttcctggttagaattcctgtcttacttagagcagtctagtctctgatattgtgatcagtgaaatgaagttggagaaggtaagagtaatgtccagttttcatatcatgttatagttgctgaagagctgccgcccttctggaaagagtgttgctactgaataaataatgcacagggtactgaggtcatgaaagctgtcccatttctttctctatttaaatatgtttctgttagtcgtccaaggtcattgaaaatgaacaaaatgaataaagggaaatgaaatgcaggtatacttgcacggtaagaaaaccctcaaaaataatactaggcaagtgaaaggtaagacctgttttcccttctctttcccttccctttccagaagtgttaatatgatgatactcgatgggagaggggctgctgcatgcctttgggatcctctgcagatcgtatctatgtttattcatttcattcaaattcatcaaaatatttattgggagctgttccaggctcaggggaaatagccgtgaagaagatagacgcagcccctgctctcctggagcgcacattctacagagggaaacagacagtgaacaccaaataaataggatcatttcagatcataataactgatacaaagaaaataatttaggatgaaatgaaggaatgtctgcaagcaattggggaaggtctccctaaggaggtgctatcagagctgaggtccaaagaagcaggccctgtagaggtgtggggagtcacataaacatgtcagacttccaggtggagaaaagcagaaagccgtcagagcagggtggatgtagcgttaagatccaccatgtggttgagagccaagggtactgaagcagggagggtcctttgccattgtgtcgaggaggggcatgaactccagagcccaccaaggccaggcaaggttgacccatgagcagagcaggcccaggtgaagccttgggaaccccagctcaggccaggcccagctccatcagctggggccacactggaatgtgggcccctggttgctgaggttgttttcacattttttttttacatgtcccattgtttagatttggccaatcatttaagtattttcagagtactttgcaggcctaaggagcccatctgctgccagatatggccagtgaactactgattgcaccctctaggccagcccgttcatttcagtgttaaaacgtcatgatgtgcccgggcatggtggttgtcacctataatcccagctactccagaggctgaggcaggaggatcacttgaggtcaggagtttaagaccaccttaggcaacatagtataaccctatgtctaaaaaaatataaaaatcaaaatactagggcattgtggcatgcacctgtagtcccagccactcgggaagctgaggtgggaggatggcttgagcccaggaatttgaggctgcagtaagccattgattgcaccgctacacttcagcttaggtgacagagcaaaaccctgtctcttaaaaaaacaaaaatcatgtttattgttgtcctggatgtaaatagcaggtacccagatggatttttgaaaggcaacataaagccagttgggaatttttcacagctcaagctaaaatgtctaagtgtgtggtgtcatgagtatgttaaaattactgctatctttttgtgttcttcactttagtggtattaaaaacaggaaagtaggccagacatggtggctcacacctataatcccagcactttgggaagccaacatgggtggatcacctgaggtcaggagttcgagaccagcctggccaacatggtgaaacccccatctctactaaaaatacaaaattagctgggcgtggtggtgcatgcctgtaatcccagctacttgtgaggctgcggcaggagactcgcttgaacccgggaggtggagattgcagtgagccgagatcacgccattgcactccagcctgggcaacaagagcaagactccatctcaaaaaaaaaaaaaaaggaagatagtaaactataccaacaatgaaaagtcttatataaaaactagtatgtacatattcaatttaactgtgaaaaacaaaacctatatgttcacaaagattagaaaaattgggagagatgtacatagactttcttgttcactggcttagtaaaactgcgtgagcacagtgcctggcacactgactttgtattgaagtataatagacatacagaaatgtgcacgtatcagaagtataaggctcagtgaattttcacaaactgaatatactccggtgcttggcactctggttgggacatggccgttcctacacccaacggtaaccatcctgatactaattcttcagattggtttatctggttttgttttacatatattttgtactttatatttttaaaaacactctgtttcctcttgtgtgtctggcttctttcattctgcattacatttttagaccatccatgtcattgcatctagctgtgaatgatccactctcatggctggtttgtgcgtgtgagtgtcagagtccgagttgtgcgggtaagggggcagtgaagaatacccacaatataattatccattctgctgttgatagacatttgggtagctgtttccaatttagagttattacaaacagtactgctctaaacattctgatcgtattctttggtgaacatctgtacacatttttgttaggtatatttatacccacaagaaaaaatgcttgtcattgagtatgcatgcattcagtacagctttaccgccaaccagttttcaaagtggtagttgtactagttgacaaccataccggtagtgtatgagaagtccgatcaccttctgtctctggtgggtagtcagtgatctccattttcatgacagttaatgaagtcgagcacatttccgaatatatgtttacatttgtcgtatctacatatcctcctttgtgaagggcctgttaagtcttttgcctgttttcctgttgggttacctgcctccttcttaatgttttatagttctttattttggagatgagtcacttattgactatgtatattggaagtatcttctactgtatggcttgcctttgatttttttagtcaactccttcgatggattgaagtttttaatcttcatataatctgactgatccttgttttcctttatgtttagctgcattaggtttttggttgctgttttagaaatcattacctgttcccagctcatgaaaatattctcctcttatttcttttaaaaatattatttgttcaacaattttttgatgtcatatttcacagatgtctcttagataccagctatatttcaatatccatttattgagaataatgacaagaagcttgggtaaagcttttaaacagatttgtagtatattcacagcagtgtctagtcatttgaaaagtagttagaagacattgggagatactttctcaatgtagaaaccatgctgtgtactccccacacagatccgcagacaactcaaagtggtggaggctcaaggcttgagagaacctgagtcagcggagaggccatcttagccttgttaatgtcaaaaggtgtacatgtccatttattccatgtttacaaaatacttctgtgtcaggtattgtgctgataagatactggaaacataaagatggacaaataggatctcttccctagaagagcttagggtctaatgtgagggagatagtcatgtaaacagatatgagatatgtgtagtaacctgtttctggtgtcctgattgattgtagtgtctgggatgttacagagtaaggaagtgggagggtgtcaggaaagcctttgtacaagaagcaacccttgagttatcagccaggtaggtagatgggtgatttaaggattctcttgaaattgtcattatgcttcacggagcagtgaagtgaaacctgttcattctcatgcattgttggtaggagaatatagtggcacagcctcttcagagagtaatttggcagcatctgtcaaaatttaaattgcacattcttcctgcatttgtgctagatagacactggaatacaatgtatgtgtcagacaaatacccaggagtagaataccgtgacctagctcttccactccgggcattaatcctacacacatactcgtaagttcagaaagatgcttcttgcatctttgttaataacatcaaaatattggaaacaaactaaatacccatcaatagagaaatggttaaatgaatggtggtacatctacaaatgcagtattttagagctgttaaaaagaaggcagcaggccaggcacagtggctcacatcagtaatcccagcactttgggaggctaaggcaagcagattgcttgaggtcaggagttcaagaccagcctggccaacatggcgaaacctggtctctactaaaaatataaaaattagccgggcgtggcggtacacgcctctaatcccagctactcgggaggctgaggtgggagaatcgcttgaacctaggaagcttaggttgcagtgagccgagatcatgccactatactccagcctaggtgacagagccgatagcctgtctcaaaaaaaaaaaaaaaaaggtgacggctctttctccatgtactatgatgccacaatccccaggatgtgttgagtgaaagtatcaaggtggagaatggtgcatatggtttgctttatttcttgccccatttggccttggaaaggggagatgggtagggatataggtgtgcctgagtgtttgtgcatatatgtctctggaaggctacacgagaaatgggccacagtggtggccttgtcatgagacagagggacaaccatgttctgactgaactttttaaaaaacaaatcctatgtattacctactcaaaacaaaatgtttttgatgtgtggctttttttaattaaaaaacgtttactaagtgctgtgtgatatccttgtttggatcctggggcagaagcaggacatgtagaaaaactgatgctatctgaaaaaagtctggagttaatagtgatgtggcaatgttgaactcttcattttgacaaatgtcccatggtaatatgtcagcactgggggaaactgggtgggaggtacacaggagctctatcatctttgcagcttttctataaatctaaaattattcgagtataaaaagtttattaaacttttttttttttttttttacttcagtgaaacctgtcaaattgcatctgcaaaattgttgtgtctgagaaagttaaagctcactcccttcccttttctcatcttggtttaggtcgaagaattccatccactgacgccaacctgccatctggcggtaagggcttcaaactccgaagacagccttcagagccaaagcggagctgctgctgaccgaacctcagcctctcagacttgatgatgaagtaggtggtcctgaaagttaacaggagggctggggtccctgccaccagttttcacctagccagtcttgagtcttctccgtgcaaaaaggattcacagaaatggaccagttctgttctccaaagactgcagcaatgatatttcagtctgtgaacttctattatgtaaagaatctctagtgtacaaagggactacatcgttggcttttgaccttgctgaaaaggaacatataattgtatggatggtaggattaagttgttgagtagttttgtaatcaagattttatgtaacatttgtaaagggaaaattagcacttttgtggttcttaagggaaaagaaacagaccttgtggagattataatttccttggtttctgttaccactgttagagggagttgtatcatttaacatatagtaggatagtttaagtgtagggaggacaattattgtctgaagctaaaatgggttatttataggactgatggaaatgatttcatctctgccatctctaaagcacttttcattgaacatgttagcctaggatacgtacagtaaattaacaatgatagcagcagatgcctagctcatcctgggtttgcttctgaccttgtcatgtgtgtgccaccaaacacgttattggcacctttttaaataagctctcatgatcaagatggtgatggtagagaagctgcccggaataaactgaatttcatatgttctaaaatgactagcaatggtttaaaaaggaagaagagtggaagtgaagaaggtggtataaatgctgtcaatttttttttaacccaagtattttggtggggaaaagcaagtatctattgcttagcatatgtaaagttgtagtctatatttatggggccattgcttaaagattataaattatgtaaatacattaataaattctaagtttcatttgacattccattgaatctcgcacccagtcttgcgtatgcctgcccagttttcagcctcttaacgggagactcaagcacattggtattgtataaaggtatagagcacttagcttacaatctttaaaggtttctctgccttcccttctacccacccgcctcccaccagatcccatctggaaatcataataaagacatatgccactttgacaaacctgactagtccttactagcctgagggtaaaagattaagctccaacctcaagtcatttacctggtcttggtaataagtttcttttagcttgtacagcatcctcagaccaactgaggagctttccttgttaacaatttagcttatctttctgtttcctttatttttcccctgcctctgttagtggttaacactcttttccctcagggagcctaatgaggtttttaatatcatctaaaaataaagcattgaagtgaagttggtgaaaatttgttcctggtctaatttggcacccttccaacctgagtattgtaggggaaggaaatttacaagatttaataggaaatgaaacagcttgaatttcaaactaaattgtattttcagagctatcctgaaactgaacagctgaaactttaaaaaataatt

SEQ ID NO: 3678 - DNA, 7836 bp, Homo sapiens
aagagcttcgacagcatggcccacctaatattgtagttgccattgcaggaaataaatgtgatcttatcgatgtaaggtaagttattagaacgagagattacaatacctattatgtgttccttttcttaataagcaatatccagtttaagaatcttgcttttattttatctctgacattgaaaaattccttttggttgtgtggttggagtcctaaatttttaaactaaaattaagatttcaggcatttggagctaattatattatgtatacagacaggtgtgcaatttacggaaatactggttgcgttgcatccaacattatctgagatcagagcagcccccaggctcccatgacttagaatacttgaatgcagaaagcacatttattggcagtttccctgggccacttccatcattcccaaagcaagggctttttgaaaattttggctggggaagaaaaccctgccatccctaatcattccattagctacattactagtggtaccgagttttgtttcactttgtttgtttacccatggatgtggtgtaatcgagaagaccatgtctcagggcccatccagcagccatttagtccatcctttgtcatcataaatctggttaactactgggtaggtgggggtacaactaagatcttcatgggtagaatttctgatatgtagttgttgccttccagagaagtcatggagagagatgcaaaggactacgccgactctattcatgcaatttttgtagagaccagcgcaaaaaacgcgataaacataaatgaactctttatagaaattagtgagtatctctgtgccttatccatttcctctgtaaaagccgcttaacacagaatgatcttcctggttagaattcctgtcttacttagagcagtctagtctctgatattgtgatcagtgaaatgaagttggagaaggtaagagtaatgtccagttttcatatcatgttatagttgctgaagagctgccgcccttctggaaagagtgttgctactgaataaataatgcacagggtactgaggtcatgaaagctgtcccatttctttctctatttaaatatgtttccgttagtcgtccaaggtcattgaaaatgaacaaaatcaataaagggaaatgaaatgcaggtatacttgcacggtaagaaaaccctcaaaaataatactaggcaagtgaaaggtaagacctgttttcccttctctttcccttccctttccagaagtgttaatatgatgatactcgatgggagaggggctgctgcatgcctttgggatcctctgcagatcgtatctatgtttattcatttcattcaaattcatcaaaatatttattgggagctgttccaggctcaggggaaatagccgtgaagaagatagatgcagcccctgctctcctggagcgcacattctacagagggaaacagacagtgaacaccaaataaataggatcatttcagatcataataactgatacaaagaaaataatttaggatgaaatgaaggaatgtctgcaagcaattggggaaggtctccctaaggaggtgctatcagagctgaggtccaaagaagcaggccctgtagaggtgtggggagtcacataaacatgtcagacttccaggtggagaaaagcagaaagccgtcagagcagggtggatgtagcgttaagatccaccatgtggttgagagccaagggtactgaagcagggagggtcctttgccattgtgtcgaggaggggcatgaactccagagcccaccaaggccaggcaaggttgacccatgagcagagcaggcccaggtgaagccttgggaaccccagctcaggccaggcccagctccatcagctggggccacactggaatgtgggcccctggttgctgaggttgttttcacattttttttttacatgtcccattgtttagatttggccaatcatttaagtattttcagagtactttgcaggcctaaggagcccatctgctgccagatatggccagtgaactactgattgcaccctctaggccagcccgttcatttcagtgttaaaacgtcatgatgtgcccgggcatggtggttgtcacctataatcccagctactccagaggctgaggcaggaggatcacttgaggtcaggagtttaagaccaccttaggcaacatagtataaccctatgtctaaaaaaatataaaaatcaaaatactagggcattgtggcatgcacctgtagtcccagccactcgggaagctgaggtgggaggatggcttgagcccaggaatttgaggctgcagtaagccgttgattgcaccgctacacttcagcttaggtgacagagcaaaaccctgtctcttaaaaaaacaaaaatcatgtttattgttgtcctggatgtaaatagcaggtacccagatggatttttgaaaggcaacataaagccagttgggaatttttcacagctcaagctaaaatgtctaagtgtgtggtgtcatgagtatgttaaaattactgctatctttttgtgttctttactttagtggtattaaaaacaggaaagtaggccagacatggtggctcacacctataatcccagcactttgggaagccaacatgggtggatcacctgaggtcaggagttcaagaccagcctggccaacatggtgaaacccccatctctactaaaaatacaaaattagctgggcgtggtggtgcatgcctgtaatcccagctacttgtgaggctgcggcaggagactcgcttgaacccgggaggtggagattgcagtgagccgagatcacgccattgcactccagcctgggcaacaagagcaagactccatctcaaaaaaaaaaaaaaaggaagatagtaaactataccaacaatgaaaagtcttatataaaaactagtatgtacatattcaatttaactgtgaaaaacaaaacctatatgttcacaaagattagaaaaattgggagagatgtacatagactttcttgttcactggcttagtaaaactgcgtgagcacagtgcctggcacactgactttgtattgaagtataatagacatacagaaatgtgcacgtatcagaagtataaggctcagtgaattttcacaaactgaatatactccggtgcttggcactctggttgggacatggccgttcctacacccaacggtaaccatcctgatactaattcttcagattggtttatctggttttgttttacatatattttgtactttatatttttaaaaacactctgtttcctcttgtgtgtctggcttctttcattctgcattacatttttagaccatccatgtcattgcatctagctgtgaatgatccactctcatggctggtttgtgcgtgtgagtgtcagagtccgagttgtgcgggtaagggggcagtgaagaatacccacaatataattatccattctgctgttgatagacatttgggtagctgtttccaatttagagttattacaaacagtactgctctaaacattctgatcgtattctttggtgaacatctgtacacatttttgttaggtatatttatacccacaagaaaaaatgcttgtcattgagtatgcatgcattcagtacagctttaccgccaaccagttttcaaagtggtagttgtactagttgacaaccataccggtagtgtatgagaagtccgatcaccttctgtctctggtgggtagtcagtgatctccattttcatgacagttaatgaagtcgagcacatttccgaatatatgtttacatttgtcgtatctacatatcctcctttgtgaagggcctgttaagtcttttgcctgttttcctgttgggttacctgcctccttcttaatgttttatagttctttattttggagatgagtcacttattgactatgtatattggaagtatcttctactgtatggcttgcctttgatttttttagtcaactccttcgatggattgaagtttttaatcttcatataatctgactgatccttgttttcctttatgtttagctgcgttaggtttttggttgctgttttagaaatcattacctgttcccagctcatgaaaatattctcctcttatttcttttaaaaatattatttgttcaacaattttttgatgtcatatttcacagatgtctcttagataccagctatatttcaatatccatttattgagaataatgacaagaagcttgggtaaagcttttaaacagatttgtagtatattcacagcagtgtctagtcatttgaaaagtagttacaatacattgggagatactttctcaatgtagaaaccatgctgtgtactccccacacagatccgcagacaactcaaagtggtggaggctcaaggcttgagagaacctgagtcagcggagaggccatcttagccttgttaatgtcaaaaggtgtacatgtccatttattccatgtttacaaaatacttctgtgtcaggtattgtgctgataagatactggaaacataaagatggacaaataggatctcttccctagaagagcttagggtctaatgtgagggagatagtcatgtaaacagatatgagatatgtgtagtaacctgtttctggtgtcctgattgattgtagtgtctgggatgttacagagtaaggaagtgggagggtgtcaggaaagcctttgtacaagaagcaacccttgagttatcagccaggtaggtagatgggtgatttaaggattctcttgaaattgtcattatgcttcacggagcagtgaagtgaaacctgttcattctcatgcattgttggtaggagaatatagtggcacagcctcttcagagagtaatttggcagcatctgtcaaaatttaaattgcacattcttcctgcatttgtgctagatagacactggaatacaatgtatgtgtcagacaaatacccaggagtagaataccgtgacctagctcttccactccgggcattaatcctacacacatactcgtaagttcagaaagatgcttcttgcatctttgttaataacatcaaaatattggaaacaaactaaatacccatcaatagagaaatggttaaatgaatggtggtacatctacaaatgcagtattttagagctgttaaaaagaaggcagcaggccaggcacagtggctcacatcagtaatcccagcactttgggaggctaaggcaggcagattgcttgaggtcaggagttcaagaccagcctggccaacatggcgaaacctggtctctactaaaaatataaaaattagccgggcgtggcggtacacgcctctaatcccagctactcgggaggctgaggtgggagaatcgcttgaacctaggaagcttaggttgcagtgagccgagatcatgccactatactccagcctaggtgacagagccgatagcctgtctcaaaaaaaaaaaaaaaaaggtgacggctctttctccatgtactatgatgccacaatccccaggatgtgttgagtgaaagtatcaaggtggagaatggtgcatatggtttgctttatttcttgccccatttggccttggaaaggggagatgggtagggatataggtgtgcctgagtgtttgtgcatatatgtctctggaaggctacacgagaaatgggccacagtggtggccttgtcatgagacagagggacaaccatgttctgactgaactttttaaaaaacaaatcctatgtattacctactcaaaacaaaatgtttttgatgtgtggctttttttaattaaaaaacgtttactaagtgctgtgtgatatccttgtttggatcctggggcagaagcaggacatgtagaaaaactgatgctatctgaaaaaagtctggagttaatagtgatgtggcaatgttgaactcttcattttgacaaatgtcccatggtaatatgtcagcactgggggaaactgggtgggaggtacacaggagctctatcatctttgcagcttttctataaatctaaaattattcgagtataaaaagtttattaaacttttttttttttttttttttacttcagtgaaacctgtcaaattgcatctgcaaaattgttgtgtctgagaaagttaaagctcactcccttcccttttctcatcttggtttaggtcgaagaattccatccactgacgccaacctgccatctggcggtaagggcttcaaactccgaagacagccttcagagccaaagcggagctgctgctgaccgaacctcagcctctcagacttgatgatgaagtaggtggtcctgaaagttaacaggagggctggggtccctgccaccagttttcacctagccagtcttgagtcttctccgtgcaaaaaggattcacagaaatggaccagttctgttctccaaagactgcagcaatgatatttcagtctgtgaacttctattatgtaaagaatctctagtgtacaaagggactacatcgttggcttttgaccttgctgaaaaggaacatataattgtatggatggtaggattaagttgttgagtagttttgtaatcaagattttatgtaacatttgtaaagggaaaattagcacttttgtggttcttaagggaaaagaaacagaccttgtggagattataatttccttggtttctgttaccactgttagagggagttgtatcatttaacatatagtaggatagtttaagtgtagggaggacaattattgtctgaagctaaaatgggttatttataggactgatggaaatgatttcatctctgccatctctaaagcacttttcattgaacatgttagcctaggatacgtacagtaaattaacaatgatagcagcagatgcctagctcatcctgggtttgcttctgaccttgtcatgtgtgtgccaccaaacacgttattggcacctttttaaataagctctcatgatcaagatggtgatggtagagaagctgcccggaataaactgaatttcatatgttctaaaatgactagcaatggtttaaaaaggaagaagagtggaagtgaagaaggtggtataaatgctgtcaatttttttttaacccaagtattttggtggggaaaagcaagtatctattgcttagcatatgtaaagttgtagtctatatttatggggccattgcttaaagattataaattatgtaaatacattaataaattctaagtttcatttgacattccattgaatctcgcacccagtcttgcgtatgcctgcccagttttcagcctcttaacgggagactcaagcacattggtattgtataaaggtatagagcacttagcttacaatctttaaaggtttctctgccttcccttctacccacccgcctcccaccagatcccatctggaaatcataataaagacatatgccactttgacaaacctgactagtccttactagcctgagggtaaaagattaagctccaacctcaagtcatttacctggtcttggtaataagtttcttttagcttgtacagcatcctcagaccaactgaggagctttccttgttaacaatttagcttatctttctgtttcctttatttttcccctgcctctgttagtggttaacactcttttccctcagggagcctaatgaggtttttaatatcatctaaaaataaagcattgaagtgaagttggtgaaaatttgttcctggtctaatttggcacccttccaacctgagtattgtaggggaaggaaatttacaagatttaataggaaatgaaacagcttgaatttcaaactaaattgtattttcagagctatcctgaaactgaacagctgaaactttaaaaaataatt

SEQ ID NO: 3679 - DNA, 402 bp, Homo sapiens
catgtggttatataatatcagtaaaacagacatgaaaacaaggtggaagaaggacattgtgagaagaatattgaggaactttgtgttgatagaactgtttgacatcttagtggatgatattcacacagatatatacatttgtcagtttatcaaattaaaatttaatttgataaattttaaatttatcgtaaaactcaaattaatacgaaattttaaaagccaaaaggttaaactcattggataagcagttccagaatccatagttctgtatgtggtttatgtatgtgcaccaaatgctcccctgtgataatccctgcctgtgttcaggggtaaaccaccattaacaacaggatgtaaatacagtgtcatcagatcataagtaggggtcaggcttcagagtca

SEQ ID NO: 3680 - DNA, 919 bp, Homo sapiens
tattttaccaaaagatggtgcaaatctatgaccttcacattttttccaccacacccaccagtagctgttggtgattgcatggtgtctcggtgcatggggaaaggcaaggtcttctgagctcatcttaactggtgaggcatctggatgtgtctgatcttactgtgatgttttactgtaccgagcccaatgtgggtccatctcatcagccctttgctgatttcatgatttctcaccctccctcccatatgtagggtgtgattctgttttattatagccacatgttttattaacagaatgagtgatatgaagcttgtacttatgcatttctcgggcctcttccctcattttcatcagtctgtctaagaacttgactcggcactgtttctcgtgtaatatccttctaatgcttagcaacaacaacaaaaaattgctctctcagatccataatccatactcagtgaaagcagggaaaaaatattttcacttattttatttgcttctaaaatgcaaagatgaatactaaagtcagaagcagtgtttcattttgaacacattttggattattaagctgactaagcaatgatctaatacacatttcatattttctttataataatttcttatggagaagaggctatatttcaaaggaattgagacatactcccatctataaacatgtttggttttcttacgatacagggccatttttttaaaactctcaggactgaacagaagagaaaaattattaattagctgctactgtatgttgattcttttcggagaaattgaaataagctctttgcaggcgtccaatcctagaaaccaatggtctccagaactctcacacaagtgtttttctgattctatgataactaattaaccatcatctggtgattaaaagaacataaagtaagattat

SEQ ID NO: 3681 - DNA, 402 bp, Homo sapiens; identical to SEQ ID NO: 3679

SEQ ID NO: 3682 - DNA, 4457 bp, Homo sapiens
cagttctccacgcaccatgttttccctctggccacgctgtgggcagagccactgtctgaagaagctggtggtgtgtaagtgcgtcccccctccccaccccaccccgtccaagtctgttacccaggttgcttccttaaatgtgaaaaaaagctcaggaaggcttcggagacagtctcctcattctgtataatgaggcccacctctcagcacattagacagtaaagtagtctattgataataaaatggcctgttgtgaagatcatggcaagtcacgattaggtgatgaaagggcatcttcattgcacacatccccatcgttcagcacagagcagagaattctttgttctttccaccgtggtggcgcccaaaaccaagcaagcatttacattaattgatttctgttcctcttgaaataaagaggttgcttttcatatttgaggatcgatactgtaatgacaggttgttaaatgtcctggtatttatccttgtgaacgttttaggaatggcttaaagataactacacctgaggagcagttcactctcatttcatctacaccccaggaaaaggttagtctattatggtattttccttcaatcttcgccctggctctttctgcctcttgtgtaataaagaagaaatataaattgttcttgcttgactaatgatgcacagttctgtctgataaatcttcattaacccaaaactgtaggttcttcattgtttttttttttaatgtgacttaattttaaacatatagcagagaaatacaagagccagtcaatattactctattaataagaaaagcattaggacacaaataatttattcacaccaaagaaaactagcaggatttaaagcaatgcttgatgaattgttgccttaaacttattgacgttactttttgctcctagacaaagtggctacgagctataagccaagccgtagatcaggctttgagagggatgtctgatctccccccttatggaagtggtagcagtgttcagagacaggaaccacccatttcacgcagtgccaaatatactttctacaaggatcctcgcctaaaggatgccacctatgatggacgctggctttcagggaagcctcatggcaggtgaaaatgttgaagatttatgcctggggtgaggatgatcatcacatgatagaaaaagtattaattatctgaaatattagttgacatgcattattctttgcttatgcattccagaggggttttgaagtggcctgatggaaagatgtattctggcatgttcaggaatggcttggaagatgggtaagaaaattgtgtaaaacatgacagtaaattcaagttcggtaaggtcgtaaattatgttattttgtatgcagagctgcttttcaaacaagtagtagatttttgttgttattttttagaaatgcacatgtatgagcatgaagagagccaggagtgaggggtacagcctctgatttacctagactgggtcattttccctgatagccgtgtgacctcaaattacacagccttccatctgttaaaatggggctatgttttctattcatttctcagttgtgaagactgagatctttggtaatgttaatggtgggactattgagatggtagtcctcctttacacaaaggacatagaaaaattttcctttcagtcgttttaagtcatctttaatttctgtgatctgttaaaggagaaattttccaagtgctatattatctcaatgatgctctaatgactttttaaaaataagtttatcatgttttctaacactgtaaatgtatttacatgattagtttatggcagtattttgtataatgttaaggaagtaatttagtatataaaaaatgttgggtaggtgattttgtgtgtctgtgtgatcatgtaaattcttgtgatgtgttaaaatctctttttaatagattgttagaatgagaagagactttagatcatctaatttacccactgagttgcccctcttattatccaaataaaggagctagatacctgggcttaccgcatggtggtgcaggtaattagtgacagagataggtgaaggacacaggtcttctgtttttcactggagttggattaaaacaccatatcttagtgtagtggggctgatgtcccactcctcttgccaaacagcttaggttatagattcaccttaaaccaagatgctgttttaaccctttactcctacaggtgaatgttttctctgtcttccttgttaaaatgtttaccaggatatacatacaaaaggtgaatatgtcataaatgcatcttcttttgttattttttctttttcatggcaggtatggagaatacagaatcccaaacaaggcaatgaacaaagaagaccattatgtgggccattggaaagaaggaaaaatgtgcggtcaaggagtctacaggtaacattggaaaggctgttggactggtgtttgtttttcatataaccatgtaaacctgaatgtttgcatagccaaaatttccaagttttaagttttgtttagtcttatagataaaatttagaggagtaaataaaattgaaactctgtgtgatcatcttttaaaggttaacccctcatctatcgcaggattaaaatactggattattaaatttagttcttatctaaatttttttttttttttttgagatgaagtctcgctctgtcacccaggctggagtgcagtggcgcaatcttggctcactgcaagctctgcctcccaggttcatgccattctcctgcttcagcctcccgagtaggtgggactccaggcgcccgccaccacacccggctaattttttgtatttttagtagagacagggtttcaccgcgttagccaggatggtctcgatctcctgacctcgtgatccacccgcctcggcctcccaaagtgctgggattacaggcatgagccaccgcacccagccctaaattttatataccttataaaccataattttatgaaaaaatggtcttatctataataagacatataggattctaatggacaaaacttttattcttccctcttaaaaataactcattatttcattttcccataagagaataaaaacacattgtttttcatgttaatgcaaaataccacacatggtgtctttaactttttaactttaatcattcgaaaatgaggtttttttaattggtgaaaaataatcatataaacaaataattatagctaccagtgagactgagtatggttttggattttctaaactttgtaaaaatgagcatcagaattcaatgtgcatgtgataattatccattctttccaaccacagctatgcttctggtgaagtatttgagggctgttttcaagataatatgcgtcatggtcatggtcttctacgaagtgggaaattgacgtcctcttctcctagtatgttcattggccagtgggtaatggataagaaagcaggatatggtgtctttgatgatatcactaggtacagtattctccttctattcccacagtttaagccaatgattaagcaccatcattatttaacaagcagtttatacttattttgtctttttcatggagattagtaagatttctttgagtttgagtaggtgaaaaatgaaccttcttttatgacaaacccttttatttacttttttattttttgagacagggtttcactctgtcacccaggctggagtggtgcgatctcagctcactgcaatctctgcctcctgggttcaagggatcctcctacctcagtctaccaagtagctgggaccacaggcacacaccaccacgcccagttaattttttgtatttttggtagagatggggttttgccatattgtccaggctggtctcgaactcctggcctcaagtgatccacctgcctttgcctcccaaagtgctgggattataggcatgagccaccgaatccagcctctttctttttaagttagcaaacttttgtgtaagaaaaacctgtgcataggttttattctgcttattacattttaaatgaaattatttagagttgaattctagaccttctttttaaaaattatgtattttaaagttaccaagtaactacctgggatatatacagatctgtgtcagaccacaacattaaattcctcagagaggattactgagtgagatgtcttttgctatcactttgtcccatatttgaggagacaaagttaactattttaactagaaaaatggaagcaataccaacctagggttgatgcctgggatctcccatgtgataattgtcttttccctactttatccttatcttcagtgctttttcttttctttttatttctgtgcaggggggaaaagtatatgggaatgtggcaagatgatgtgtgtcaagggaatggtgtggtggttacccagtttggattatactacgagggcaactttcaccttaataaaatgatggtgagtgg

SEQ ID NO: 3683 - DNA, 278 bp, Homo sapiens
ccatcattctcagcaaactatagcaaggacaaaaaaccaaacactgcatgttctcactcataggtgggaactgaacaatgagaacacttggacacaagaagggaaacatcacacaccggggcctgtcgtggggtcgggggaggagggagggatagcattaggagatacacctaatgtaagtgacgagttaatgggtgcagcataccaacatggcacgtgtatacatatgtaacaaacctgcacattgtgcagatgtaccctagaacttaaagtataat

SEQ ID NO: 3684 - DNA, 508 bp, Homo sapiens
aatagctgatttacatgccataaaattcacccctttcaagtgcacgtttcagtgatttttggtcaacatggctgtacaaaccaccaccacaatccagtttcagaacatttccatcgcccaagaaaatcccttctgctcattcagtgacttccatttccacctaaagtcccagccaaccactaatcacccttaatcactctatagatttgccttttttgggccttttgtataaatggaatcatacatgcaatctcctctatgtggcttcttacacttagtataatgtttttgttttttccatattgtggcatgtatagtatttgttcctttttatggctgaatagtgttccaaaactacattttgtttatccttttaccagttgatggacattgggttatttccaactttagactattgtaaataatgctgctataaacttttgaatgcagtttcttgtgtagacatatgttttcattttcatttctcaagtagatgcctggagtgtaa

SEQ ID NO: 3685 - DNA, 442 bp, Homo sapiens
cctggcatataaaattctttaagactttgacttctgccttatacagtctgttttcctcttatactccatctgcctaatgtgttatggtcttatacaactatttgtagtctgtggaacatatgttgctctcgggtttccttggctttgcagaaactgctccctcagctggaaatgctcacagttccaattcatctggctatcttagacctgtcccttaagatgctccagtgccatctcttctgtgatgctgtttgattttctaaggtagagccaattactccatcctttctggggtctaccaatcttcgcaaactttttatagtgcaaaaaggcagaatagcaaattctggctcctccatatactcactatatgaattctgggaaattatttaacctttctagacctcagttttttcatttaaaataaggattatatgccaat

SEQ ID NO: 3686 - DNA, 113 bp, Homo sapiens
ggctgaggcaagagaatcacttgaacccaggaggcagaggctgcagtgagccgagatcacgccattgcaatccagcctgggcaacaagagcaaaactccatctcaaaaaaaaa

SEQ ID NO: 3687 - DNA, 517 bp, Homo sapiens
cctcagcctcctgagtagctgggattacagatgtgttccaccatgcctggctaatttctgtatttttagtaaagatggggtttcaccacgttggccaggctggcctcaaactcctgaccctaagtgatctgcccatcttggcctcccaaagtgctgggattacaggcgtgagccattgtgctcggccattcagttatttttctgtttccttagtagagcccaatgataatgaagaatagctgcagagatcaaagtatcctgaaatctattctgatttatgaaaagaaatttaaatggttttcaaaatagttttactattttctttgaaaacttgtgatccacaaattatctatatacatgcataaacctatatatgcacagacatcatatctcaggtaaacagaagacacatcttctaattttactggataaagtattcctcactgtagtatggtaaggttcacatttaccaattatgtattatttaaacaatcttactttaagatgaatgaatttt

SEQ ID NO: 3688 - DNA, 373 bp, Homo sapiens
tactatatacataggatatcatttaaaagttggatttcaatggaagtgaagacataaggaaaggcagaaagaccatgtttcttgaaactatttctggtctggttcttgagggtttctagattcttgggtcttgtgcatatttatattatcttatcaatattaatcaggcaatggctctaaaaattttacccgtctaaaaagtgttgtataaaaaggcctcggaaaatggaaaccattaacgaagtatcttctacttcactttaaactctgctttaagcatcaactagtctgtcttgaaattcactgtaaagcttgactgcctggattcgaatctatagtataagcaaattttgtgaatgcataaactggtatc

SEQ ID NO: 3689 - DNA, 6072 bp, Homo sapiens
tccaaaaagtgatattggatggatatgggagctgtggccctcagaatttaaacttaaggaaagagtgggaaagtgagggtaagtgtgaaggtcacaatggatattatgatggacatacaaaatgtaagacaactacctataacaaaaacctcactgttacaggaggtcaaaaacatgaaaaaactcaatttatgtcagttgctttttctaaaccatgtgtttctgtaagtaagtgtcaacatcaatttttgaaacttaccttttcttttaaaggaaatttggataatccgaatagtgacttagtccatgtttcaaataatcatttaaaccaattaaaatatagaactggagtaaatgttcagtcaaatatttctgaaaaggagagatttaaaaacgaggaggtgatttctaaatatgatcaatttgatggatctttgttaaaagtttgtttcaccaacaaataacacctcgttctgcctgtgatcaatatagaaaggtcttcattcattcatcattgcttaatcaatgtcaaggaatagataatttgggaaaatatcacacacataataaaactttgacagcctttaggcaggactataccctaaataattaccagtatatttgtgttgcagagaaaaatcagtacaataaatctgatacaacattaagccaaggcataagccccagaagacatcagaaaactcattttctacataaccattgcaaacgtaaaaaatgtgagaaagcctttcatgaatgcaccaaccatgtccatcagagtatctttattcaagagaagtctgccaaatgtaataagtgtatagaaacttttatccagtcatcaaaacatactcagcctcagagaatccatattggagaaaagtcacacagatgtaataatggtgagaaaatccttagtaaattgtcaagtctaagaaaacataagataatccataatgaagagaaaccttacaaatgtaaagaatgtgacaaagcctttaaccatcgttcacaccttactcaacatcaaataattcatactggagagaaaccatacaaatgtaaagaatgtggcaaagccttcaattctagttcatattttactagacatcagagaattcacactggagaaaaactttacaaatgtaaagcgtgtagcaaatgttttactcattcttcaaatcttcttgtgcatcagagaattcatactggagagaaaccttacaaatgtaaagaatgtggtaaatcatttaaagtgtcttcagcccttactcagcatgagagaattcatactggagagaaaccctataaatgtaaggaatgcagcaaagcctttaactgtaggtcgtacctaactaaacatcagagaattcataccggagaaaaactttacaaatgtaaatcatgtagcaaatctttttctcgttcctcaagtcttattgtccaccagagaattcatactggagaaaaaccctataaatgcaaagaatgtggcaaagcctttaattgtagttcacgccttactcaacatcaaagaattcataccggagagaaaccctacatatgtaaagaatgtggcaaagcctttaactgtagttcatcccttactaaacatcagagaattcatactggagtaaaactttacaaatgtaaagcatgtagcaaatctttctctcattcctcatgtctttctgtgcatcagataactcatactggaatgaaaccatatatatgtaaggattgtggcatctcctttaaccggtcttcaaaccttagacgacatcagatgattcatactggagagaaaccctacaaatgtaaagaatgtggcaaattatttaatcgatgctcaacccttactcgacataaaagtattcatactagagaatttctatagttgtagtaaatgtgaaaagagttttatccaaaatttagaacttaaaaatcaccatagagtttatagggaaaccgactttacagattgaataaatgggaggaagtatttaatcagaactcaaatctgaatgtgtcaggacttacacaaaaaaggactaaagcacagatccccactttaaaattaaataagagtatttgttatggaggattactctaaagccaaagcagttacttattttgttatgtgtttcaaatgagcaaaagcattgatgtttggacaagtaattattcagtgagcatgttatttgtattgaaaacatttgaaatttgtataaagcaaatcataatttaattctcagattagttgttataccttaatgcctagtgtttatataaaaacatatagtctattttttctgcatcagagctgtaagaggtcgttctatagtaggtgaacatcattaatatcaacttattttcttggaaatttaatggcaaatgtaaaatacatgaagaaaatctaaaagaggctctttgtgtttgaatcattaaacagtaatatgtgtaaacatatagtacatatttagggcattagtattctatactaaagtaaaagaggaatattctgaatttatttattacatcaattgctccttaagtagaaaaacactggtcagttatttaaaatactggcatacctttatagtacaatgaagtagtaatcttgaatattatttgatgtgttaaaaataaaaacatcttcacagatatcagagaaaagtgaaaactcatatctgaaagattataaatatactttatatcaattttccagagaacttaaacttctaataatattggtaatattctcatggttactattttatattctttcctgctttttgtagctactggtgtactatgacagttataataaagattatatgggggtatacttaaatgccatacttttaaaatcctgaatcattgtttataaagttttattcaatatttttctttgcacatgccctttttcagtccaattgaacacttagagatttttctttgctttcacttgcattaaatggaatatacagatgtactaagatagaaagaaaaaggtgaaagagaactatacaggcagaaatgcatgtgtgtgtacctgtcttcaaatggaaaagaaaatgatggatcacaacaggaaactggagaactgttgatttattacagttctcaaattagaaacctcccaaattcttaaagctaaattagcttttcattgcacactgaatttttctctgataaatctaatgtcttctgggttcagactttatcccgtacaaatccttttttcttgcctgtgattcatgtgagaagaattatataattttcttatttcaaagcttataaactattacttataagttctcatggattttaagaatgtttttgtaaaatttaatggtgctgtccaggtgtggtggctcacgccggtaatcccagcatttcgggaggctgaggcaggaggatcatttgaggtcaggagtttgagaccagcctggccaacatggtgatatctcgtctctactgaaaatacaaaaattagctggatgtggtggcacacacctgtaatcccagttactcaggaggcaaaggcaggagagttgcttgaactgaggagatgaaggttacagtgagccaagtttgtgcctcacactccagcctgggtaacagagtgagactctgtctataaacaaacaaattatctgtcatctacctatagacataaccctactgaggaggatggggataaaaggtctgcatctaagtcactttgaaaaacagtattttgattgaatgctgtaagactacacaaatgctgtattctactgagtaatattttattttcctacaaggatatgcattagcaattctgaaacagttttacatgttattatataatatatggaggctgtttctcagtgtagttcacaaaagttaaatggtgaatgctagcatgaatcttgtggtcctagcccaaagttggaaatatcaggatgaacccatgactaatacatctggatggatggatggatgaatagatataaagataggtaggtaggtaggtaggtaggtagatagatagatagatagatagatagatagatagatagatagatgaagcgatgtctaagatatctggaaggatggatggatggatggatggatagttagatagatagatagatagatagatacatagatagacgattcagagatagataatgttccaaactcttgagggccaagaactggtgacatcttgtatcaacacatctaggtctacaatcttggtttctaaacaacattcattaaaaggacccaagggttgaagttagaaaatacaagttgagctagagtatcttgtaaagccacaaagaaaaaagtgcttaataaaaatgatggggacttttcaaagggagccaacctgaaagacctcccaatggtccaagctccaacaatatgagcaataagttatgatagctttggattatggcccacagaataaagtaatactcatctctactgtgtgaataaaagagattaaataaggaaagaaggaatgaaatctacaatatttaaaatacagatcaatgtagttggataatgcaaaataaatcaacactagaacatcacagtaataattaccatagggaagattccccgaggaattcaaaaatttcaggaaaaacttaaacactaaagagtgtatttgggccagtctcggtggcacatgcctgtaatcctagcactttgggaggcctctgcgggtggatcacctgaggtcaggagttcaagaccagcctagccaacatggtgaaaccccgtctctattaaaaatgaaaaaattagtcgggcatggtggtgggtacctataatcccagctacttgggaggctgaagcaggagagtcacttgaacctgggaagcagaagttgttttgagccaagatcatgccattgcactccagcctgggcgacaagagcagaactctgtctcaaaaaaaaaaaaagaaaagaaaagtgtatttgcatattttaagtatctaccatctaatatttattaatacaattttttcttaatttcttagacttgtgactatttgaaacaaattataacactgtattgtaggatttataatttgtagttgtaaaatttataacacatggaataagaagataaatggaactgttctgtagcaaatttttcatgttttatatttaagacagtatagtattaactctaaaagtatggtggatatgttaaagattcatattgtattccctgcagcaaccactaaaaaatgcaaagaagtgtaatgtaaatgctaaaaaaggagataattataaaatatttatttgcacaatatttatgtatcttttagtcataatagcccaaaacaggaaacaaccaaaatgtccattaataagaaaatgaactaattgtatagcttttagaacaaaatacagctcaggaatatgaaaaaccaagcacacatcctggataaaattcataaacctgctcaatgagagaaaagttggacacaaaattgtactttatgtattttgtattttattccaggcaaaataatcctatggtgaaaaaaatcaacaagataatctctgcttgagaaaaaggaccaaagacaagtgaattttctgagggtgatgaaagtgttgcttcgaaaaggggtgaagtttatatgggtctatttatttgtctaacatgtacagttaaggtttatgccttgcaatgtatgtacatcttcacaaaaaaaatcttaaaaaaattaaatgggtgggggtagggaaagggttgaagtatagatgaagcagaagtggtacatgattagtagttgaagctgggggcaggtctatatattttatttttatgtctttaatagcatttgtataaatgtacaatattcgtttacaatgttagctcaggatcttgtttacctttggacagggagggagggagaaatttattttctgggtaggagtaaagctggttctattcctcagttatgtaaattatctgttataatccaaaaagctttacatgaatgtttctgtatgtaatgtggtatatcaataaaaaattaaatattacatatttg

SEQ ID NO: 3690 - DNA, 1570 bp, Homo sapiens
aaagtatcaacgtcctaatctcatgggcacctcttgggtctttccatttttgccttcatttgctaagtggcatgcttttgattttttgagatgaaactttttcccagcaaagtcttttccccacagtgatgctctgaaagccaggacacctagcacaggaccctgggcatagtatgcactcagtacatgtggagcatgttgatcaggaacaaaaggagtagcaaaggtcagttcctgcaaaggtgagtagataatacaggtatgactgaaaggctgcaactcaggagtaaacattttacattcattcaagagacaatttgcaactagtacaccaaaaaattttggcttgaagcagtactttggggacttggctaaactctgtaatcacttggagaactttaaacaatactgacgtctgggccctactccagggattttgattttattggtctgttgcaatttaggttttgggaattgtagggcctccgcatgtgactgtaatgtggagccaggggtgagacccactgtttcagggtgagggatgcattagctgtgtgtgatttccatgtgtgctgcaagtatttaacctatgaccactcctgcatttggagtcttggaaattgcagcaggaggaaatgtctctctacagatctattttttatgtcacttgcttttagagtaagaggttatttcaggcacagtaatttgatttaatctgttttcaaatactaaatctgaaaatactaaaatgaaaagaatttgcaaatgtgagaatttgcaaacatgtggagtgtgttcttatgtgctttccagtttctctgatgataagaaatgagtaatgttgggccttgatttcctaaactcagccctcagtcactttctcaaattatttgaagaccttccaagttgcttcagaagcattgtccaaaggagattattcccagtagtgaagaataatagatggatgagaatgtctaaggaatcctacttctgtcgcagaagtggcactctccagaacctcaagggcccatggagttcatgggctttggagtcaggcagagttgaccctgagtcccatcccagcctcttaatagactagttacttgacttggaacagttatgcaagacaaagcacaatgatactgattgcagtaatgggaacaattcattcctctctgtatccatgccctttgcaatgcatgtttttagctactcccatggagggaaagattctgtttttccagtccttggatctgactggccttatttgctgtggccaattcatacttactgttctagtgaaacaattaggcatgttttgctcctcattctagactttaattaaaattaaaattttatgatattttatttctactgtattttgctgtattcattctgctcagtattctagttcaccggtcctcttatctctgtttaatttagtggtgaacctatacattgtctggtaacttaattttgtattttcgtattctattgggctgtcgttcaaatgtggcttttaaacttcagttacttgttctttctacaaaaataaacattgattttctac

SEQ ID NO: 3691 - DNA, 2331 bp, Homo sapiens
tctcactctgtcgtccaggctggagtgcagtagcatgatctcggctcactgcaacctccaagtcttggattcaagcaattctcctgcctcagcctcccgaggagctgggattacaggtgcgtgccatgacaccaggctaatttttgtatttttagtagagacagggtttcgccagttggccaggctggtctccaactcctgacctcaggtgatccgcctgcttcgcctcccaaagtgctgggattacaggcatgagccaccatgcccggcccattgttgttggtattcttaaagaaacagagccatgagtggttagtacacaaatagtttatgcagtaaataactgtggttacagttcattgttgtcagcaatacagcattttccatcacaattataggtgaaacaaaacctcatgaagtagtcatagcacattcatgctagcgagagcatattacaaagcaatgcacgtgcattataggggcagacaaaactggggaagggctatattttcactcacctctggttaactttgtgtattttgtcattaagacttacattatgtttgggtcaaacaaaaaacccaaagagattttataaaagtttacaaccattaaacagtattgtttaatcccacaaatggataaagcaaactactatagctcaacaatacacaaaccaggactaaaaatagtcaatctatgtatatagctagctaccatacaatagatattgaatatgctgagtctttacaaaggcattgactattttagacgagcaggttccagaaatacacttgtttgtttccaatgagaactaactgtagtgccatttcagttgaagactatgcactcctcagtgtcagacgtgaggataagcaaactaggggaaggcagaggagggttaggagggagacctgagcggactctttggacagctcagcattactttctctgtgcagatccagacctggttcacaaagtagaacaaagtgtattgaaatttttggccctcaaaaagggcatttgtacaaagtcccatacttacagcacagattgaatggtaactgagtgcctctcaaaatgaactcttctatgttagaagaaaactcagggccaaaggttaatggaaatcagtgtttgaattactgtataaagataatttattccaaaatagaaaaaaatgaattttagagaagtattctcctggaaactagcagggggtgggcagagagagagagagagagggagagagaatcatgctatgtgttttattacttagaagaagaaaagttttgtagaccatttccataaggcatctgtcattctcccatacctggcaccttaagagagagtgcaatggctcgatattacctttgaaaaggcttcttttcctttgagttgtcttacagaaagggtgccctggattgaccatgccactccggggtcacacttctcctttagatcaaaatgaaaacaacaacaaaatcacaaaaagaagaaaaaaaatcagaaaagctacaaaattgaaggcctcaacaggcacagacttcctatgaggtcagaaaatcagtgaaataattaaaattacaaagcacctcttgcaaaatacactgttttttgaaaaccacacaaaacgctttgtagtaacccctgctgagtgcttagaggtaagtatcctgaaggacacatgcttagtcccatgaaggaagcttgattttattatcaaggcagccgagggggtcccaatgcttctttgttatttgctgttttataattacagacaaaatggaaagtcaagaagtgcgtagacctcaatataaagaaaatgtttctctaataactaggaaccatgctgtatttatgtattcatagttgtatagctccatttgtagattcttgcagatgagtcactaacactgacactttttacacaaaatcccttttgcaaggacatattaaatttaataggctaaagagaacttatgcaatataatgcttgaaattttacacatgatagctgtgcagtggtaataaagaggccttgaaaaattgtttttgtctataaattactactgccctttagaaataaaagctccctcacaacccctgagctacttccctgtgacacacagtgccacaaacctcatggtgaaaattcagtgccaaacctagcttcagatgagttttgtacatttgtttctatacaatcaggaaaaaaagagatacaatttgtatcaacaaaaggtcatttctggttatttgaggcattgctcctagccgcttttggttcataccaaaaagaagaatgagaggagaatgacaatcgttttt

SEQ ID NO: 3692 - DNA, 530 bp, Homo sapiens
gtatacgaagatcagaagataggagatagaatgtaaagctgtggttaactcaagtgaaacattggttaagatgcagtattgatcaacttggacagagacagaaagccagaaagcagcatgcaagccattgtcaaaccaccagaaacaaccctgactacagcctcacattcagagtgtttcacagtaagaaacatttataggcagtgtcacaccttctcatgaagaaacaaaaggccaaggcccggccttctcaactttcatgaaaaaacgatcatagaagttagcaagttccagctcaggaaatagtgagctgatcatggttcgaaatattgaaatatacaatggattcaaaaagggaattcatttagtgcagcttaaaaaaaacaataaacacctcttctagaggcatttagctatgaagttttccaccctgagcaagatacaagttgcgcaaatggtgtcgcccaaaccaaaagtcctgccttctaataactcatttaacaattatttaacagcaagtgcactctttg

SEQ ID NO: 3693 - DNA, 657 bp, Homo sapiens
tcatcagtggcaaagaacatggctcccgtgcccaaggaactccctgttttgtggtagagacggtgtgccaaagtgagtgacaagagctaagaggtattgctcaatattcctacaaggcccactgttgggagggactaacagtagcttgaccgggggttggacagcttgatagaggaggtgaaattggcactgggtcttcaaaggcaagactactagtcagaacaaggagtagaaggaaggtcaaagtctggagaggttgagaaagcatggttgggggcaccaatgcagggtacaggataattggaacatggtgatatgaaggacttggtattacatgaggcctgaggggaggtggagagggatatgaccagactagttcattttccacctgagattagggcagaagcactggatgtttgttgattgtcccgtcttggaattctagttgttcttaccactctctttaccctcatgctgccactgccctccaaggaagtcttaatgtcttactttattctctgagtgtgcttcattccccccctgagtgcaagttccccaagatggactattcctcttctgcctgcctagcttagtataggccagacccctatcccgtactcagtaagaacttgatacatgtatgcccgaggaatgtga

SEQ ID NO: 3694 - DNA, 1333 bp, Homo sapiens
aggtggagaccctaagtaggacagttattttggaaggtgggtgtgagcctttctatctgcctcccttgctggtgggccaaaggcccctggacatgttgtgtcactgacgagctcgctggagacggcgtccccgttgtccctggtctgtgcctgtggtgggtgggaaggctgcccccgctgtaccaccggacacgccgtgggcggcagaatggtgaaaaagtgcctgccctccctagggctaccctctggctggctttcctgatccgtgcgctcagagctggaaggtggcccacgtcctacttttgcggttgggtcatatcaaatttgtatcggctaacgggaaggaagttacgagcaagttccaccggaaagaaaatctagcgcggggactgcactcgaggccgaggagagggcagcgcgtccgtggtggggtcgcccagcactgcgagccgcgctgaaccccacccccggcctgcagggtgcggctccctggctgccccgtggacccggccagcccgggacgaggacgcaggacctcggcagggacgccggagccagcccttcgccatccccacacgccccgcggcccagtggccgcgcgcacgttacctgcggagcccggccctgcccgcccgtctgggctgccgccctccgccatggatgcttccgcctccgcggccgcccctgacccgcgcacgcccctcgggcaggaagcagaacgacccgcgaccacttccggcgccgagggcaatggggggcgcgtcggggtcgcggcttccggcgggcgcgcgccggcctcactggtttccggggccgcgcaggggccacgcctccgcttccggcctcgctgtctagcagggcgctggctggtcccttcgtccggcgggaacttcgcgactaaccgactctctggatgccggccgcgctgtggtttcctcacataagaagccaaggagtcggaaagccgggtgcctgaggcagcagtctgggaatttcggtccggcgggccgtccccacccacacggacggggcgtggcttctgccagatgcgggcggggccccgagggccgtggcgggcgggacccgggcctcggccgggctggcttggtccccgcaggtgccccccgctagccacgagcagccccgggagggtggattcggaggcgcggggactggtgagggcccactgcagggctgagcgtcgcagcgtgctgtggttttagatgaatgctcctccaaatcccttccatgaagccctcaatcaggtcggtaactgatgacagccagtggctgacgcgaagttcattgaataaatgaatgcattcgtgaacaa

SEQ ID NO: 3695 - DNA, 1332 bp, Homo sapiens
aggtggagaccctaagtaggacagttattttggaaggtgggtgtgagcctttctatctgcctcccttgctggtcgcaaaggcccctggacatgttgtgtcactgacgagctcgctggagacggcgtccccgttgtccctggtctgtgcctgtggtgggtgggaaggctgccccccgctgtaccaccggacacgccgtgggcggcagaatggtgaaaaagtgcctgccctccctagggctaccctctggctggctttcctgatccgtgcgctcagagctggaaggtggcccacgtcctacttttgcggttgggtcatatcaaatctgtatcggctaacgggaaggaagttacgagcaagttccaccggaaagaaaatctagcgcggggactgcactcgaggccgaggagagggcagcgcgtccgtggtggggtcgcccagcactgcgagccgcgctgaaccccacccccggcctgcagggtgcggctccctggctgccccgtggacccggccagcccgggacgaggacgcaggacctcggcagggacgccggagccagcccttcgccatccccacacgccccgcggcacagtggccgcgcgcacgttacctgcggagcccggccctgcccgcccgtctgggctgccgccctccgccatggatgcttccgcctccgcggccgcccctgacccgcgcacgcccctcgggcaggaagcagaacgacccgcgaccacttccggcgccgagggcaatggggggcgcgtcggggtcgcggcttccggcgggcgcgcgccggcctcactggtttccggggccgcgcaggggccacgcctccgcttccggcctcgctgtctagcagggcgctggctggtcccttcgtccggcgggaacttcgcggctaaccgactctctggatgccggccgcgctgtggtttcctcacataagaagccaaggagtcggaaagcccgttgcctgaggcagcagtctgggaatttcggtccggcgggccgtccccacccacacggacggggcgtggcttctgccagatgtgggcggggccccgagggccgtggcgggcgggacccgggcctcggccgggctggcttggtccccgcaggtgccccccgctagccacgagcagccccgggagggtggattcggaggcgcggggactggtgagggcccactgcagggctgagcgtcgcagcgtgctgtggttttagatgaatgctcctccaaatcccttccatgaagccctcaatcaggtcggtaactgatgacagccagtggctgacgcgaagttcattgaataaatgaatgcattcgtgaacaa

SEQ ID NO: 3696 - DNA, 277 bp, Homo sapiens
ttttttttttttttgagacggagtctcactctgtggcccaggctggagtgcagtggcgtgatctcggctcactgcaagatccgcctcccgggttcacgccattctcctgcctcagcctcccaagtagctgggactacaggtacccgccaccacacctggctaattttttgtgtgtgtatttttagtagagaaggggtttcaccatgttagccaggatgatcttgatctcctgacctcgtgatctgcctgcctcggcctcccaaagtgctgggattac

SEQ ID NO: 3697 - DNA, 280 bp, Homo sapiens
ggtttttttttttttttgagacggagtctcactctgtggcccaggctggagtgcagtggcgtgatctcggctcactgcaagatccgcctcccgggttcacgccattctcctgcctcagcctcccaagtagctgggactacaggtacccgccaccacacctggctaattttttgtgtgtgtatttttagtagagaaggggtttcaccatgttagccaggatgatcttgatctcctgacctcgtgatctgcctgcctcggcctcccaaagtgctgggattac

SEQ ID NO: 3698 - DNA, 16100 bp, Homo sapiens
gtaggttcgtgacccttgagaaaagagttggtggtaaatgtgccacgtcttctaagaagggggagtcctgaacttgtctgaagcccttgtccgtaagccttgaactacgttcttaaatctatgaagtcgagggacctttcgctgcttttgtagggacttctttccttgcttcagcaacatgaggcttttcttgtggaacgcggtcttgactctgttcgtcacttctttgattggggctttgatccctgaaccagaagtgaaaattgaagttctccagaagccattcatctgccatcgcaagaccaaaggaggggatttgatgttggtccactatgaaggctacttagaaaaggacggctccttatttcactccacgtaagtaattatgccccgcaggtaaaatagtaattaagaatccactcacttatgccagctctccagcaggaaaggtggcctgtacctggttttgcctcttttacaaaaccgaaatatcttatttccttctttgggaaaggaaattgtttaaagccagttttatatagcgagcgaggcctttgaaggtcttgttggaaacatgtggtctggaaaaggctgttaattttttttattatacaaattagaactagaatctttgaaatattgcagaaatatatctgggtgtataattggccaataagtagaaaaagcccaaaagaattctcatatctcaaactccatttcttaaagaaaatgacttgattccatttttaatgtggtgtaggtgatgttcacctaaaacttttcacagcgacttcaaaagcaaactacactatcacttatttgcctgttgaaggatatactaatgccgtttcactgacctacttcttttgttctgacgaatggtattttggtcaaggcacaggaccatgatttcagtcatttgcttctttctagagagtcagacttcattgatgaggtgggtgtggttttggaagtctaggtgaaggattttcaggtggttacactatcatttctgttctataaacgaagaaattggaacatggaaatggtttacagcctaatgattttcaattaggcatcggttccattcattccattatgacagtatttagtgagcatttccttgatgttaagccatgttctgggtgctaggaagattcagaaattttggcttctaatcatcttcatctattcattagtctgtccatctatcaaactcttattgaatggtcacaagtcaggtcctggagacgcaaagatggctagaagcaggttcttgtcctctaacagtatacaccatctacaggtgggagaaagacaagtaaataatgcaatgatatagggtacagaatattcaaagtgctagcaaagcgtaactgggcctgaagtagttaggctccatggggtggggaaagggaaagacttcccagagaccataattgaaatgaaccttggaagatgggtggaggtttccagggggaaagtagggaaggatgttgtaggtagagggaataacatgaattaaaacagtaaatcttcatagcccatcctccacctgattttctaataaactgcctttactgggcattcagacctggtctgtcttgagggttggggaaatgaatggggctcttctctaaactgttagccctgggaaaaagttccagaaaaatggcttgccttagaattctcaacagccctttcttcttgtcaactaggtgagtgccacggtggatattaaatgatgtgatttgcattttgaaaattcagttatattgttatttttagtctgatctcttttagactcagcctgacttctttcagatttctgaaccaaaaacctgtgctgactttggtggtagccatggaatattatttagcagtttgctactaagttctaatacctgatgaggggactgttatcatgcagcctccatgtaaatggtcagaagctgctaactgtaaacttcatgaagaaataccatcaaattggctgggcgtggtggctcacgcctgtaatcccagcactttgggaggccgaggcaggcagatcgcgaggtcaggagtttgagaccatcctggccaacatggtgaaaccccgtctctactaaaaatacaaaagttatctgggcgtggtgggcacctgtaatcccagctactcaggaggctgaggcaggagaatcgcttgaacccaggaggcggaggctgcagtgagccaagattgcgccgctgcactccagcctgggcaacagagcgagactccgctctgaagaaaaagaaataccatcaaatgatcagtttgtaagcacgtttgccatctctagaaccatagcctatgggataaattgcttagccctaagaagaactgtgctaaaattgtagtcagtgatgagtagtagaatgtttcctgcttcttttttcatttctagccttcccaaattttctacagttggcattttgttactttgatcattgggcaaaattacaggaaaaaatggcattacccagatttagtaaccatggtactcatgaagcgtagtacagtgacttctttttctcacctacaagatatccttgaatagaatattttccttattgcactgaaagggagctaggtagggatcaggcattactcagcccttaagcctccctgtatgtagttcggcaggttggttttcctaggctagactctcttcaactcatgagccaggacattctatttccctcgtccccagttgatagggttccgctatggccccacccaattctcatcttaaattgtagctaccataatccccacatgttgtggaagggacctggtgggaggtaatcgaatcatgagggcaggtttttcccatgctgttctccttgtgatagtaaataagtctcacgagatctgatggttttataaaaggcagctcctctgcacactcattcttgcctgctaccatgtaagacgtgcctttgctcctcctttgccttccgccatgattgtgagacctccccagccatgtggaaccgcgagtccattaaacctccttttctttataagttacccagtcttgaatatttcttcatagcagtatgaaaatggactaacacaccagtccttgaggggctactcttccagactttcctatatagccccactgtagacccctgaggaggaaactgggctagggtctgagtggggatttagggatgaaaagcagccttttctacccgtcagagccatcagcaggccatagctaaggcaagtttgtaggcaggatataagacactgtgcttctcactcttcatatctgtgtgcatatggacccacatatgttggcagtaaattctccttagcctttcaatctccttcccaaactcagccatttttccattattttctccttgttctgcaacctagtggccttcctgggacaacataactttgtgattaagaccttgaactttggagttaggtttaaagactggaacttaacctgtgtttcctcatctgtgcaatggggtagtaatggtacttatattatagacttattgtaagggttaagaggcaaaaaataaaataaaatttagaataattcctggtatacaacaaatgttcaaatggttgttgtttttattatttcctctgtctttcttaagcccagtcaagtatgtgaaatttgcatcaagaaagatgggcagtgaattgaattcctataaacttgacttggaggtgtgtgtgtatgtgtgcaaatacagaattgctgtatttataaatttttaaactaataaacttaaccacttactggtgggaaaatgcactaaagaaaattttttagagttaataaggagttctaatgtgttttatttctatcatagtcacaaacataacaatggtcagcccatttggtttaccctgggcatcctggaggctctcaaaggttgggaccagggcttgaaaggaatgtgtgtaggagagaagagaaagctcatcattcctcctgctctgggctatggaaaagaaggaaaaggtaatagtatttctgtatttttcttactatagcactagagttgttctctggattaggagacagaagttagagtcactataacttttttttttcccctggaagttaatagggggtatgtattcctttagcaactgtattatgtcttgagtatcaattgaaatggccagtttaaggccgtaatgtctaaatgggcaactatgctaacaataaaaaaagaacattgaggtctattaatactgttcacaaatatggtgggttgttttaattgtgataaaatatacataaaatttttcatttgaaccatttttaagtacacagttcagtggcattaaatacattcatgttattgtggaaccatcaccactatccatcttcagaatgttctcatcttcccaaactgaaactcaccaatttactttaacaatgcagagagaaagatccattaacgtaagtgtttggatgagttgaacatgtgaaatatagattattaaagtattgaatgcattttagatgtgggttatatatgggttgtacttcatgaatattaagtctcccacagcaaactgggagttcttttcattcccgtttttaaatttatttataaagtttttaacaatgtatttaaaaaaaatcatagagtgacatgaaatgaatttaattctccctgtgtcacaaagcagaagcaagctggctagctggtccggacagcttttgtactagtttttcagggcagacacatatcctgctgttcaagtgagaacccctgcaactttccaaagagctgctttgtgatatatatcaagaggtctgggccaggcatggtggctcacacctgtaatcccagcactttgggaggccaaggagggtggatcacttgaggtcaggagtttgagaccgacgtggccaacatggtgaaaccctgtctctactaaaaatacaaaattagctgaacgtagtggagtgcacctataatcccagttacttaggaggctgaggcaggagaattgcttgaacatgtgaggcagaggttgcaatgagccaagaacgtgccactatactccagcctgggggacagagccaaactccatctcaaaaaaaaaaaaagaggtctgaagatgtctatatgcatttattctataattccttcaaacctaagggaataattagatatcaggaaaaaaatttgtgaacagggatgtccataattgcattgtttctaagcaaaaaattggaactgtcgtaagtggtatactggtaagaatttagctaaataaaatatggcccagttatttaaaatggcatttccaaagagtttaaaaattatatctgaaatgcatgagatacagtattatatataaaagtagaaaataaacctatagtatatatgatagtaaatataggaaaaggtacatatacatagaaagttaatcataaggaaataaataagaatgttaaaaatggactgtgatactgggaatcatatttatttctggttttatcatccaagtatgtgctctacaatgagcatgtattacttacataatgaagaaaaaaaagtttaagtagtcatcagaaccagacagacaactactctgatatagtataaatatagacttcatagcatcctgaagtctaaggttaaccactgacaaaagtgaggagtcaggattcacagcccatttcctgagaaggaaaatagatgccatatggcaagcattatatattccaaaatatacaaatctatacaaatcttgttcataggataagattaactaaccaaattcaattcttcttttagtcataatcctctttagagaagaaaaccaagtatctagaaaattttttctgatgctgagaatgttttcattttatctttattgtctcacctttaatatttacatacagtagttcccctttacctgtggtttcactttctaccgttttagttacctgtggtcaactgcagtctgaaaatattaaggtattttgagaatgagagacagattgcattcatataacttttattatgatatgttgttgtaattgttctattttattatttttaatctgttactatgactattttataaattaaactttatcacagatatgcatgtataggaaaaagcattgtatgtatggggtttggtactatccatggtttcaggcatctaatgggattcttgggacatatcccagtggggactactgtacgttgtattagtccattactctttctcatactatatttaactcaagtttacttcacaataagtagagatctaaatttgagtcatttccttcaaactgaatgccatgaaactaatttttctaatctgtatttaacactaattttgtagtcttttagtacatgcttgcatgcctcttttggaaagataccagttttatcaacaacctagcgcatgtcacatctctgtctagatctgaaatggtaagcttcagcacactttataagtcttctctttggaatttatgaatgttctttcatggaaatatgtgggatggggggaggatgactaagaaatatttaacatgtttacacagacctgtatgttaaatatagttataaggaaacaagtttgagaaaaacaattgtccatactccacagatgggtgtgtttgtttgtttgtttgtttgtttcaggttcctgggattttaacaaagctcttttcacttttaaagatttttaatttcccttctcagaaattcattttaatttctcccctcccatgaaatgtcttcaacatatatataatgttctatatcagaggtagtgtttcctaactttctgaaattgttaaaccttcctgcattatttttaaagcctgtgagaaaattatacctcaataacatgtattgagagtttactatttgtcaagtttaatgctaagtattttgcatggatttttctccctttatcctcccaacagactcctgaggaggaaatttattatctgcattttatagatgaggaaattgaggcttagagatgggcaaatgtaaacttcagcctcagacagtgtgacaccagagcttactcaattatatgggtagaaatgccttctagtggtagaaatggcaatactgtatgtatttctaggtcaggactttctgaccaaaaagttagtttattacttttaatatacttaactccgaattatctaaaacccttcaagtccttcttgacatataatatgtaatatattaattatattagaaatgtaatacctaagccattaggtacatctctatgtatgtatatgcattgtgtgtatgtgtatttacattttaattgctaagccaaagatagaatgcttttgctctgctagtgtatattatttcttcttttactctattctattcgagtaaaatataatatacataattttcatcatatatgacaatcttaggaaggctctttaattcagttaaaaaaaatactttgtccattaccataaattttctattattaaaacttttggctcttttaaaactttctgccttctttcctcacgtcaggtaaaattcccccagaaagtacactgatatttaatattgatctcctggagattcgaaatggaccaagatcccatgaatcattccaagaaatggatcttaatgatgactggaaactctctaaagatgaggtgacctttccttcttcctactcctctttctacttttctttggttgtttggggttttgttttgttttgtttttgtaactcactttttaaatgaatatgtgtatatttcaaatctacttttatttaggtaacatttatttataagttttcttaaaatactgatgctttgaaagtggactttttcatagtgaatcactgttttggagagaaatatattaagacttaaaaagcaccattcaatcttttgcttttttcttcccaatgcttagggttcactgtatcttatgcttacccttgggtctttgaaagaacaattttgccaagacagtttccatctggagttactgtataagaagctagctgtcctgagaaatatctcatgtggacagtttctgttaaaactgtagactggctgttaaatacatcttgtagtgttttcctggcaattaacagcaagcaacttacatgctctgttttgttcaggttgccccagagaaaagagaccccagcctgggttttacacagcagggctccagccccatcaaaatctgagcctttgggtaaagagaaaggaagaagaggcttctccttataattcggccattgctacacatacctgtcttagtctggctgctgcggggaaagaagtggagggagatatttattcctgttttttatctactcacactccattctgtcctgactggtcagatatcaagtccctttctatgctttgatcaaattcattctaatggccaggaaatgattaagtcttgaataagccaaattgttacgaaccaggggttcatgatccacagccactaaatttataacacctcatagtattaccagtcacatgcctttttcttccatccaagataaattttaattccctttcattaaataattttgaatatataacacagtcacatggttcaaaacaaaaatctatttatttatttatttatttatttatttatttatttatttatttatttcctgagagggagtcttgctctgttgcccagcctggagtgcagtggcaaaatctcggctcactgcaacctctgcctcctgggttcaagcaattctgcctcagcctcccaagtagctgcaccatcatgcctggctgatttttgtatttttagtagagatggggtttcaccatattggccaggctggtctcaaactcctgacctcgtgatctgcccacctcggccttccaaagtgctgggattacagacgtgaaccactgtgcccagcagaaagatatttatttaaaagtcttagctgggtgaggtggctcacacttgtaatcctaccactttggaaggctgaggcaggaagattgcttgaggctgagacttcaagaccaacctggccaacataggaagactttatctctattatttactgttttttttttttttagacggaatctcactctgttgccaggctggattgcagtggtgcgatctcagctcactgcagcctctgtgtcccgggttcaagcgattctcctgcctcggcctgccaggtagctgggactacaggtgcacgccaccatacccagctaattgtcgtatttttaatagagacagggtttcaccatgttggccaggatggtttcaagctcctgactttgtgatccgcctgccttggcctcccaaagtgctgggattacaggtgtgagctaccgcatccggcctattatttacatatttttaaaagtctttctcctacctacatcctcttctattctattatccccacatccagttttattaattacttttttctttctttctgtttttttttttgtagagatgaggtctcgctatgtacaagcatgcaccattgcacccggcttagttttattagtttctaatatatcctttcagtgtttctttctgcaaatccaaatacatagtcttatttccccctttcttacacaaaaagaagcaaactatacatgctgttttgtcgttttgctttattcacacaatatatcctagaaatacattctacattaatccatagagtttaatggattaatggatctctcccccacccctttttttaacaactgcattaaatcactttaacttaaaaataaatatatactatatgtgtacttcttgaaagctgggggagagaggatttgaaattgctggtctaaacagaaggaagagaggtgatataattaaaactgaaaatataggctgattttcattgtggtgaatcttgtgggaaattgaaaacaatatttatatttttaaatatctgaatgaaatgaaaatggagtccgggcatggtggctcacacctgtaatcccagcactttgggaggccaaggcaggcaaatcttctgaggtcaggagttcgaggccagcctggccaacttggtgaaaccctgtctctactaaaaatacaaaaattagccaggcatggtggcaggtgcctgtaatcccagctactagggagtctgaggcaggtgaatcgcttgaacctgggagttggaagttgtagtgggccgagatcgtgccactatactccagcctgcgtgacagagcaagactctatttcaaaaaaaaaagaaaaacaaaaaaacaaatgaaaatggaaaattgtagtctaggcacttatcagacctgactttctgagattgaaaggttgtgattagactcaatctaatcacatgatcataaccaaaacccaaaagacccactacttgcagacatttattcaagtcaaagatgccactatttaatctagttttaagagaagtgtccatggggtgcagtggctcatgcttctaatcccagcactttgggaggctgaggggtttagattgcttgagcccaggagttcaagaccagcctgggcaacatggtgaaaccccatctctacaaaaaatataaaagccagatgtggtagcacatgcctgtaagtcccaggtacgtgtgaggctgaggtaggaggattgcttgagcctgggaggcagaggttgcagtgagctgagatggtgccactgcactccagcctgggtgacagagcaagattctgtctaaaaggccgggcgcggtggctcacgcctgtaatcccagcactttgggaggccgaggcgggcagatcacgaggtcaggagatcgagaccatcctggctaacacggtgaaacgccgtctctactaaaaatacaaaaaattagctgggcgtggtggcgggcgcctgtagtcccagctactcgggaggctgaggcaggagaatggcgtgaacccgggaggcggagcttgcagtgagccgagattgcgccactgcactccagcctgggcaacagagtgagactccgtctcaaaaaaaaaaaaaaaaagattctgtctaaaaaaagaaaagaaatgcctagtatttagattcagattaagaacaagtagtatgctctcattgggtattctccaataatataagccctatatgaggattgtatacatgacataagctttatctctgcctttgagcaatatatatatagagagagctatatatatatatatatttttaattttttaattttttatttttttgacagagtctcactctgttgcccaggctggagggcagcagcgcaatctcgattcactgcaacctctgccttccaggttcaagcgattcaactgcctcagcctcctgaatagctgggattacagacgcatgccatcatgcctggctaacttttttttgtatttttagtggagatgggctttcattatgtcggccaggctgatctccaactcctgacctcaagcaatcttcccacttgggcctcccaaagtgctgggataacaggcatgagccaccacacctggccctgcctttgagcaatattttgtgtctccactttagcagtttagcaacagtttttttaagggaaaaagtttctattattttttaattatcattaaaactatgtcataaaatggctgtttagaaggtattatatttagttaatgaactaaatataataacagtccatgtctgtgatattgattggctcaatgtgggtatcttatgaatccaagttattaatgggatctgttattttgtaggttaaagcatatttaaagaaggagtttgaaaaacatggtgcggtggtgaatgaaagtcatcatgatgctttggtggaggatatttttgataaagaagatgaagacaaagatgggtttatatctgccagagaatttacatataaacacgatgagttatagagatacatctacccttttaatatagcactcatctttcaagagagggcagtcatctttaaagaacattttatttttatacaatgttctttcttgctttgttttttatttttatatattttttctgactcctatttaaagaaccccttaggtttctaagtacccatttctttctgataagttattgggaagaaaaagctaattggtctttgaatagaagacttctggacaatttttcactttcacagatatgaagctttgttttactttctcacttataaatttaaaatgttgcaactgggaatataccacgacatgagaccaggttatagcacaaattagcaccctatatttctgcttccctctattttctccaagttagaggtcaacatttgaaaagccttttgcaatagcccaaggcttgctattttcatgttataatgaaatagtttatgtgtaactggctctgagtctctgcttgaggaccagaggaaaatggttgttggacctgacttgttaatggctactgctttactaaggagatgtgcaatgctgaagttagaaacaaggttaatagccaggcatggtggctcatgcctgtaatcccagcactttgggaggctgaggcgggcggatcacctgaggttgggagttcgagaccagcctgaccaacacggagaaaccctatctctactaaaaatacaaaagtagccgggcgtggtgatgcgtgcctgtaatcccagctacccaggaaggctgaggcggcagaatcacttgaacccggaggcggaggttgcggtaagccgagatcacctccagcctggacactctgtctcgaaaaaaagaaaagaaacacggttaataacatataaatatgtatgcattgagacatgctacctaggacttaagctgatgaagcttggctcctagtgattggtggcctattatgataaataggacaaatcatttatgtgtgagtttctttgtaataaaatgtatcaatatgttatagatgaggtagaaagttatatttatattcaatatttacttcttaaggctagcggaatatccttcctggttctttaatgggtagtctatagtatattatactacaataacattgtatcataagataaagtagtaaaccagtctacattttcccatttctgtctcatcaaaaactgaagttagctgggtgtggtggctcatgcctgtaatcccagcactttgggggccaaggagggtggatcacttgagatcaggagttcaagaccagcctggccaacatggtgaaaccttgtctctactaaaaatacaaaaattagccaggcgtggtggtgcacacctgtagtcccagctactcgggaggctgagacaggagatttgcttgaacccgggaggcggaggttgcagtgagccaagattgtgccactgcactccagcctgggtgacagagcaagactccatctcaaaaaaaaaaaaagaagcagacctacagcagctactattgaataaatacctatcctggattttaaaaaagaaaaaaatatatataattttattttaaattggcttttatctttaattcttttttttaaagttatcaaatcttcattttctaagagtagccctttatagtgtacaaaatgatattaagtgcattattatcttcgcttttcatggctctgagtcataaaacaagctggtggatctcactgtacctaatttatagacgaggaaattgtcattcaaaaagattgactgttatgcccagggtcagcactaacctgcagaaccagtattcagtccccaagttcagtgtcttctactgccctctactaatgaaaagtgaaaatttccctggggtctaattctctcttcagtttgctgtgccgttgtttatctttgagtcttcattctctgaagatggctttctgcctgtttctggtacattagaattctcactatgatatagaaatggcttcagtttcatagcataatcttgcagttagctctgaattgcctcaaaaaccctgaacaacgcgaggttccagatgtgttttacttctttcattcatatttacccccatttgttgtttaaaaagaattatgaacaattattacatcatatgtagaccactttcactgattatatgttgacattttcctcagtaaaacataaagttcttaacaagactatactgtaacacctttctccaacaaaatcagctgtatgttgaaaactattaagtcattgctaatgttttaagccataatacagacagccttatactctatgatgggagaagggaaagtagtttgtccgatggtgctactctgtataaacattactgatgctatctatagtagggcaagaaaagtaaaaagagttttgattattcaggcagcatttttaaaaacctgtgaatttgtatcagttctcatctaaacatttggacacaagtataaaatgaaaacatatgcacaagttatggtttttaagttatctgctcttttttttggtttcactgtacctttgtactcttctattagtgggaataatcagacatgaactgtgacttcacatgtacagtcatacctcacttaatgatggagatgcactctgagaaatgtctaattaggttatttcatcgttgtgggaacatcatagagtgtacttacacaaacctagatagtgtagcctgctacacatgtaggacatgtatatagcctattgctcctaggctacagcatgttgctgttctgaatcatgtaggcaattgtaacacaatggcaagtgtctgtttattcaaacatctaaacacagaaaagatactacaacaataacaatatggtataaaagattttgtaaaaaatctggtcaggtgcagtggttcacgcctgtaatcctagcactttgggaggctgcctcagcaggtggattgcttgagcccagaagctcaagaccagcctgggcaacatggcgaaaccccgtctctgctaaaagtacaaaagctgaggttggaggatcacctgagcctggcaaggtcaaggctgcagtgagccatgatcataccactgcactccagcctgggtgacagagtgactccccatctaaaaaaaaaaatatatatatatatatatactatatatatatatataccatatatatggtatatatatatatagtatatatatatatggtgtgtgtatatatatatatatggtatacctgtatagggcacttactaacggagcttacagaactggaagttgctctggatgagtcagtggtgagtgaatgtaaaggcctaggacattactgtacactactgtagactttataaacaccgtacacttaggtgacactaaaatttataaaaaatgtttttcttctggttgggcatggtgccttatgcctataatcccagcattatgggaggccaaggtgggtggatcactcgaggtcatgagtttgggaccagccgggccaacatggctaaaccccatctctactaaaaatacgataattagccaggtgtggtggcacatgcgtgtagtcccagctaattgagaggctgaggcaggagaattgcttgaatccaggaggtggaggttgcagtgagccaagatcgaaccactgcactctagtctgggtgacagaggagcaagactctgtctcaaaaaaaaaaattctataatttttatagaaataataaaaaactaaccttagcttactgtaaattttctagtttagaaacttatttaaaaacaatttttggactcttctagtaataacgtagcttaaaacacacattgcatagctgtacaaaaatattttccttatatccttattatataagcttttatctatttaaattttgaatttttaaactttttggtcaaaaaccaagacaaacacactagcctaggcctatgcagggtcaggatcaagacatccctagcaggtgacaggaatttttcaactccattataatctgtggggccaccatcatatatatattgtacattgaccgaaacatggttacatgactatataatttgcgtcaatactgctcagtgtgccatatttaaatttacatgactatattgtgatattcttttcaaaataaagtttatttgggagataa

SEQ ID NO: 3699 - DNA, 415 bp, Homo sapiens
actaaaaatgcaaaaattagccaggcatggtggtgcacgcatgtaatcccagctactagggaggctgaagcaggagaatcacttgaacctgggaggtggaggttgaagtgagccaaaattgtgctactacattccagcttgagtgacagagcaagattccatctcaaaaaaaaaaaaaaattatagcactatcggatgcagggagaaacaaaaaactaaaaaagtaaattagcattataataataaccctgggaaaataaaaaagaacttcttttccagagatgcagagcacttggacataagaatttttgttttttgtttcttgcccattttaccttaaattgaaatctaagatgtcaaaatgattataaacacatatgcccatttaaaagcattactatgcattactattata

SEQ ID NO: 3700 - DNA, 7791 bp, Homo sapiens
gcctgtggccaggtcacagcctcccagctcgccagagagccctccttcccaaatctctcttcggtcccccggcgcccctggaagggccggagttggagggtcccctctctcagcctcgtccctcccctgaggcccgatcggccggcgcgggcaatcagtgcccgggcaagtccttgaagtctatatttagtgcccgccacccctcccccgcacagttgggaggcgggcggtgggggggtgggggtggggagagccccgcccccgccgggcgtgtgtgtcgtgtgtgtttggggcccgcgcgggttgcgcgccctccgccttcgcgcctcctgcccccgaggccctactgctgcccctgtgcccctcgccccgccgggcgtcgcgggccaacatgggccaggaagaggagctgctgaggatcgccaaaaagctggagaagatggtggccaggaagaacacggtgaggctgcagagtttgggccacggcccccgcccccgggaggcgcgggcaagccccggattccggggtggggacgtactggcggggcgccatgggggcgcgtacgggactcggggacccgagggaggagcggctggtgcagggcccaaggccccttggggacccttgctgagcacctcgaggtgggcgtgtgcgtggcccaggacgccagggggatcgtgcgggtcccggaggcgcgacttgtgcacgtccctttggacgtgtagggttcaccctgggcagctagtgcagggcccaggaaagcgggcgaagagagctggacgtgggaaaggactttgggagtcccagggcttggcgtgtgcaaagcccggggagcggcggcgatggcgggggcggggcggggggcaaatccgggtggcccgagaagtggcagagaaacttgggctgacgggggtactgagctgcatccctgcaccccggagtgggtctgcgggagagaagtaaaaggccgtggatcctgcgaccccaccgcttggtgcgtcaggagcggttcttttggcaattttccctttccttggccttggggtgcggcccggacgggcgggggccgaacaggtgcgggggcccgcggggcgggggaagggggccgggctggaggcctgtgcagcgagggcgagggcggagggaggagcgggctcggcgggaggttgggagcagggctgacagccctaccggagggtcctggccagagcgcagacccagctggaagttaatgtttgatcttccccgtgatctttgcctggggctggcggccgactggtcgcctggccagagcaaatttggccttgggtcctggagggcctgcgctcaccctgggagggaaaaaaagggagcctggtgagcatgcccttcccacctcccgttcctgttccagggtcctcttcctcccaccatccgtagccatgtgctgcagccacctgcatttccaggacacttaggagcctgggaaaggaagagacactaagggaagttttagagccaggaagagtagccaaggcccagggaagggtcactggaaccatgaagtggcagggagccctagagtggacactgggcagtcatgagttggtgtccatataaaggccagagcctcagtttcttcatctgtaagaaagagatgagattatctgcctctggagaagggatgtcactggattcttgtctctgctggcagcggtgaggattggagagatgagacagagatgtaaagcccttagtaggactcagacctgtgcttgctaagaactggcgaacaagacctgcttctacgcagccaggtccaacacagaaagatacagcacaaacctgcagagtgctgggagcttctcacctgacactcccaacctccatgcactccccgttccagactcctccacaatcctcagtacaactgagccacaagtcttgggggagcattttctcagctggggttggcagagcgcagccagggattctgagccaaattccagttcaaatagacgggttatcccagcccagctccttactgacccccaagcttgggccaggaaagaaattctgggcccctgggtaagaggggtagggtggggacgcctagagaccggaggagaggcaggctgcttgggatagagctctggctgaagaggacgggacctgccctggcctccccctcactccttttatggccctaggcaaaagccactcaaccttccctttctggacctcgagtttcctcttctgtgaaatgggaagaggaaatggtgtcttttggagatggattcctgtggaagtgcccagagctgtcccctgaaaagatgcaagtctggccgcagggtccctgcagcatggagccagtttacagccacgtctgcgcctgggctctcggcagtgtctgggtgggcatggagctctgggcgtctggccgagaaaggtggggcctgctctgggagtgaaagtggacccgcccagcagtggttaggcagaggaggacatacttcctgtaataagacggatcctccacgttgcagctcaggcccggggtttactgccggttgctgaagtctcagccacttaaggctttgtcacatcctctgagcatgcactaacagaagcaacttcaaacatgcaaccaagtgcctacggtcacagctacatacacacacatagctataacatgtggccacaacacagtagttaaacaagcaactgaacctaactgcgtatgagacacggctactgacaccaacatgacaagcatactgacccatatgacccacattgaccattatagttatagaatgatacacaaagacagccacacacgtatgcacgcagcacagctacacccagacatgcaatgctacagacttagcaaacagccacatttatacattcagatcttataacacaggcgtcatcccacaaagccaaatagacacagctgtgcccggagctgcatattcacagctgcacacttagaccagagatactactggctacagaacccatttgtatgttcagagagatacacccagcaacatttgcacaaggctttgtttatccagctacaatccaggctcatggctattctcctccaatatgacccagttatacagctgtgacacacgaggcatacacccagtggagagctggaactggcttaacacagattgttgcgttttcaggaattttgcaacctggtggttaaacacagcaattgtttcaaaaaactacattatctgcttacaataaataaattatattaaaaacaaaggtaaggaatcctccaaaataatcacttcctgattgttttactacattgtactgtcatgtatggtcagagataatttacttctattgttatctgtacagtggaaatattatataatggtatggtagtgtacgtctcctcccaaaacttccttcagttcagtgacagcatgttggtagcttgaaattggccatgggatgagtgtttacaccacagaaattggcaaacactacaggtcagttttttttttttccttgagaactggttgttaaacgttggccagcacaccactgcacttacccatgttgatattccatgattgtgtatgtctagacagatctgcgcccatgctaacacaatttgtatagtggttagagcccaaaaggactgagtttgaatcccaacttggctccttataaagcatgtgaccttgagaaaattatttaacctctctctttcttggattgctctttggtgaacacaggataataattctgtaagaatgggaataatacacaggacctacccgatagggccattgtgaatgttaaatgagataatacaggtaaaaaacttagaagagtgcctagtacatagcaagcctttaattaatgttacacttggagttgtgtacccccaagttcacatacacacacatctgcaggtcacgcttttgaaaacctactgtgaacccaagttctcagggaggctaaggactgacagagggcagctcttaggacatggtccaggtcctgccagggtggggattggcagctggaaccatgaactgtgggccaaggataggaacatacaggacaccgtcccctggtgctccccagggaactgatctcaggacagcaggcaggtatggcttctaggaaggggctgggggaaaggagaaggctgaaatgggtcggagggtgtccagggcctggcagctcacagattttcaaacctaagcctttttctgcctcctgccttctttctgctttagttctgcacaagttcatccactcagggagcactggactctctgctgagccctaagttctcagagattagaacggttctctttacccgagagaagttaaagtacctgttcacacaaagacttgaaatgaatgtacctagaagctttatttctagcagccccaaactggaacctatccataagtcccatcaaccggtgaatgaatttaaaacattgtggtagactgggtgtggtggctcacgcctgtaatcccagcactttgggaggccgaggcaggaggatcacttgaggccagaagtttgagaccagcttgggcaacatggcaaaaccctatctctacgaaacaatgcaaaaaattagccagatgtggtggtgcatacctgtggtcccagctattcgggaggctgaggtgggaggatcacctgagcctggaaagtcgaagctgcagtgaactgtgattgtgccactgcgctccagcctgggcaacagagtgagatcttgtctcaaaaaatgccaggcaaactgtggtacatacatacagtggaaaccactcagtaataaaaaggaactactgatccacgagacaacatggatgagtctccaaaatcattatgccgaaataagccagataaaaaagggtttttgccctacatactctttacataaaatccttaaagatacaaggtcaactatagtaacagaaggcagaattgtggttgtttaggattggggatggggagggatggattagaaaggggacaggaagaagcttttggggctggtggctgtgcttttatcttgattgtggtgagggttccatgggtgtacacgtatgttgaaacttatcaaattttacactgcaaagtgtgcagttattgtatgtgaattatacctcaaaaaagctgttttttgtttgttttgttttgttcgagttggagtctcgctctgtcacccaggctggagtgcagtggtgtgatcttggctcactgtaacctccatctcctgggctcaagcgattttcctgcctcagcctcctgagtaactgggattacaggcatgcgccaccacgcctggctaatttttgtattttaatagagatggggcttcaccatgttggccaggctggtcttgaactcctggcctcaagtgacccgcccacctcagcctcccaaagtgccggaattataggtgtgagccaccatgctggccaaactgttctgttttgttttttaaaaggctcccagtcctcaccctgcgaagttcacagtggggaggtaagggaaggacgctacaggcacacgagcaacaataagccaggaaggaattcatttgggaggaaagatggggaagggggagggcattcctggggagaggcacagcagaaccaaaggctggaggtcaggagcctggctcagagggtttgaacccagcaggtggcgggggatgaagttagagcaccacctaggacagattgtttctcgtctctctccttccttctgccccttgcctgtccttcggccacatgtctgtctgtatcctcctgctctctgtaccaagaccacacaatagtcagagaagcctggtcaggacccaggccccagtcctcaccttgtggcctcccacaggaaggggccctggaccttctgaagaagctgcacagctgccagatgtccatccagctactacaggtggggcgggggtgggaagccttgggacagtgcctggggggagagctggtgggggagggaaagacccctggtgggggaaggtggagtctgggaggaatttctgaggggggcctgtggggaggggatcttgaggtggagacctcccagggagggactgagggggacacaggggcatctcgggggcggagagggtatcttctaggtgtaggggacctctgggccttggagcaagactggttcgcttttcttgaataccccaattcccaaggccctgggcctgtgggatccaagaggccaatgatccagggagagggaaaagcccccatttaaaatccctgtgtagcccttaaagtccccagatttaccaaaagctcctggccctgaaaaatcagcacagacagatgcaaggtctcatagccggagctgctgtctcagttgaaactggagctcaaagacactagagtgagctggccacggtggctcatacctgtaatcccatcactttgggaggccgaggcaggcagatcacctgaggtcaggagttcgagaccagcctggccaacatggtgaaaccccgtttctactaaagatacaaaaattagctgggcacgatgatgcacacctataatcccagctactcaggaggctgaggcacgagaatcgcttgaacctgggaggtggaggttgcagtgagctgagattgcaccactgcactccagcctgggcaacatagcgagactccatctcaaaaaaatagacactagagggttgggaatgggaggggtcctgacagtcagccaagtgccacccccaaccctaggttcaggtttcaccaaagctacagatatcctccatgtcaggcttagccctgggccctcggcctcgtgcagagcagggccttagttacagtagtggggttctgacctcagccaggagtcagggctaggactctgggggtccaggttggaaggggaggtggtggtagagctggggcaggatctgccaatgatggcagccattcctgtgtatccattcccagattatgccttaaccctctcactttgcagacaaccaggattggagttgctgttaatggggtccgcaagcactgctcagacaaggaggtggtgtccttggccaaagtccttatcaaaaactggaagcggctgctaggtgagagaggacaaggttgtcttgagccctgtttttctcctagcacttgggacaggactgggcctggctcatagccagcactcagtgtatgtctgttgagtgacttaatcagtgacagatggcctctggatccgggaggtagctagtgggggactgccaatgtttgtgtacacaagtgcaagatttgtagacttgtgagttttgtgtacatgtgccacttacgtgtttgtgctctcatgcatttgtctatatagtacatgtctacatgcacacatttgtcttaatatgtgcagagatgtgtttgccaatgtattaatgtccccatgtgagactgtgtatttgtacacacgttcctgttgtttgtgcatttgtgtgtaaatgtgtttgtgtgtgtgttgggagtgtgtgtgcagctgtcctcgtccctgccctttgctctctccccactaagtcatgctgggttctgctgagacagagcttagctgagggacaatgccacccttttgttttcagactcccctggacccccaaaaggagaaaaaggagaggaaagagaaaaggcaaagaagaaggaaaaagggcttgagtgttcagactggaagccagaagcaggcctttctccaccaaggaaaaaacgagaagaccccaaaaccaggtattcttttttggg

SEQ ID NO: 3701 - DNA, 550 bp, Homo sapiens
gcactggctttgcctagaaggatgcagggacaggaaagagtgcgtctgcgggagggcctccagcatttctctacagagagttcccataggagaccgcacggcagtctagagctcttctctggcccacccaggcaacagcctaggtgcggggaaacaagaccacagcgggtataagcctcacatcccgaatcttgtaacagtcccaaagacaaagattccaagatgctagcaaaggcaatagccacttataagattcattgcacctggcgcagtggctcacacatgtaatcccagcactttgggaggctgaggcgggaggatcacttgagcccacgagtttgagacaagcctgggcaacatggcaaaactccgcctctacaaaaaatacaaaaattagccaggcatggtagcgcacacctgtaatcctaactactctggaggctgaggtgggagaatcgcttgtgcccgggagatggaggttgcagtgagctgagattgcgccactgcactccagcctgagcaacagagcaagaacctgtctcaaaaacaa

SEQ ID NO: 3702 - DNA, 290 bp, Homo sapiens
ggtggctcacgcctgtaatcccagcactttgggaggccgaggcaggcagatcacggggtcaggagatcgagactattccggataacatggtgaaaccccatctctactaaaaatacaaaaaaattggccgggcgtggtggcgggcgcctgtagtcccagctactcaggaggctgaggcaggagaatggtgtgaacccgggaggcagagcttgcagtgagccgagatcgtggcactgcactccagcctgggcgacagtgcgagactgcgtctcaaaaaaaaaaaaaaagaa

SEQ ID NO: 3703 - DNA, 10494 bp, Homo sapiens
gtcggatacaggcatttcaaagggaaaccgttgaaatgcataacctgcaaagtaagttgccttgaatttgtgcacttctctgttccttatctgagcggtgcctttctgtagtttgtcttggagtacgtgtgtgtgcgtgcgcccctgtaagcgctgcctggggaggacagatgggagattaggggagacactccccctgtcctcgagggggacagtggctgggaaagatagggtttaggttggaatttcagtaagaaggtactaattacaacgtgcttggttggaagttggtgccaggccagggcttggagagaccatgggaaaatcacctgtctccctgccttctccctgagttagtttgccacagaagatccaacagccagactggtttgcaccgacggttcccaaatgcatggactggcactctgggctgttacacccgccacagctgctcggagaacttgtctccttgcttcgggggagggtcgacattttaattaaactaaaaaagaatgtttttctgaatcttagggcatacagccacttttaccatttttatttgaatttgagttcaggtaaacttaggcaaatagaaaagtgggagagggtgggaaaagacaaggtgagcctgcttttcccaatactgggaaaatgaattaaactagacgggggacgtcagagaacagaatgccttgcctttggtctgctttttaatatattttatgatcccaaattttacagaaagtctcaagggtttctgtgttttttaaatggtcaaatatgtgacatacatgtgtacatagatcacagagccccactgtagttttttaaatgagccacatttaccttggggaagagcccctccccccccgccatcataatattgtgaatgtaaagagagattggttcacaatgagaatgtacagtaggctcctataagggtgacaggattatatgcagaatgactttgaagagccaaaattgatttatttatgttaagtagtgctaagaaggaatatttgtcccggagtgaggcatttgagatagagggggaaaagcaaaaaaaaaaaaaaaaaaaaaaaaaaagtgattacatcatcttcccgttcaagcagtattagtagcgaagatgggttcatcagtgaaatattttgcaaagataaatatacctccactctgcattctgatctatagcctctttctttttggaagaagcattttctttgcccagtttttttaggcagtcacattaaaattctcattaataatgttgacagacaattacgtttattatttctgctaataggcatctgcattcctattcagaattttcattgttagtctataaagtctagttttaactttggaatgtttggtagaggaggacatctatacattttcttttaactgtcctttctaatgtggtacatttgtgacagtgtttgaattctgggttttcagtgaattatggaggactaaaataccaggagtagtccgtactgcttctcttatacatgagagatatctaaggactataaaacataacttaagtatacccttttaatgcctttgtaagatttttaaaccaaggaatgactgggctatctataaacccagatgcactaagtggggagaaaagctcggagctgcagcatatcagcttttgtcaacctgccaacagcagagcgtaccatgctgcaaggagtaataaacaggaattagaaaactcgctgctggagaacagtcaaattaaacacctttttgaaaggatgagcatgtatatattgcagttctattaaatgtagcttcttagtgaggttggcattatgttaaggctggtatggaagagaactgatgaagcaggagtggtctggtgacatttttctgacttgattggctggggcgtgtgatgtaataggtttcagtgcagccccttataggttttaaaatgaattccaagacaccattacaaagaaagccggactcttttcttataactgagctcagccaaggaaactcttgcacaaatgtacaatactgtttggaatatggaagacctggatttagaatatgccaagacagatataaattgtggcacagacttgatgttttatatagaaatggacccaccaggtaatactgcagtattattgtagagagttagttaatttcgtggctttttaatttttcgaaagctactgtaaaagatcctttttggatttctgtttttattaatttgtttcattgataaaaattagtttgctcatggcttaaaaattaaacagattgtttgactgtctgtggaagcaagcagctcaggctgtgtgtggtaaatgcttattcttacttgaatggatatgaattgaactccagtttttcactggtgtcttttgttaatcgagatccttccctgggtgagttatgttgtgggatattgtccctgtaattaaaatgatgcatcttttgtgctgcttttctctgttgccagtggatgagaacagtgtagcactttgcagtgataacacttggtactttagaaagcatgtaaaatgtagcagtgattacaactcagttctctaaatgttgagactttgcttgctctctcatattaagatattataatgaaaaaagaagttgactttccattattgttagtctttgtaaaatattcttggtagatacctgaaatcattttttgtataagttaaaatagtaacagtgctttaaaacttatgacagaatttacctaaaaatcctagatttattttgtttcctaagtaagttgttttattccaatgttagctctccccctgcccccatttaaggtattcaggaatactgcagtcttttatttgtcaccaattggtatatatgaatactgatttgacattgaggaagggggatgtcatttttaatcagacctagtatatagagcacaatttatccaacagaatattaacatattaaagagatttagggcacagatgagagtttcttaaagtggcttttggcagaacagtgcctgaaatactaagattagagaaacccaattgctcctcttaaaacatactgctgtagatgagcctttttattactgcaacagagtttgtggaggacagagaccaaatttgtctttcgtaattaaataagaggaaattaaagccaactcatgttattcctgctactcatatgttcatagtttcttactttagatggatttgaccaggcatgaaactttaatataactagaatctagaagtacagaatgtcatgactctggatttactttgaaatttattcacatggccagcccaatttatttgttagtttctaaggctctctctcttttctccttttcagtttcatttctttttgagccatgctctgaaagattttttttaagaaaattatcttccatattgcatggaattgtgaactaatgctatatatttcagttactctaactttttatttttttaaagtaaaagtattcatctaaagaaatttagttctaatgtagttgggattgcgaacaactttttctttttcatctgcagcactgcctcctaaaccaccaaacctactactgtagccaacaacggtatgaataacatatgtccttacaagatgctgaatggtactggggagatatctcgaggtaaggctacagaaacttcattttcagagagttttagattaaaagaaagaaaagcaccagcttgctaagttccatttttaggatatcatccaacataagcatgaagcatagttggttctcttccaagacgaccagaaaaagtcactgagcactggagaactgtgggtgctggatgccacaggaaattaaatacccgggaagtttcattattgacagagatgtcagtgaagtgccagagtgaagtggcactgcctaagaacagagtgtgaaggcactctatctattaagcacactctaagaattcttgccttaaacacaataagaaaacatgccttttatgttagctttgggaagggggagtaaggttggagaaactcttttgagatcatgagtttctgtgctcatttgtcagagagattgtaatgtttggttgaaaaaataaaaacttagtaccacagatacaccaatagtgaaagtgatatgcacctgtttgtgatgagactgcattgctaacatttctatttaaacaaattattagctcttattagtgagctctgaaaatgcaattcattaatttaaatctatgtgggcaggaggaatatgggcactcacgtacttaccacttgatttgctgtgaacctaaaacgctctaaaaaatagcctattttaaaaaatataaatctgtggtcactaaaccttaagatgagcatcgtttgtgttttcatttcagggaagaagtgaatgaaaaacttcgagatacagcagacgggaccttttggtacgagatgcgtctactaaaatgcatggtgattatactcttacactaaggtaagccagggaatatagctgaaattagggtttgggctgatattaaaacatatttccttattccaaaatgttaatacctttatttttatattgtttttacaggaaagggggaaataacaaattaatcaaaatatttcatcgagatgggaaatatggcttctctgacccattaaccttcagttctgtggttgaattaataaaccactaccggaatgaatctctagctcagtataatcccaaatggatgtgaaattactttatccagtatccaaataccaacaggtaataaaaactgaatgaattatccagttacgatgtttagacaagatccttttaatacttagaaaacatttgaagcagatgaattacatgtaatcaagtctaaaaaactgacactcgtaattacataattgcaattttaaagatgtttccatgtcagctatttgttaaacaatgttatttgattaaataccttatccattgaatttattttaatctttctaggatcaagttgtcaaagaagataatattgaagctgtagggaaaaaattacatgaatataacactcagtttcaagaaaaaagtcgagaatatgatagattatatgaagaatatacccgcacatcccaggtgagttttctatgaaaatcagattaaaaaataagagttctaaacttttaaagactaacatggaaaaaagaatttaaaaggttgagtttttacgaatgaggtgggggtgagagcatttatttgtgaatcattgttgattattctagtgtaatatctctaaagctttaaaccaaaaattttaagtatcagaataataaattaagttcacgtgataactgaagcagtcactgagtttcaagttgatttaattcgtgatagaaggatcctgtttagacttggaagttagtaataactggaagtttcacagacttgtctaatccctgaaatggagatttaggcattaatatatatcctaccatgaaaaggaagggctatatactgctgtgcttttctagacccttattcttcactggtcactcatgtatctgggaatgccagagggaacagaaaacaacagggatgctataaactacaatagcttttaagaagataaaaactataggaaatgctacgcaatcatttttcatagattgagaaaattctccagaggaaatacttgtttctgggatactgttttaatggattttatgaatttgagtcccactctgctaataatacagatcaaatgtcctggtagtgtcttgcagtaagagattgttctatgaaaggtatgacattatctttttaaaattatgttgcaggaaatccaaatgaaaaggacagctattgaagcatttaatgaaaccataaaaatatttgaagaacagtgccagacccaagagcggtacagcaaagaatacatagaaaagtttaaacgtgaaggcaatgagaaagaaatacaaaggttggtgtttcccttgttcttgtgctagagataaccaaaatcctctaaaaccatttaaagatgatctcgctttctgtgctttgaatgatcacgtggacacaggaaggggaatatcactctggggactgtggtggggtggggggaggagggagggatagcattgggagatatacctaatgctagatgacgagttagtgggtgcggcgcaccagcatggcacatgtatacatatgtaactaacctgcacaatgtgcacatgtaccctaaaacttaaagtataataaaaataaaaaaataaaataaaataaaatatgttgagccactccaaaaaaaaaaaaaaatgacaggaagagaagccacgctttacctaaggaaaactgctgggaaaccatagtgaaacttttcataaactttggggaccgttcctgatgtacccagataataacaaatacgtttcttttgcctgcaggattatgcataattatgataagttgaagtctcgaatcagtgaaattattgacagtagaagaagattggaagaagacttgaagaagcaggcagctgagtatcgagaaattgacaaacgtatgaacagcattaaaccagaccttatccagctgagaaagacgagagaccaatacttgatgtaagtatttgaaatggaatcctatacatgaataattggtgattgctacaattcaggatgagttaatgcgttctcttttcaaaactgtttttcaggtggttgactcaaaaaggtgttcggcaaaagaagttgaacgagtggttgggcaatgaaaacactgaagagtaagtagttactaaagatggtgatagcagaagatttttctcattttaggaaaatgcatgacttgcttgtttttagaacaagtgaggaattttactgagttggaacatctgtaggagaaaatgtataaactcagtgccattatccagaattttaaaaaaagaaagcttagctaaggaggactaggatttatttttactcataatgctgtgaaacaactctctgtgtccataatgatgtccctgaacatctgaaaaatcccaaaatattttggaacagtcagagaaaaaataattatgcttaatatattttaaagcttaagtatatacttgttgaattagtcaaaaactggcaatctgcctagtcaatttcctgatctaaactggataaacgagatgttttaataccttccactctgcccaggtacctgagtgtggttgcttgaaaacagaaatagtacagttgattggtaactctttgtcctgggaggttgcactggaggctgaataccaggagaggaaaactcaggtcgggcagaggcaggcatgtgatggccagtctgactggcttggtaggggccaggagggaagtgacgggggtatgcctagggaagacagcaaggcaggctgatggctcctgcactcttcatttagaaactttctgtcctgcctgcctagccaatattcactggtggaagatgatgaagatttgccccatcatgatgagaagacatggaatgttggaagcagcaaccgaaacaaagctgaaaacctgttgcgagggaagcgagatggcacttttcttgtccgggagagcagtaaacagggctgctatgcctgctctgtagtgtatgtatctccagcaaacttttctttacaacatctcatgaagagatgtttcatttattcattcattgagttttgggggcaaagatttgacatagttttagtcttgaataagcttacagtacaataatgtagaagagaaaccaaagcagctgtaataccattttaaagtctagccagaagtgtatgttaatacagtctaatagatacctactgtttagttggaagactaggtttggattcccattcagtgctaattaatcatgagaaatcgccaagtctttttttctcatctttaaaatggaagtggcagtgcctgccttttttgcctctcaaggctactatagttagaatctgaggtaatttatgtgagaacatcacccataggaaaaatactcatcaggaacaggtgaaaaaaaaaaggattctgatcattatccttgagataggtacacccacattggatcactgacatcaccatttccaagaaattaatgtcctctagtagggaatggttctaaaagtatgttacactccatgatcacctttcatttaatgagagaaatagtcctacagcaaagaagggtacttttgtccttactgtgcataagggcacatgcagagatggagagttgtgcagacacctcaaggacagccagaaagaaggaatcctatgaatagtcataatgggagtaatagtaacactgctagtcatggagcactgcagatagttgtcctcatcatgattggaagctaccacttgttgcatgcttactgcatgtcaggcattctatctagcattttgcatgcatgatctcatttcatttctcaaagtaactgtattacatgtattttactattgtcttccctttaaaccattttaaagatgaaaatacagtcagtcagtgaagctgggttacctacccaaggcactcggcccaggtgtcagttgtaacctaggaccctttccccaagttgagactgcacaataatgctttttattaaagatgccctgaagagttgtgaattgtcttggacaagctcaaaagacagtttttcttctctcctctctagggtggacggcgaagtaaagcattgtgtcataaacaaaacagcaactggctatggctttgccgagccctataacttgtacagctctctgaaagaactggtgctacattaccaacacacctcccttgtgcagcacaacgactccctcaatgtcacactagcctacccagtatatgcacagcagaggcgatgaagcgcttactctttgatccttctcctgaagttcagccaccctgaggcctctggaaagcaaagggctcctctccagtctgatctgtgaattgagctgcagaaacgaagccatctttctttggatgggactagagctttctttcacaaaaaagaagtaggggaagacatgcagcctaaggctgtatgatgaccacacgttcctaagctggagtgcttatcccttctttttctttttttctttggtttaatttaaagccacaaccacatacaacacaaagagaaaaagaaatgcaaaaatctctgcgtgcagggacaagaggcctttaaccatggtgcttgttaatgctttctgaagctttaccagctgaaagttgggactctggagagcggaggagagagaggcagaagaaccctggcctgagaaggtttggtccagcctggtttagcctggatgttgctgtgcacggtggacccagacacatcgcactgtggattatttcattttgtaacaaatgaacgatatgtagcagaaaggcacgtccactcacaagggacgctttgggagaatgtcagttcatgtatgttcagaagaaattctgtcatagaaagtgccagaaagtgtttaacttgtcaaaaaacaaaacccagcaacagaaaaatggagtttggaaaacaggacttaaaatgacattcagtatataaaatatgtacataatattggatgactaactatcaaatagatggatttgtatcaataccaaatagcttctgttttgttttgctgaaggctaaattcacagcgctatgcattcttaattttcattaagttgttatttcagttttaaatgtaccttcagaataagcttccccaccccagtttttgttgcttgaaaatattgttgtcccggatttttgttaatattcatttttgttatccttttttaaaagtaaatgtacaggatgccagtaaaaaaaaaaaatggcttcagaattaaaactatgaaatattttacagtttttcttgtacagagtacttggctgttagcccaaggttaaaaagttcataacgattttttttggactgttttgttgggcgtgcctgataagcttcaagctgctttattcataaaaaaaagaaatgaaaaagatatatgaatatgacaagtattgctgagtccacaatgttgttttaagactcttaaaatacggtacctggcaatgtttatttcataaagaattgtgaacttcttgaatctagggagggggaatgtagtgaagggatgtatcaagtggtgtggtgggagggggaggccaggttatatgcactttctcatgatttacagagaagtgaataactgcaaagtgaagttgcttcttctacttcagtcttctctcactttgatttgctagttgttatcattaatgacattacaacctactgtatctctaatacgtgtgactggtcaggtatttcagttcttaggaaggaagtgccagtttgtttttgggttcctggaacagcgctcacctttgtttagaacctggtttaaagggataatcatctctgtcacattagactatccatcatgaccgcaatactcattttaggaaaaaaaaa

SEQ ID NO: 3704 - DNA, 511 bp, Homo sapiens
agttcaggtaaacttaggcaaatagaaaagtgggagagggtgggaagagacaaggtgagcctgcttttcccaatactgggaaaatgaattaaactagacgggggacgtcagagaacagaatgccttgcctttggtctgctttttaatatattttatgatcccaaattttacagaaagtctcaagggtttctgtgttttttaaatggtcaaatatgtgacatacatgtgtacatagatcacagagccccactgtagttttttaaatgagccacatttaccttggggaagagcccctccccccccgccatcataatattgtgaatgtaaagagagattggttcacaatgagaatgtacagtaggctcctataagggtgacaggattatatgcagaatgactttgaagagccaaaattgatttatttatgttaagtagtgctaagaaggaatatttgtcccggagtgaggcatttgagatagagggggaaaagcaaaaaaaaaaaaaaaaaaaa

SEQ ID NO: 3705 - DNA, 5946 bp, Homo sapiens
gtcggatacaggcatttcaaagggaaaccgttgaaatgcataacctgcaaagtaagttgccttgaatttgtgcacttctctgttccttatctgagcggtgcctttctgtagtttgtcttggagtacgtgtgtgtgcgtgcgcccctgtaagcgctgcctggggaggacagatgggagattaggggagacactccccctgtcctcgagggggacagtggctgggaaagatagggtttaggttggaatttcagtaagaaggtactaattacaacgtgcttggttggaagttggtgccaggccagggcttggagagaccatgggaaaatcacctgtctccctgccttctccctgagttagtttgccacagaagatccaacagccagactggtttgcaccgacggttcccaaatgcatggactggcactctgggctgttacacccgccacagctgctcggagaacttgtctccttgcttcgggggagggtcgacattttaattaaactaaaaaagaatgtttttctgaatcttagggcatacagccacttttaccatttttatttgaatttgagttcaggtaaacttaggcaaatagaaaagtgggagagggtgggaaaagacaaggtgagcctgcttttcccaatactgggaaaatgaattaaactagacgggggacgtcagagaacagaatgccttgcctttggtctgctttttaatatattttatgatcccaaattttacagaaagtctcaagggtttctgtgttttttaaatggtcaaatatgtgacatacatgtgtacatagatcacagagccccactgtagttttttaaatgagccacatttaccttggggaagagcccctccccccccgccatcataatattgtgaatgtaaagagagattggttcacaatgagaatgtacagtaggctcctataagggtgacaggattatatgcagaatgactttgaagagccaaaattgatttatttatgttaagtagtgctaagaaggaatatttgtcccggagtgaggcatttgagatagagggggaaaagcaaaaaaaaaaaaaaaaaaaaaaaaaaagtgattacatcatcttcccgttcaagcagtattagtagcgaagatgggttcatcagtgaaatattttgcaaagataaatatacctccactctgcattctgatctatagcctctttctttttggaagaagcattttctttgcccagtttttttaggcagtcacattaaaattctcattaataatgttgacagacaattacgtttattatttctgctaataggcatctgcattcctattcagaattttcattgttagtctataaagtctagttttaactttggaatgtttggtagaggaggacatctatacattttcttttaactgtcctttctaatgtggtacatttgtgacagtgtttgaattctgggttttcagtgaattatggaggactaaaataccaggagtagtccgtactgcttctcttatacatgagagatatctaaggactataaaacataacttaagtatacccttttaatgcctttgtaagatttttaaaccaaggaatgactgggctatctataaacccagatgcactaagtggggagaaaagctcggagctgcagcatatcagcttttgtcaacctgccaacagcagagcgtaccatgctgcaaggagtaataaacaaggaattagaaaactcgctgctggagaacagtcaaattaaacacctttttgaaaggatgagcatgtatatattgcagttctattaaatgtagcttcttagtgaggttggcattatgttaaggctggtatggaagagaactgatgaagcaggagtggtctggtgacatttttctgacttgattggctggggcgtgtgatgtaataggtttcagtgcagccccttataggttttaaaatgaattccaagacaccattacaaagaaagccggactcttttcttataactgagctcagccaaggaaactcttgcacaaatgtacaatactgtttggaatatggaagacctggatttagaatatgccaagacagatataaattgtggcacagacttgatgttttatatagaaatggacccaccaggtaatactgcagtattattgtagagagttagttaatttcgtggctttttaatttttcgaaagctactgtaaaagatcctttttggatttctgtttttattaatttgtttcattgataaaaattagtttgctcatggcttaaaaattaaacagattgtttgactgtctgtggaagcaagcagctcaggctgtgtgtggtaaatgcttattcttacttgaatggatatgaattgaactccagtttttcactggtgtcttttgttaatcgagatccttccctgggtgagttatgttgtgggatattgtccctgtaattaaaatgatgcatcttttgtgctgcttttctctgttgccagtggatgagaacagtgtagcactttgcagtgataacacttggtactttagaaagcatgtaaaatgtagcagtgattacaactcagttctctaaatgttgagactttgcttgctctctcatattaagatattataatgaaaaaagaagttgactttccattattgttagtctttgtaaaatattcttggtagatacctgaaatcattttttgtataagttaaaatagtaacagtgctttaaaacttatgacagaatttacctaaaaatcctagatttattttgtttcctaagtaagttgttttattccaatgttagctctccccctgcccccatttaaggtattcaggaatactgcagtcttttatttgtcaccaattggtatatatgaatactgatttgacattgaggaagggggatgtcatttttaatcagacctagtatatagagcacaatttatccaacagaatattaacatattaaagagatttagggcacagatgagagtttcttaaagtggcttttggcagaacagtgcctgaaatactaagattagagaaacccaattgctcctcttaaaacatactgctgtagatgagcctttttattactgcaacagagtttgtggaggacagagaccaaatttgtctttcgtaattaaataagaggaaattaaagccaactcatgttattcctgctactcatatgttcatagtttcttactttagatggatttgaccaggcatgaaactttaatataactagaatctagaagtacagaatgtcatgactctggatttactttgaaatttattcacatggccagcccaatttatttgttagtttctaaggctctctctcttttctccttttcagtttcatttctttttgagccatgctctgaaagattttttttaagaaaattatcttccatattgcatggaattgtgaactaatgctatatatttcagttactctaactttttatttttttaaagtaaaagtattcatctaaagaaatttagttctaatgtagttgggattgcgaacaactttttctttttcatctgcagcactgcctcctaaaccaccaaaacctactactgtagccaacaacggtatgaataacaatatgtccttacaagatgctgaatggtactggggagatatctcgaggtaaggctacagaaacttcattttcagagagttttagattaaaagaaagaaaagcaccagcttgctaagttccatttttaggatatcatccaacataagcatgaagcatagttggttctcttccaaagacgaccagaaaaagtcactgagcactggagaactgtgggtgctggatgccacaggaaattaaatacccgggaagtttcattattgacagagatgtcagtgaagtgccagagtgaagtggcactgcctaagaacagagtgtgaaggcactctatctattaagcacaactctaagaattcttgccttaaacacaataagaaaacaatgccattttatgttagctttgggaagggggagtaaggttggagaaactcttttgagatcatgagtttctgtgctcatttgtcagagagattgtaatgtttggttgaaaaaataaaaacttagtaccacagatacaccaatagtgaaagtgatatgcacctgtttgtgatgagactgcaattgctaacatttctatttaaacaaattattagctcttattagtgagctctgaaaatgcaattcattaatttaaatctatgtgggcaggaggaatatgggcactcactgtactttccacttgattttgctgtgaacctaaaactgctctaaaaaatagcctattttaaaaaatataaatctgtggtcactaaaccttaagatgagcattgttttgtgttttcatttcagggaagaagtgaatgaaaaacttcgagatacagcagacgggacctttttggtacgagatgcgtctactaaaatgcatggtgattatactcttacactaaggtaagccagggaatatagctgaaattagggttttgggctgatattaaaacatatttccttattccaaaatgttaatacctttatttttatattgtttttacaggaaagggggaaataacaaattaatcaaaatatttcatcgagatgggaaatatggcttctctgacccattaaccttcagttctgtggttgaattaataaaccactaccggaatgaatctctagctcagtataatcccaaattggatgtgaaattactttatccagtatccaaataccaacaggtaataaaaactgaatgaattatccagttacgatgtttagacaagatccttttaatacttagaaaacatttgaagcagatgaattacatgtaatcaagtctaaaaaacttgacactcgtaattacataattgcaattttaaagatgtttccatgtcagctattttgttaaacaattgttatttgattaaataccttatccattgaatttattttaatctttctaggatcaagttgtcaaagaagataatattgaagctgtagggaaaaaattacatgaatataacactcagtttcaagaaaaaagtcgagaatatgatagattatatgaagaatatacccgcacatcccaggtgagttttctatgaaaatcagattaaaaaataagagttctaaacttttaaagactaacatggaaaaaagaatttaaaaggttgagtttttacgaatgaggtgggggtgagagcatttatttgtgaatcattgttgattattctagtgtaatatctctaaagctttaaaccaaaaattttaagtatcagaataataaattaagttcacgtgataactgaagcagtcactgagtttcaagttgatttaattcgtgatagaaggatcctgtttagattggaagttagtaataactggaagtttcacagacttgtctaatccctgaaatggagatttaggcattaatatatatcctaccatgaaaaggaagggctatatactgctgtgcttttctagacccttattcttcactggtcactcatgtatctgggaatgccagagggaacagaaaacaacagggatgctataaactacaatagcttttaagaagataaaaactataggaaattgctacgcaatcatttttcatagattgagaaaattctccagaggaaatacttgtttctgggatactgttttaatggattttatgaatttgagtcccactctgctaataatacagatcaaatgtcctggtagtgtcttgcagtaagagattgttctatgaaaggtatgacattatctttttaaaattatgttgcaggaaatccaaatgaaaaggacagctattgaagcatttaatgaaaccataaaaatatttgaagaacagtgccagacccaagagcggtacagcaaagaatacatagaaaagttt

SEQ ID NO: 3706 - DNA, 381 bp, Homo sapiens
cgcgtctataaatccccagccagagaccagcgcaggcagccctgggtgggacacctggctgcagctgccttccgttgctgtgtgattctaaggctcactggcggcctctgggcttccccttgtcctgtctatggaatgacgggaggtcggtttcgattcctccacgattctgtgaagggctgagctttcctggggaggtgaaaaggggcttccctgaggacccagcattactgtacctcctcacttaggaagcaggggtgaatctgggattttgggtggtcactgtgggaggacagggctggggtacagagcaagaggctgcctgggttcagatcagcctctttgcatctttttgttgttgttgttgtttgtttttgagac

SEQ ID NO: 3707 - DNA, 5159 bp, Homo sapiens
cctgcccactcgctcatgcaggatgaggttgggaggactccacagagatgtctctgtttgggggttcacgaggtccacctcagctttctcctgacagggtgcatccctccctgccagttgagatgggccccctaggttttcttacctcttggactgttaagagcgtgacaggtggccgggcgcggtggctcacgcctgtagtcccagcactttgggaggccgaggcggacggatcacgaggtcaggagatcgagaccatcctggctaacacggtgaaaccccgtctctactgaaaatacaaaaacaaaattagccgggcgtggtggcgggctcctgtagtcccagctactcgggaggctgaggcaggagaatggcgtgaacctgggaggcggagcttgcagtgagccgagatcgcaccactgcactccagcctgggagacagagcgagactccgactcaaaaaaaaaaaaaaaaaaaaaaaaagcgtgacaggtaaatcttaccacctatccatgcgcaaaggcttctttagagattcactgtggcttagtagaaggtaatcactgccatcctgggctttggagctggggtttacatactgctgtcatcgcccctccctgtgtgaatgtctgcaagtcagttccccagttcaggcctcagttttcctcatctgtaagatggacagaataacagtgcctctctttcagggaaattgagagtattcaatgaattgatacaggtacactttccaagcagtatctggcacacagtaagggttcagtaagtgttaactgttagtggtataataataataacgataataattattattactagacagtctataacagtggttcatttttggtgtgtgtgtgggttttttttgtctgttttttgtgttttttttttttttttttttttttttgagacagagtctcgctgtgtcacccaggctggagtacattgatgcgattttgactcactgcaatctccacctcccgggttcagcaattctcctgcctcagcctcctgagtagctgggattacaggcacccgccaccacaacccactttgtgtctttagtagagatggggtttcaccatgttggccaggctggtcttgaactcctgacctcaggtaatccgcccgcctcagcctcccaaagtgctgggattacaggtgtgagccacctcgcctggccagacagtggttcttttttttttgagacggagtttcattcctgttgcccaggctggagtacaatggcgcgatctcggctcactgcaacctccacctctcaggttcgagcaattctcctgcctcagcctcccaagtagctgggattacagtcatgtgccaccacgctcagctaattttttgtatttttagtagagacagggtttctccatgttggtcaggctggtctcgaactcctgacctcaaaggatccgccctcctcggcctcccaaagtgctgggattacaggcgcgagccaccgtgcctggccagacagtggttcttaaaccatgtgcatcagaatcatccatagcgctagttaaaacataatgtcgcctgatgtggtggctcatgcctgtaatcccggcactttgggaggccgaggtaggctcatcacctgaggtcgggagttctagaccaggctgaccaacatggagaaacaccatctctactaaaaatacaaaattagctgggcgtggtggcgcatgcctgtaatcccaaatattcaggaggctgaggcaggagaatcacttgaacctgggaggtggaggttgccgtgagccgagatcatggcattgcactccagcctgggcaacaagagtgaaactccgtctcaaacaaacaaacaaaaaaacagccggccgtggtggctcactcctgtgatcccagcactttgggaggtcgagacaggcagatcacaaggtcaggagttcaagaccagcctggccaatatgttgaaaccccatctctactaaaaatacaaaaaaaattagccaggcgtggtggcaggcacctgtaatcccagctacttgggaggctgaggcaggagaatcacttgaacccgggaggcggaagttgcagtgagcggggatcgtgccactgcactccagcctgggtgacagagcaagagcctccgtctcaggaaaaaaaacaaaaaaccatgtcaggccccacctctcgagtttctgattcagtaggtttgggatgagaaattatttgcatttttagcaagctcccaagagatgcctagaactactagtctataaagtcccccagccaaaattcagtgctgcccaaggaaatgcagaatctcaaccaaattatgacattttttcttatatacatttgccaggatttggagggcaggggtagtcctgttgttatgaatactcagtggctccagttagctgggtctgggcctttctctggagatataatcttgggatggacccaagttctggcttggccattgaagaagtgaggccggttccccaacaggtctgtgagtttagggaggatggcatcagtgacagacactgcccaagcggtggtcctgcgcaggaacaaggctgagacttttcttttttttgagacagagtctcgctctgtcacccagcctggagtgtagtgtcacaatctcggctcactgcaacctccgcctcccaggttcaagtgattctcctgcctcagcctcccgagtagctgagattataggcgtgtgccaccatgtccacctaatttttgtatttttagtagagacggggttttgccatgttggccaggccggtctggaactcctggcctcaagcgatctgcctgccttggcctcccaaagtgctaggattacaggcatgagccaccgtgcccggccaaggctgagacttttctggtccaagacctagatctttggtttcaaatgagagttatttctgatgtcatccattcaataaatatttattatgcgcctgttctgtacctggccttgtgccgagcagtgctgaggacaggcctggccctggggttccctacctagatgaggaggcagacacgtaaacaataagttaaatatgggattataaaatgtgataagggctatgaagaaaccttggggtcaatgatatttaataacagggtggggatacgagaactagtgagatagaatgggaaggaaaattccctttttgtttttggaggcagagtctcattctgtcgcctacactggagtgcggtggcgtgatctaggcttactgcaacctccgactcccgggttcaagccatcctcctgcctcagcctctcaaacagctgggattccaggcgtgtgccaccacacgcagctgatttttgtacttttagagaaacggggtttcaccacgttggccaggcttgtctcaaaatcctgacctccactgatccagccacctcggcctctcaaagtgctgggattacaggcatgagccactgtgcccagcgagaaaatccccttcattgtgaagggccagacatatgctggaccctggggataaaatgaggagaaacagacattattcccactcttcaatgctcccagtctataggagacaggtatgagtcagtgtaatgtgaggtcatgtgacatcttcatcagcgccatgaaaatgataaaacaggctgggtgtggtggctcatgcctgtaatcccagcactttgggaggccgaggtgggtggatcacctgaggtcaggagttcaagaccagcctgaccaacgtggcaaaacctcatctctactaaaaatacgaaaattagctgggtgtggtggcctgtaatcccagctactcaggaggctgaggcaggagaatcacttgaacctgcgaggcggaggttgtggtgagctgagattgcatcattgcactccagcctgggtgacaacagcaaaactccatctgaaaaaaaaaaaaaaaaagaaaatgataaaacaaaggcacctgactttgagggactggagtgggggataaggggactctcttggataaaatggtcagggaagagctgtctaggatgtgacgtttgaccaaggaactgaagatggaggaggaggaagtcacgccatgcaaagaactgggggaagagcattcaggcagagaccagcctgtgcaaaggctgaggcagcacatacatagtcaatttcctgctctcacatctgctctcacgtggcccatcctggctgcccctgaatggtggcaagtccacgttgggggtaaagggaggcactgctatttgagcagaaacttgaataatttcctggctaatagaggacttgagataataataatattaactaagctttctggaagatgtcgcgtggtcagaacctgcactaagtagtttacctgtgtgattctgaatcctcatgttagttcctgaggtaggagctcacacctcattttgtagaggaagctcagagacggtaagtgacttgcccaaggctgcacagccagtgagtaacagctgagattcaaatcaactctatgtgactctacactccatgctctaaaatcatgcccatggccaggcgtggtggctcacacctgtaatcccagcactttgggaggctggggtgggtgggtcacttgaggccaggagttcgagaccagcctggccaacatggtgaaaccccgtctctactaaaagtacaaaaattagccgggcatggtggtacgagactgtaatcccagctactcaggaggctgaggcaggagaatcgctagaacccgggaggcagaggttgcagtgagccaagaatgcaccacactgtactccagcctgggtgacagagcaagactccatctcaaaaaatagaaaataggctgggcgtggtggctcacgcctgtaatcccagcactttaggaggccgaggtgcgcggatcatgaggtcaggagatcgagactagcctgactaacatagtaaaaccccgtctctgctaaaaatacaaaaaaaaaaaaaaaaaaaaaaagccgggtgtggtggtgtgcacctgtaatctcagctactcgggaggctgagacaggagaatcacttgaacccaggaggcagaggttgcagtgagccaagattgtgccactgcaccctagcctgggtgacagagcaagactccgtctcaaaaaa

SEQ ID NO: 3708 - DNA, 309 bp, Homo sapiens
cccacctcagcctcccaaagtgctgggattacaggcgtgagccaccaggcctggccacctctttgtatctttaaacaccagccagtgacctccaggaccctggggtggacttcagggagggaacacaccccaatttgtttggaaatttgggcatccactttttcctggtgctaagacccctttctaatgggttcccaaaaagacttcataatccctggtctaaatgtttttcgggaggcatttggcttagttggaggataccctgatgctgggaccccaacattagaggttgaaaggatggtagcccag

SEQ ID NO: 3709 - DNA, 769 bp, Homo sapiens
ccttcatctcttgtcctcctgcccccgtccctgccccccaggagccttggtagaggttttgtgtagttgccaggcctgggcccaggggacatggcagaccacgtccagactgaggtcttcctggactttccccaggcctcccgcatcccttcgccatcacagtgtttgaagacagcctgtactggacagactggcacaccaagagcatcaatagcgctaacaaatttacggggaagaaccaggaaatcattcgcaacaaactccacttccctatggacatccacaccttgcacccccagcgccaacctgcaggtaaaaaactgcccaccgggtgagccaaagtagcctcatggttgaggtggcctctggtgcctctgagaaccttccttccccttagagttgccatttcttctgatggggaaatccagcagggcactgacatgggctaattcctccctctgctggacattcggggcagtacaacaagattcacgaaaagattcattagacttcaccgttcccatctaattcaggcagacatttacagggcatctcctctgtgccgggtactcactgtgctagcagcaggggcagatgtcaaaaatataagacatagtttctcccttcagggaactatcaccctacctaaacccctattccctagtcttggggtcacttttgcagaccttcgctgatcctcttgccctgggctctttgagcagggaaaaaccgctgtggggacaacaacggaggctgcacgcacctgtgt

SEQ ID NO: 3710 - DNA, 104 bp, Homo sapiens
ccagcactttgggaggccgaggcaggtggatcacttggggtcaggagtttgagaccagcctggccaacatggtgaaaccccatctctactaaaaatacaaaaat

SEQ ID NO: 3711 - DNA, 402 bp, Homo sapiens
gcttcttctctacatctgcaccccctgaatagtaagccttctgattaggatttggtttatgttctgcactgttcctgtctaaagagaaagcccttaaggcttcttgttcctagttagagggaggtaggaaaataaggttgctttcttaagccacttcagacctgtgggggactgggtgaggtggcagcagacactctctgcctctatcccacatgcttccaggcagcttctcatctgctgtaggaaacttttaggacttggcttattcctccaggcctccaccaagaagagagcctctcctttctaccatcacacccccaaacttctctggagctttgcatttacttgcttgcttttgaagcttactcttgttttagatggtggaaagttggaagaagtgca

SEQ ID NO: 3712 - DNA, 402 bp, Homo sapiens; identical to SEQ ID NO: 3711

SEQ ID NO: 3713 - DNA, 6779 bp, Homo sapiens
tgacttgtcatcagtttatttgaaagtctactggtatgagagtaagggagagagccaggcccaacctcagttggccttactcaattctttcattttctggggacagtactagattaattataagcagcatccccttcccccatgcccacttttcaagcttcaacttttcttgagttcctaagcaggagacctggacctccagtgaaaaccatactcactgctcctaagcagaaatcccttccttctcacctgttccaccagcccaggctataccctgggcctgtcagcaacactgcctcctctagcgcaggtctcactctgaatctcattggcaggtcacttggtacatatgaccgtggtctccggcagcaacgtgactctgaacatctctgagagcctgcctgagaactacaaacaactaacctggttttatactttcgaccagaagattgtagaatgggattccagaaaatctaagtactttgaatccaaatttaaaggcagggtcagacttgatcctcagagtggcgcactgtacatctctaaggtccagaaagaggacaacagcacctacatcatgagggtgttgaaaaagactgggaatgagcaagaatggaagatcaagctgcaagtgcttggtgagtcaggggagccaaagagcaaatccccactccagtggccccagatggaccactgtagggcttcctgggaggcatggggcactctcggggaggaggagagaaaaacctcaggacaggtttgattcatttttccttgatccaattctatttgggagtgagcctaggtcaacagatatccaaattaacaatcttaggacatttaacacctcttctgaagttagtgagtctaagctttgaagagaaggaaaactagagatttttcctatttccttcattttgtcctgtgatcaacctaaatcagctcagctcatcttgattatatctccgaaattaggcttcattggacttaagaaaaaagagaatgtattaatataaagaatggggcaggagttatcaggagaatttttcaactttcataatgggcaggacaaaaaaacttccactcatagctccagtctaaccagtgtatatggaataaggactcaggcattatacctggagccagacagacttgggttcaaaactggtcagttgctcactagctgtgcagccttgaaaaaagatcttcacatctctgtgcccatattaggtaagattcttttgatagcaaataacagaaactaattcaatgtacctttaccaaaaaaggagaatttagtttaagaaactagggctatttaaagcaattcaaagagtttaaaagagctaggaagggcttaaggggagaagattgaaaaccaggttcgggccagaacccctagcttcaggaatctgtggactgtgcctatggatttggattcctgccattttacacatgttatctctcaaaacttagacttttgctcctctgagtttcaattctcagggcaatttaaagagagagaaactgatagtcccaatttagttcaggtgtgtgtacctgatctaaacatttttggtgaaaggatcagattatagggcagaaacatggatatggggaggggctccaggggttggggtatgcaattcttgtagaagagcggggctaaataatccaagagtggtgttcccttgagagccttgggttcttcatcatattatgagaataattctacttacctttcaggatgttattagagtcaaagtagataaggaaagtgaaaacattttttaaaatgtcaaaacatgcaaatgaagagtgttgtatacattcaagttccaccagccagacagtccctgatccaagcagtcagattccccttctaactcttcttccatgtcatatgggctgaaaattcagaaagtcctgggaacaaaaagattcaaggtctcttacagtggtgttctggttaacaagctctacaagatttaaaaaaaaaaaaaaaagccctaaagcgtagcatttaccaactttgtaatttctgtggtttaaatactgctaccacagttgatttcaataaactaatggtttcacaaaaagcttgcaaaatttctgagtacttaaaaatccacaaactggcttgggcttcagcacatcctgcctgagggtaagatttccaggaagtgattagcagaaaaaatggtcctctggtccagcccaagcatttctgacagctcaaagcgagcatcttggagctggacaacccaagctggctcaattaattccatcagcaaagtgcccagtgctgtgctgatcaccatgggaaatgcagaaggagtgtaagatatgaggctagaacacaggaaatggtgaaaaccaggataaaaattgctcaattaaaacatataggggaagtccaggaaacttttatcacctctgtagtctgagcaatcttttagcgatctgagatcagcttcacagaggagacaaaactagagttctagagaccagattggtagagcttctagagcctctccacacatacaaccaagaggcaagctctgatctggtcaattctctgccaatttttaatcttatgggatttgagttgcattgattctgcagatgtttcaccctgaccagaatgaaaagatctcagaggattgcaggtaaaccggccttagccaaggaaggaccagatgctgggactatctctcattctctccggcagcagtacaacagtaataatggtaaaatggcctctagaatgtatgcaatacttacactcttcaaaaagcaattatccatgacaggtgacgttttatcttactaacattgcgcgatgaggtagagtcagtttacagatgacagcaagggggttaactaccttgcctaatgtcactccactagagtcaagtccaggacccaggctggtctcactccaaaactagtgtttttgtgtctacttgcctccctccctccctccctcccttctttttctttttcctctcttctcttcccttctctctctctttcttcctttctttcttcttttttttttttttttgaaggtcttctccttacccaagctggagtgcagtggtataatcatagtttattgcaccctggaactcctgggctccagcaatcctcctacctcagcctcctgagtagcagggactaaaagtgcacaccaccacacctggctacttttcttttcttttctttcttttttttttttagaaactgagtctctcaatgttgcccaggctggtctcttaactcctggctgcaagcaatcctcctgcctcagcctcccaaattgctgagattacaggtgtgagccgctgcacccggctgtgttttatcctttctatctcataactacttcattcatcctttcatgagatacttatagaatacctgccatgtggcagggattgtgctagacatggagataccaaagttagcagaccaatctgtttatcacaattgatgcggctggaagttacatgaagttcttctctgtagctctgccagagtctagaaggctggcacctgcactggatggttgtgcaaaggactttgccacgcgcagacaggtacctcttaccttaggactcttgctgaagctgaatccgataattggaaagacagaccagccaaggtgcccgccatgaaccgttgctagagaagggtccctgagcatctcaggcagttgatatactaagtctgaccccagcaagtctctgggctgttcgttcaggctcacacacgatcataaccccattttgttcccagagcatatgatggactgtggcgccccctccaggacgcagcttagcttcactgcctagaagccgctcttgcagtgagtctgtgaggcctcaggaggtcaaggctgctcactggctccctctgtagaacttcttcttcatgactctgcctcctggggcattcaggccccttccctggatccctttgttctttgttggctaaaccttcacagcatgaatgcctcactgtctcatcttataacatcctcctcactttcagaccctgtacccaagcctgtcatcaaaattgagaagatagaagacatggatgacaactgttatctgaaactgtcatgtgtgatacctggcgagtctgtaaactacacctggtatggggacaaaaggcccttcccaaaggagctccagaacagtgtgcttgaaaccacccttatgccacataattactccaggtgttatacttgccaagtcagcaattctgtgagcagcaagaatggcacggtctgcctcagtccaccctgtaccctgggtaagaaggatccctgggagctgaggggggcacagggtaactggagttgttttgaacaaagaaaggctgggggtcctattcagcctccttgcacagtgtggtggtgaatccctaaggtgtctgggagagctgggagacgtgggttctgccaccagctctaccaccacctcccagccagcttacctcaacttcgtgggggctcagtgttctcacctgcaaaggacgtttgggagagatctctgatactcctcttccctctcccgctctaacaaagcatagtcctaacatctgaggccagggtcatcatagagtagactgaaacatcagggtgagcagggagaaggaagggcaagtgggcgagcagctgtctagaggggcttcattagacagccgaagtcagccaaggaaagagggaccgaggtcattagaccgccaaagtcagccagggaaagagggactgaggagacgggcctgagagaggccgtcgaggaggcgtgagagcctgagcctcaggcgaagcttctcctccccagcctgatgttcctagatgaacttaggaagccagattcccctgtctcctgggaggatccactcatgagtgtcacacctggctctagatcaggcctacactggtgctagcatgggacagctaaggccatgggttttagagtcagtcatacctggggtcacttctaggactgtcacttactagctaaacaagttacttagcttccccaagtcatgttcttcctaaataaaggacaaaataacagttcctatctcgtgctaaggattcaatgagacaagacacgtaactgcctatcacagtggctgacaagtccttagtaagcgggagctaaatgagacgcagtctcttagagttttggggacccttaataaacttggatcaatatctccagcactctgggaaataccagagtcagataccctccacaatcctgaagtcagatccctgagccctagcgtacacattcttctagaataactcagacctgaggtgctcacattcacctgtgacccctgtcatgcccagtcatcagggattctggcctctgagaacgttgctgttttgtggtcttcctgggctctgtctaccctccttaactgcactgatttctttatctctactcccacatgtggactacggagactgtgtatgctcttccttattcttcctaactaattggccctgtctctaccagcctctcctgatatgccttgctcttctgccaccacagacccactgtgacagtgtggtatctgaccatgagaacacaatttggctggtggttccaacaccaccctcatatcaatatcacatcctgagatccagaaaaaggaagacgcacattccctgtcctctataaaatgggtgtgactgttcatccgaagagaggataaaagcaataataaatccattttttttggaagggtaaacccatctgtcactttttagtcaccgaaattatcctagaaagccccctcaaactcctttccctactgtatcactcattccttttttttattttctccagctcagcccttccccaccccagcatctaagctttccttccatcctttttcttttcctttccttttctgtcttcctttctcttcccttcttcttcctagttggtgcagatacttagtggggtagagaaacaaggaaaggaagtggtccttttctctctaaagtcagctgtgcattgtatcatgtggtcatctgtctgtacctgaagatctaccctacctcgttgatgtccagagtaggggagcaatgctttcccaggccacagatatgtcgaggtaacctttgagcacagggcccaggtaagccagtgatatttaaggaatttctgcattttttatactttatgtttggggagattgaggaaaagaatgtcccagccaaataggatgggattcagggaagaaattaatttccctgctctgtgagctcccacaccagtgtccagtacacttgccccttctcaatacattagtcaagataaagatacctaagcatatagggttttcttgctctttcagcccggacctttggagtagaatggattgcaagttggctagtggtcacggtgcccaccattcttggcctgttacttacctgagatgagctcttttaactcaagcgaaacttcaaggccagaagatcttgcctgttggtgatcatgctcctcaccaggacagagactgtataggctgaccagaagcatgctgctgaattatcaacgaggattttcaagttaacttttaaatactggttattatttaattttatatccctttgttgttttctagtacacagagatatagagatacacatgcttttttcccacccaaaattgtgacaacattatgtgaatgttttattattttttaaaataaacatttgatataattgtcaattaactgaa

SEQ ID NO: 3714 - DNA, 6779 bp, Homo sapiens
tgacttgtcatcagtttatttgaaagtctactggtatgagagtaagggagagagccaggcccaacctcagttggccttactcaattctttcattttctggggacagtactagattaattataagcagcatccccttcccccatgcccacttttcaagcttcaacttttcttgagttcctaagcaggagacctggacctccagtgaaaaccatactcactgctcctaagcagaaatcccttccttctcacctgttccaccagcccaggctataccctgggcctgtcagcaacactgcctcctctagcgcaggtctcactctgaatctcattggcaggtcacttggtacatatgaccgtggtctccggcagcaacgtgactctgaacatctctgagagcctgcctgagaactacaaacaactaacctggttttatactttcgaccagaagattgtagaatgggattccagaaaatctaagtactttgaatccaaatttaaaggcagggtcagacttgatcctcagagtggcgcactgtacatctctaaggtccagaaagaggacaacagcacctacatcatgagggtgttgaaaaagactgggaatgagcaagaatggaagatcaagctgcaagtgcttggtgagtcaggggagccaaagagcaaatccccactccagtggccccagatggaccactgtagggcttcctgggaggcatggggcactctcggggaggaggagagaaaaacctcaggacaggtttgattcatttttccttgatccaattctatttgggagtgagcctaggtcaacagatatccaaattaacaatcttaggacatttaacacctcttctgaagttagtgagtctaagctttgaagagaaggaaaactagagatttttcctatttccttcattttgtcctgtgatcaacctaaatcagctcagctcatcttgattatatctccgaaattaggcttcattggacttaagaaaaaagagaatgtattaatataaagaatggggcaggagttatcaggagaatttttcaactttcataatgggcaggacaaaaaaacttccactcatagctccagtctaaccagtgtatatggaataaggactcaggcattatacctggagccagacagacttgggttcaaaactggtcagttgctcactagctgtgcagccttgaaaaaagatcttcacatctctgtgcccatattaggtaagattcttttgatagcaaataacagaaactaattcaatgtacctttaccaaaaaaggagaatttagtttaagaaactagggctatttaaagcaattcaaagagtttaaaagagctaggaagggcttaaggggagaagattgaaaaccaggttcgggccagaacccctagcttcaggaatctgtggactgtgcctatggatttggattcctgccattttacacatgttatctctcaaaacttagacttttgctcctctgagtttcaattctcagggcaatttaaagagagagaaactgatagtcccaatttagttcaggtgtgtgtacctgatctaaacatttttggtgaaaggatcagattatagggcagaaacatggatatggggaggggctccaggggttggggtatgcaattcttgtagaagagcggggctaaataatccaagagtggtgttcccttgagagccttgggttcttcatcatattatgagaataattctacttacctttcaggatgttattagagtcaaagtagataaggaaagtgaaaacattttttaaaatgtcaaaacatgcaaatgaagagtgttgtatacattcaagttccaccagccagacagtccctgatccaagcagtcagattccccttctaactcttcttccatgtcatatgggctgaaaattcagaaagtcctgggaacaaaaagattcaaggtctcttacagtggtgttctggttaacaagctctacaagatttaaaaaaaaaaaaaaaagccctaaagcgtagcatttaccaactttgtaatttctgtggtttaaatactgctaccacagttgatttcaataaactaatggtttcacaaaaagcttgcaaaatttctgagtacttaaaaatccacaaactggcttgggcttcagcacatcctgcctgagggtaagatttccaggaagtgattagcagaaaaaatggtcctctggtccagcccaagcatttctgacagctcaaagcgagcatcttggagctggacaacccaagctggctcaattaattccatcagcaaagtgcccagtgctgtgctgatcaccatgggaaatgcagaaggagtgtaagatatgaggctagaacacaggaaatggtgaaaaccaggataaaaattgctcaattaaaacatataggggaagtccaggaaacttttatcacctctgtagtctgagcaatcttttagcgatctgagatcagcttcacagaggagacaaaactagagttctagagaccagattggtagagcttctagagcctctccacacatacaaccaagaggcaagctctgatctggtcaattctctgccaatttttaatcttatgggatttgagttgcattgattctgcagatgtttcaccctgaccagaatgaaaagatctcagaggattgcaggtaaaccggccttagccaaggaaggaccagatgctgggactatctctcattctctccggcagcagtacaacagtaataatggtaaaatggcctctagaatgtatgcaatacttacactcttcaaaaagcaattatccatgacaggtgacgttttatcttactaacattgcgcgatgaggtagagtcagtttacagatgacagcaagggggttaactaccttgcctaatgtcactccactagagtcaagtccaggacccaggctggtctcactccaaaactagtgtttttgtgtctacttgcctccctccctccctccctcccttctttttctttttcctctcttctcttcccttctctctctctttcttcctttctttcttcttttttttttttttttgaaggtcttctccttacccaagctggagtgcagtggtataatcatagtttattgcaccctggaactcctgggctccagcaatcctcctacctcagcctcctgagtagcagggactaaaagtgcacaccaccacacctggctacttttcttttcttttctttcttttttttttttagaaactgagtctctcaatgttgcccaggctggtctcttaactcctggctgcaagcaatcctcctgcctcagcctcccaaattgctgagattacaggtgtgagccgctgcacccggctgtgttttatcctttctatctcataactacttcattcatcctttcatgagatacttatagaatacctgccatgtggcagggattgtgctagacatggagataccaaagttagcagaccaatctgtttatcacaattgatgcggctggaagttacatgaagttcttctctgtagctctgccagagtctagaaggctggcacctgcactggatggttgtgcaaaggactttgccacgcgcagacaggtacctcttaccttaggactcttgctgaagctgaatccgataattggaaagacagaccagccaaggtgcccgccatgaaccgttgctagagaagggtccctgagcatctcaggcagttgatatactaagtctgaccccagcaagtctctgggctgttcgttcaggctcacacacgatcataaccccattttgttcccagagcatatgatggactgtggcgccccctccaggacgcagcttagcttcactgcctagaagccgctcttgcagtgagtctgtgaggcctcaggaggtcaaggctgctcactggctccctctgtagaacttcttcttcatgactctgcctcctggggcattcaggccccttccctggatccctttgttctttgttggctaaaccttcacagcatgaatgcctcactgtctcatcttataacatcctcctcactttcagaccctgtacccaagcctgtcatcaaaattgagaagatagaagacatggatgacaactgttatctgaaactgtcatgtgtgatacctggcgagtctgtaaactacacctggtatggggacaaaaggcccttcccaaaggagctccagaacagtgtgcttgaaaccacccttatgccacataattactccaggtgttatacttgccaagtcagcaattctgtgagcagcaagaatggcacggtctgcctcagtccaccctgtaccctgggtaagaaggatccctgggagctgaggggggcacagggtaactggagttgttttgaacaaagaaaggctgggggtcctattcagcctccttgcacagtgtggtggtgaatccctaaggtgtctgggagagctgggagacgtgggttctgccaccagctctaccaccacctcccagccagcttacctcaacttcgtgggggctcagtgttctcacctgcaaaggacgtttgggagagatctctgatactcctcttccctctcccgctctaacaaagcatagtcctaacatctgaggccagggtcatcatagagtagactgaaacatcagggtgagcagggagaaggaagggcaagtgggcgagcagctgtctagaggggcttcattagacagccgaagtcagccaaggaaagagggaccgaggtcattagaccgccaaagtcagccagggaaagagggactgaggagacgggcctgagagaggccgtcgaggaggcgtgagagcctgagcctcaggcgaagcttctcctccccagcctgatgttcctagatgaacttaggaagccagattcccctgtctcctgggaggatccactcatgagtgtcacacctggctctagatcaggcctacactggtgctagcatgggacagctaaggccatgggttttagagtcagtcatacctggggtcacttctaggactgtcacttactagctaaacaagttacttagcttccccaagtcatgttcttcctaaataaaggacaaaataacagttcctatctcgtgctaaggattcaatgagacaagacacgtaactgcctatcacagtggctgacaagtccttagtaagcgggagctaaatgagacgcagtctcttagagttttggggacccttaataaacttggatcaatatctccagcactctgggaaataccagagtcagataccctccacaatcctgaagtcagatccctgagccctagcgtacacattcttctagaataactcagacctgaggtgctcacattcacctgtgacccctgtcatgcccagtcatcagggattctggcctctgagaacgttgctgttttgtggtcttcctgggctctgtctaccctccttaactgcactgatttctttatctctactcccacatgtggactacggagactgtgtatgctcttccttattcttcctaactaattggccctgtctctaccagcctctcctgatatgccttgctcttctgccaccacagacccactgtgacagtgtggtatctgaccatgagaacacaatttggctggtggttccaacaccaccctcatatcaatatcacatcctgagatccagaaaaaggaagacgcacattccctgtcctctataaaatgggtgtgactgttcatccgaagagaggataaaagcaataataaatccattttttttggaagggtaaacccatctgtcactttttagtcaccgaaattatcctagaaagccccctcaaactcctttccctactgtatcactcattccttttttttattttctccagctcagcccttccccaccccagcatctaagctttccttccatcctttttcttttcctttccttttctgtcttcctttctcttcccttcttcttcctagttggtgcagatacttagtggggtagagaaacaaggaaaggaagtggtccttttctctctaaagtcagctgtgcattgtatcatgtggtcatctgtctgtacctgaagatctaccctacctcgttgatgtccagagtaggggagcaatgctttcccaggccacagatatgtcgaggtaacctttgagcacagggcccaggtaagccagtgatatttaaggaatttctgcattttttatactttatgtttggggagattgaggaaaagaatgtcccagccaaataggatgggattcagggaagaaattaatttccctgctctgtgagctcccacaccagtgtccagtacacttgccccttctcaatacattagtcaagataaagatacctaagcatatagggttttcttgctctttcagcccggtcctttggagtagaatggattgcaagttggctagtggtcacggtgcccaccattcttggcctgttacttacctgagatgagctcttttaactcaagcgaaacttcaaggccagaagatcttgcctgttggtgatcatgctcctcaccaggacagagactgtataggctgaccagaagcatgctgctgaattatcaacgaggattttcaagttaacttttaaatactggttattatttaattttatatccctttgttgttttctagtacacagagatatagagatacacatgcttttttcccacccaaaattgtgacaacattatgtgaatgttttattattttttaaaataaacatttgatataattgtcaattaactgaa

SEQ ID NO: 3715 - DNA, 408 bp, Homo sapiens
gtctcttatggtcgaaactgcagaggtgaaatagactccagtctcccatagcactcccaggcttattaggaagagaaaactcctgcctaataaattttggtcagactggttgatctcaaaaccctgtctcctgataagatgttatcaatgacaatggtgcccgaaacttcattagcaattttaatttcacctcggtcctgtggtcctgtgatctcgccctgcctcctcttgccttatggtattctaataccccgttaagtacttgatgtctgtcacccacacctatttgcacactccctccccttttgaaaatctctaataaaaacttgctggtttttgtagcttgtggggcatcacggaacctaccgacatgtgatgtctcccccagatgctcagctttaaaatttc

SEQ ID NO: 3716 - DNA, 408 bp, Homo sapiens; identical to SEQ ID NO: 3715

SEQ ID NO: 3717 - DNA, 949 bp, Homo sapiens
gtttgaatataaaaccctagttattattcagttgtgtttcctaacttccactatgatttctttttcttctttttaaatttagatcttaggatctcaggagcccagaatcaaattaatcacgacccttggttcaggacacattctcctcatttgttcacgcgtggcccgttttacttgtctctgtgattataactgtacctgttttcgtgggtagcgactaactgaggccagtggtgcaggtggtaaaggaatttaccaagacagttgtaggtcaagaaaggcagatttattcgagaaagcaggaagataggttgcaagaaagcaacgggcgtgtcagcaagagagaagctgactggcaggagacagagccttgccgggggttttaaaggtggtgcttgcgctggagagggccacgagcggtgctggtaacgccagggttgcagggagctaagttgcattttcctctcagccgaggatctggtgataagttgggtggaggaggattgtgagttaggtgagttattcgtgcagacgcgctgtgtcctgaaccatgaggaaaggcagacatagccaatctgcgaattctttttgcttccccggctccccccagcctgacttctcttccctaattaggactccacacctgtattttttgttttcatcgtgtgacaaacacccatggacctgccacctgacacaagagccagctcggtcctctcacgtctcacaggtgaccacgatgcttatcccctgcctccttccgcctgggtaaccgtcagcccaaattccgcgctcatcatcccttgctgtccttttaaaataactatctggtatctatacaaatctgaaaaaaaaaatttaacttcagttctttttaactttataaagtgggtaccactgtagtattctggaacttttaaaccttataattgttaaggtccatccgcgt

SEQ ID NO: 3718 - DNA, 409 bp, Homo sapiens
ggttatttatttatcatcagttgtagcagttctttatgtattctggaaccaagtctattggattccaaatacggtattttctttgtatatatggtaaatagaatactttctcttttaagtcataagatatattttaagatattaaatgactaaaattatttaggtcataagttaaatatttttttcctgtggtggtattttttaatcccttctttccacctagtcactttttggaatatctgtagcaataatagtaggaacagtagatgtgcctttggagtgaaaataaatagccatttaaaacataggcctttatcaacatttagttctttcaattaggaaatggagaatgaatgtttgagtttttaaggggaattaattgaatgatattttatcatttaagatgaaa

SEQ ID NO: 3719 - DNA, 4864 bp, Homo sapiens
aggtgaagctttgttctaagaatatttgtttcatctagtttatgagtccaaatgatatagactgtaaatgtcacagcagtggtgaaagactggtaagtatataatgtaataaatattaaccatcaacatgattttgaaggcttgaaactacataattatctgacattcgttaaaccccaaagttaaaacagctaaacttttcttagtagagatggatgtatagtttgtggtttattcatacaatggtatattgcatgatggtttaatggaatgaacataacattaagaggaaaaagcaaagttacaaaaggatatatacagtatactatttatatctggttgttggctataacctcatgttatatattctttgtttctgggtactttaaatattagaaaaaatttaaagaaaataccgtgcaatcatctcttcagttgacattaaaaatgactgaaagtcattcaattaaattcaatatttctgttaggaagaggtgaatacttcctaatatacaaagcaaaagtgtccccatcaccacaactgatgttgttctgttagtgcaaactgatacaattagatagaataatggaaattgtatgaatattggataagataattcagaatttttgttatttgtagattatagagtattatatctgggaaattcaaaacaaaataataaaaaagctcagaagtttagatatatgattattatatcaaaagaaatccacttcctatgtgcctactatataccagttttaaatcctagaatatgttacggaaaacaaaatcccattcataataatggcaaaaatataaagcgccttggagtaaacctaacaagaaatatgtaaaacctaccttatgaaataacggcaatttctacttcaaggaagtaataagataaaggggcaagtagtataagggtgttaattgtagctttgtttatgataataaaaagctagaaacaatctattcaaaaataagagattggctacatagtaaactataatataatgctatatatgtaatatttacatgtagcagtatgccatacagctattaaagagtgagagctcatgtgaaatgtttttcaatatatctaaattaaataaaagcaagtaatcatgtatatacactaacctattcatataaacatgtatatattttaggtacatttttaaatcaggaaaaaacatacatttctgttgagattataatgccttttactgatatggcattaacttttatatctaaaaatttatattgatttccattttcttaatttctagaagatagacttaattattcccataatttttcagtttttcacatttttaatgtttctaaagttgcagtgtatcttgcaatggatagtgtcttataagcacttgtgaagtagttgacctggcctgcacatgagtgcacttgatcatagactttcacattgtcagtgcttcagcagacttctgtgcattgctggtactatacctgttgagtttttaaatgttttcctggttgttttctgaaactttctgctgataccatctggtaagatcaagaaagcaccagcatataaatttatagaatgacgttagtagctttgaaggaaaatcccagaaacgatactgcagtactcttaagtgctgtggcatgaatggtcttgatggcccagaaggtgatattgtggggaaattttatgtgataagaagcattgtgtcatagtttaattcttttttagtggtgtactaagtaattatgtatcctaaaattatgaacagattcaatgaaatatattaaagttggataaatatgaactgaatataaattaggttattggatttatttaatacttttactttctgaaagcatataaagaaccaatattaatatataatagaggttattgccgtattttagaatgagagatgcactttatatttttctcctttctaatattcaaaaatattaaaaatattgatgtttgttatactaaaagagagttactgtaatacctagaattttgatgggaatcaaagaattaaactgtgaggtcccaggatgaacaggaactaaggtagtattaggaatttctctggtacttccctttcatttttatctacttctctttgtatcccgttggttcatttttacctggttggcttcttctgaccctcagctacctcataatgactaccacagccccatctctgcgtgacctttcaggacatcaactatatccctttagtttaaattcccgagagagaaagaaaacctgattagtccagttcctctttgcaacccacactatacgagtcacatcttgtgatgagcatggattgtagctgaactggggcccagagcttgactgtgcctcttggcaagaggcatagtcatatgtgcactgccctctcagcagggactgtggggagggcttccccctgaagcgggtgaagggaggtgaggcaatacatgtcttatttaacttaacatctctatgttaaatatcttttaaaggttactggatacctcaaaattacttttagcccagagatgaaactattttgaaactccttggggatttcgttgttcatggtttttcccttctggaaatttgtacattttcctctgtatttatgttcccctattctgtttgctgtagcttatttcccttaatcttaaaatgtcacattaccctttatttgatttaaatatgtcataagaagtgaagtggcgtaactttagctattagaatttttcagtttttattcacctgattggaaatcctttttattaactgaactttggtgtttggggaggatgggtcagtgattgtgggctctatcaagtgaaaaatgggttatatttttaaaataccaatttattataaaatatataaagcaagaacattttataagtaatgggtttatttttattgtatttaagaaagaaagtcttctctcttaaaaagagaaaatgttttccatccaggtgctgttacttacctattctcagctatgctcaggtatttcaagcctgggactcatttcgccatggaaggaattatttaagaagcacctgactaggtcagaactatgcctgaaaatattatagggttaagtaccaatttccagtaattttaagccaatcttcagttagaaacaaacaacaaaaacacatagttttaaaagtaaatttgtatttgttttcctaatcttttttttttgtaatacttattttatagctcggtcatgagcaccgacagtaactcactggcacgtgaatttctgaccgatgtcaaccggctttgcaatgcagtggtccagagggtggaggccagggaggaagaagaggaggagacgcacatggcaacccttggacagtaccttgtccatggtcgaggatttctattacttaccaagctaaattctataattgatcaggtaacatttttatatcaaatacttactttcatcaatatatgatagttaactgtagctacatggttttggattacatagtttctgaagcctccttgagataaagtccagtctttcacattattccactaaaaaaaaagtggacctatttataaccatattgtttatttgaatactttcaaaacgtctgaaatatcttagaattatgaattgcctaagaactaaatggtttcatatatactatgctttttatcgtaatatcagtgagataactatggttcttagtagaaatataagacataatcttatatccctgtatcttatgtcagaaacatgatgaattttcattttcaataaatatcaagtatgtttttgaaaaatttttggaggctgctaattctggagtgaaagcagagacctcttatgtgaactaataattactgagtcctttagcttgtatacatctaatttatcaaacgtttttggcttaaagtatggtatgaccatatggttttgctgttttcttattataaaattaacagagttttaaaactagttgagactagatgttttcatctaaccttcttttacagatgagaaaacagatccagaaacattaagtactcacataaattaattttaaggccaaatgtgatttatatctttatttcattttagtagaaaatgaataattattttgtgatcgtaaaactctacaatctgctttcagggaactaattaatatagttagttgaaaaaataatgaagtgtttgtaacaccaatatgatggattttttttaacactttgaatgttaccagctttagatgtaaaattggccatcattaaataaaatttctttgctgtgaaagcattttgctaatagatacatatattgaggaaatatggagactaaaacagtacttctgttttcactgtaagctaaggaacatagcaaatacaaattaggaagcatttacttgtcatggaattttcaggacatttgtaggtttatggttttttttgagacacagagtctcgctctgtcgcccaggctggagtgcagtggtgcaatctcggctgactgcaacctccacctccgggttcaagtgattcttgtgtctcagccacctaagtagccgggactacaagtgtgcatcaccacacccagtgaatttttgtattttcagtagagatggggtttcaccgtgttgaccagctgatcttaaactcctgacctcaagcagtctacccccgttggcctcccaaagtgctgggattacaggtgtgagccactgcacccagccaagtttatgtatttttattctttttcatgaatgtgatttgttaaatgagtgattaaatataatttttatatatttgtatgacttttctgtaaataaaatttaaaatcagaaaaaatc

SEQ ID NO: 3720 - DNA, 1118 bp, Homo sapiens
ggggtgatttaagccctttcccaccaactgtagtccgtttgctttattaatatttatttatttatttttgagacagagtctcactttttcacccaggctggactgcagcggcacaatcatggctcactgtaacctcagcctccagggttctagaggttgtcatgtctcagccacctgagtagctgggattacagacgtgcgccaccacgcccgggctaatttttaaaaatatttttagtagaaacagggttttgccatgttggccaggctggtctcaaacttctggccccaagtgatctgcccgccatggcctcccaaagtgctaggattacaggtgtgagccactgcgcccagcttattaatagacatttaatataaagaagtaaataaactttttattgaggtataatttatatacagtaagtgcacagataatgtgtatgcagttagatgaatagtgacaaatacacctcacatcagtagtcccaatcctttgggaggccgaggtagatggattacttgaggcctggagttcgagaccagcctgggcaacatggcaaaaccccatctctacaaaaaaatacaaaaattagccaggtgtggtggtgtgtgcctatagtcccagctactcaggaggctgaggtgagaggattgcttgagcctggggaaatcaaggctgcagtgagccatggtcgtgccactgcactctgacctgggtgacagagtgaaaccctgtcttaaaaaacaaaacaaaatccaaatatttacacctgtgtcatcaccacccagatcattgtttagaatatttccgccaccttagaaagttttgtcatgccttttttttcagtcagtccctccccttcactcactgcaagaccaccactgttgtgacttttagcatctaaatgtagctttggaatcatgtagtatgtactctcatgtctctgaaattcatccatgttgttgcataattcagtagttcactactttttaatttctgattagtatttcattgtatgggtgtactgtaatttgtttaaccattcacctgctgtttaatcttttgagctgtatgcatttggctattatgaataaagctgctttgaacattcctataa

SEQ ID NO: 3721 - DNA, 378 bp, Homo sapiens
atcagacattcacatgcttatgaatgaaggaccccttgtaatacttctgcccctgccccccattccacacaccaccccctccccaggagtagggattagaaatcgttagtctttccattttgtcttctgtggtttcagttaaagttctaaagacgtattttactaaaagtggaattgactttttgtattcaggggaacttgtcagtggttttcatattatgtgccgtggagtcccaggattccagaagatgcctcaagggagacccctcccttcccccgtatcccttccagctttaagcagcctgtctgctttaagctcttatatatattgagattctccatgagatttcatttgtataaatgatttcacagcttacc

SEQ ID NO: 3722 - DNA, 378 bp, Homo sapiens
atcagacattcacatgcttatgaatgaagtaccccttgtaatacttctgcccctgccccccattccacacaccaccccctccccaggagtagggattagaaatcgttagtctttccattttgtcttctgtggtttcagttaaagttctaaagacgtattttactaaaagtggaattgactttttgtattcaggggaacttgtcagtggttttcatattatgtgccgtggagtcccaggattccagaagatgcctcaagggagacccctcccttcccccgtatcccttccagctttaagcagcctgtctgctttaagctcttatatatattgagattctccatgagatttcatttgtataaatgatttcacagcttacc

SEQ ID NO: 3723 - DNA, 495 bp, Homo sapiens
gttgtgtttataaaatgtttcctcttgtcttcatagatgagggagtcagggacctgaatgataattttggaggaaatgaaacagatgaaagtgaaataaattattttcatattggctcagtgtagctgtggaaacctttcagccctgagcctacaaaccttcctgtttgactggatatgacattaccaggagttttactttcctgcctttattgtccctggagagaaaaaagaaatatgtcttttccacagctagacatggaaggttcaaacaaatataaaggacccctgagttattaacaattccatgggaacatgtgcttggtgtatgcccagaatagttcctttcaaatgattctcttggtgcttctgcactgttcttcaccagagtgtaacataagagctgaatcaaggcttgttcagtcagtgtttggaaaagaagtggtggctggatgctggtcagctggcttgggctgttggcaagcttgccaccgac

SEQ ID NO: 3724 - DNA, 575 bp, Homo sapiens
gttttgaagcacatattatggcttatgctgttgaaaactctccagtgttttagcataatgtccgagtcaagttagaacacaggtctctgctaattgtcatatcttagatgattgcctgataaagatgattgtctggcgtagcttggagtaccaatacaggagacatgttcttcccccacttcctattccttccactgccatgctagacaatgcttatcaaaggtgacattctttcctacccagcttggacatgcctcataatcctgcccaagcagcattctaatagccacagctagtaaacaagggatctaactagtttgtcagtgtaggtagtagaatctttaaatttttttttaaaggccattgttagtatttttaagagatcaatttacatcatttatttcagatggaatattgtttatttctctgtcgcagtggctcccaatcttttagaatgttcctttttaataaaaaagaatcagattctcacatgaccttgaatttctttaacactttaaatgaattttacttttatcaatcgcagcatataaattcattggaaaaataggcatgtg

SEQ ID NO: 3725 - DNA, 575 bp, Homo sapiens
gttttgaagcacatattatggcttatgctgttgaaaactctccagtgttttagcataatgtccgagtcaagttagaacgcaggtctctgctaattgtcatatcttagatgattgcctgataaagatgattgtctggcgtagcttgcagtaccaatacaagagacatgttcttcccccacttcctattccttccactgccatgctagacaatgcttatcaaaggtgacattctttcctacccagcttggacatgcctgataatcctgcccaagcagcattctaatagccacatctagtgaacaagggatctaactattttgtcagtgtaggtagtagaatctttaaatttttttttaaaggccattgttagtatttttaagagatcaatttacatcatttatttcagatggaatattgtttatttctctgtcgcagtggctcccaatcttttagaatgttcctttttaataaaaaagaatcagattctcacatgaccttgaatttctttaacactttaaatgaattttacttttatcaatcgcagcatataaattcattggaaaaataggcatgtg

SEQ ID NO: 3726 - DNA, 495 bp, Homo sapiens; identical to SEQ ID NO: 3723

SEQ ID NO: 3727 - DNA, 22786 bp, Homo sapiens
acctgtcattcgttcgtcctcagtgcagggcaacaggtaagagctgctttcagcctggcaccctatctctggtctgccagctggtctctcagggctgtacacactgactctctggtctgagtagatctgactttttcctttgtttgtttcttagaatctgtctctttttcattttctttttatctcccatgtctctttctgtctttcctcattttcagcttttttctctctttttcccttcgttactttcttttgttagttttcaagatcattcatttcatttcatcattctctgacactcttgctttctcttatttttccctctgaattctaactatctttttctctaaatttctttctctccccctttttgtctctttcctcggctttgtatctctccgtctctgtgtttctgtctctctcttcctctctatcaagaacgatggcttaatatttcttcctgcaattccccattcctctctccctttgactccctctacctgctgggctgacagcagagctcagtgggtcagagcccatggggagcctaggggtgggggaagagctagggagggaaactaagaggatgtgggggtgatgggaatgatgaattgggtaaggagagatttggggaattgagagatgaataattagcagaaataagtgaagaaagtggaagaggaatgtagtgtcactatacagaaagtaaacagatttctattctcatcctaattcactgtgagaccctaggcaagtcattcactctctgaaaaaaaggcttggcctgtaatttccaccaccctttctagttttgattttgtgatcttctaaattttcctgtttctaagaatttctgattctctgattacagttatctaaagttctgtatgattctttcatggtgggaaaggggtactaggaagagaagtaaggcctgatgtttccaactcctgaagagaaattaccacttcccttccagacctaattgacttttgcaaagcaggccacaaaaggggtgggggggtgggggacaaggaatgctgcaatgagtgttttctggctgtctgctggggtagagttgcagttggcccttttcacctctgggagtacagattgggtgctgacacaagagaggattttaaagtcgtagggaaaaactttcagtaatgatctgttacttggtctcaaatttcaccatcatctctttggttaaaagtattgttttaagaagatgcctggcaagcattatcacacattaggtacataagttattgaatggtagagtaaatgaatattcaacagtacctgaaattccactgtagttacagatctgttcctttggtaaggcattggtgacaaatggcatatgacctggaaagaggcctatgttagtgcagcagaggagataaatgtctagagtcaggccctcagtcaagaaaaaaaggtagtaatatttgaatcacagatccataatggttaagttaggaatctctggaaacagattgcctaggttcaaatcctgcttctcctatgtactagctttctgatctagacaggttacttaatctttttgggattcagtttccctatcatcacagggttgacatgagaacacggcctggcacagagggctctgtaagtgtttgactatcagaactaggcggaatctatgaaattatctagtccaatgtcagtggagaaacggaagcccagagaggggaattacagagcccaagttcacacaataaattgtaacaggattgggacaagaatcaattctctagcttcccaaacccagcctggtatattcatgtgacttcccttggctgtacgttcattttttctacatgggaaatggagaaaataaaaataataaagtctatcaattaaatataatatttaacacttttttactgtttactctgggataggtactctgctaaatgctttatatggattatcttactgaatcttcacaacattcctgtgatgcagattgtccttgttattaccaacattttccagatataagatgtacagcagggaagtgacttttctaaggtcccaaagctagtgagtggtggagccaggattcaaacccaagtagtttggctctagagcctatactctttataccctaaattgactaaaatgcttccttgattcaattttactcactctagtctcttggtaggtaatgagatggaatagaaacagagcccatggtaactagactacaaggtcatgggtataatgatggccaggcagagtgaggcagagcaaatttcaggaaaggagtaacagaacaagagaaatgagaacaggagcttgaaagaacttgagaattcaacaaattccaagaagtggtctatattttcccaggaccctgagcatatcatggccaaaagccccctagtaatgatgtgtgttaatttctcctgtttttatatacaggaggtaggtcttctccaccatcccaaggcaggactggactttgcctccaatattgggggctttccttcccactacataccccaatgttgttggcattattgttgccagtattgatgttaggggagtttacaggagcctggagccttgtcatctgccttgcctgcacttctgggccatccatttcttaccaccaatagccagggccagctctagccagatgctcagacgtgattccaggaaggggctcctcttctctcccacgccctggtctcagcttggggagtggtcagaccccaatggcgataaactctggcaactttatctgtggtctgcaggctcagccccaagtgctttagctttcacaagcaggcaggggaagggaaacacatatctccagatatgaggtaggcactggatccaattccttacctaccttgtgaagtggccataattacctcacgtttgacagctgatgaaggccaagatccagagaggggaagtgatttgaacaagaacatccaacaatgaaattggagagctggaattttaataagaaaagctaacatttattgaagatttactatgtgccaaaaactatactaaaggcttaacttggattgtttcatttagtccctccaacaacccttctgtcttttccaatttcagggcccacatgccttggccccacataccaacccaggctgctgtgacagcccatgagagggggagaggttgctctgggatggaacaagaaaaagaggttgttttgtgaggtacggggagggtgcttgttctatgagatcaggaagggagggagatgaaggaggttgccatatgagggcagggccatgagctgacctgtccctcaaaacataaggctgagggtgctagtagattctactcagtaactttcttcacagtgtcagtgctttagtcttctcacattctcccatgtctctcccattgtactgtcccttatcttgtctcactttttgactctgtctttccaatttgccctttttctttacatctgtctctccttcttgctctctctagctgtctttctcttggtgtctctcagctctcacccctcttaaccctcatccccctgctttagtcacctctctgtctctatcctttgatcttgtcattttctctactctcttctctctgtccctcagtctctctctcatctccctcaattagggccatgattctcttccctaaacttacttagccttttgcaatttctggcagcatttttttatgtttgtgtctgactgactctctacccctgctggatcctctccactcctgttctcacttctatgaatctttgtataatcctctagactcattgatccctcctcatgtccctttcgtgccccttggtctatctgtctctgcctttatccctgtgtgcactatcaccaccccctttttcttttttcattttctctttctctcgactcaatctctgttttcatctctaccctgctccctttccctctacctttgatctctttttccccctcaatttctgttcttttaactctaccaccaccaccacatctttgttctctctctactttcctccttttatctttcctaaattttcttttcttctggcttttctcctagtcccttctccttcctcaatttcagactctgttcattcatcaatttaccccaaaattcaacaaatatttattgagtgcctgtgtgtcatttgctttctctttttctgatctctttgccccctttctcttctctgtcttggcctctgcctgtttcactaatccatagactatgtctttgtccctgttttccagccccactgggacttgctttcacctcttcctatatctgtgcttatccaagagacaggagcaaattcaaagacagcataatatcaggctggtggtacacattctgtaggacctagggcctacccttccttccggatcccttgatttccttaaactgatacatgtgacctcaagctccttctcccctctggctgatcctgcttaggaaacaccctgggccaagcctcaggagctctactcaatgacatatgtttgcattagcaggctgaatcttcacttggctaagaccaacattcttagaaagattcttggccttaagtattgatcaaagggttagtgggttggcagttctcatcctgccacacaaaaacacatttcagtgatcctcatcatcacagaggtagtcagtgccagaatgtgagtcagaatccaggctttctgacctccagttagaactgtttccttcacccctttgcccagtagtcagtttcctatttcttcctccctcatgttttattggtacatgttaacattgggaaagaagttctttccctggaagggcaataagagcatctcggaggcagcaagttttgggtgggaagctgaagacgaggatcaaaggcttggctttttgccaggccctcatgatggaacctcatctcttccatgtcttctgcaggactttaggttcaagatggtgactgcagccatgctgctacagtgctgcccagtgcttgcccggggccccacaagcctcctaggcaaggtggttaagactcaccagttcctgtttggtattggacgctgtcccatcctggctacccaaggaccaaactgttctcaaatccaccttaaggcaacaaaggctggaggaggtaagaagaggctgctagcaaaaggggagaatgttagggtcctggggtaaaagttccaagttatactggccatctttgcctaataattaggacggttcatgtgaaaagtgtcaagatagcatgaactggccccaaaatatacccagaatctgtcttctgccaggttctctagaaagagtctcattctcggccaggcacagtggctcacgcctgtaatcccagcactttgggaggccgaggcgagtggatcacgaggtcaggagttcaagaccaccctggccaagatggtgaaatcccatatctactaaaaataaaaaaattagccaggagtggtggtgggcgcctgtaatcccagctgcttgggaggctgaggcagagaattgcttgaacccaggaggcggaggttgcagtgagccaagatcatgccactgcactccagcctgggcaacagagcgagaatctgtcaaagaaaagaaaagaaaagaaaagaaacagtctcactgtcatgtccctcacacactatactccagacatgctgaaactacttaaaattgcctaaatcaactattctgtcaagagtttgtgcctttgctcctgtcagattaccctctcctagaccctgtactggagaatctcatacttctcatttgacactaagcttggccatcatctcctctgcaaagcctgcttagacctccaaactgtctaattccaattctggctcatttcccctccctcttctggacttctgtagcccatgtacttcctctatcccagcactgttcacaatgtgtcttcagtgtatgccattcccaccagtttagtagctcccctagcacagggaccagactcatctatctctgtgtctctacaatagcctgagatagggctttaggggtacattagatctcagcaattattgttgagctgaacttatgactagaaatgcaccccaaattactctcttacctttgcatagattctccatcttgggcgaagggccactgtcccttcatgctgtcggaactccaggatgggaagagcaagattgtgcagaaggcagccccagaagtccaggaagatgtgaaggctttcaagacaggttggagtcaagttccaccttatgcaacctttactcctaatgcttgaacacactacgtcacagtcctgagctaggctaatacaaaagcagccagtacacatcccatgatgagaagtccagtctttccaggggagccatggtaggcaacagtttaggctgtatgctgaagcacaccatacctgacaaacacatatgtacgggctcctgaaacttttagtcattattctaagatgagccctctagaattttgactcctctttttcaggtggctaaactgatcccaacaggctggggtcccacatttcagcaagaccactctatgagaatatggatttgcatgaaagagaaagagctgggagtaggtacctcctttaaccagggtgcagatccccaggtcaacttaattagtgcagaccacccaagataatcacccttgagatatggccacactgttgacatctttcataggcccctttgggatatcattaaggacaaaaacttcaaaattgaaatttaatgatgtttagaaaagaagagtaaggtacattatcctgcatctactttctaaatgcaggacccagggtggctgctccagttacctgagccaagggaaaatcctagtggagagaagtatgattcaccttatagaaggtttcctaacaatgtaatagtctccattcggggggataaatagaagctcaccttggagaagatttcttctcgctgtagaagctgcccttaccttataaacttgaattttcatgtgttgcattgagcttaaagaggacaacacatgctttctttttcccccattctcttcacggccaatgaatctcacattccgtctcagatctgcctagctccctggtctcagtcagcctaaggaagccattttccggtccccaggagcaggagcagatctctgggaaggtcacacacctgattcagaacaatatgcctggtgagtttgctgaggtggaaaaaaaggggaccggaatagggaaggcattctgaaagggcctctgtcacagtaggggaaacagtacagaagggccttggaaccaaaggaaatttgagtttaaaatttaatgctggcacttgctggatctaggtgttttggcaagtaagacactttccttcagtggcatttaatacctacctcaataggttaccatgagaagaaagtgaaattacatttatggaagtgtttctaatgaggcttcattaaatattaggcttatttccattatttcttctctatgcttccctcaaaaactttcacccttcatacagcaccttttccccattcttatatgtgtttatattcctttccataatgacatttacattattttctaatgtaaaaggaatatgattcatggtaaaatatttttcaacatatacaggaaagtataaggagggaaatttaagtcatgcagagttccaccattaagtttttgttatattttctcccagatatttttctatggctacacacacacacacacacacacacacacacacaccctctgctctcttcaccacacccatgcttttgttagaagtgtgatcttattttacctggagttcgttatgctgttttgttcacttaaaaatatgtcatgggtatagtatggattcaatatcattcagttaatcaagcatctataatttaagttgtttccaattttttgtattctctcagtttagattgtaggttggttttacatacatacaaatgtactcaaagaaaatgtatagtattacttttttcaatttttatttttacctaataatatcttgctatatattttactctgtgcccttttttcactcaacaatatactgtggaaatgcttccactttaacacatatgtatctaccttatttttcaatgcttcaaaatattttgtagtatagatataatagagattatttggctactcctctatttggttgcttccaattttttctattacaaacagtggtgcaacaaacatccttgaatgtatctccttgtgtacacaggcaagtgtttctccaggataaacactcagtggtggaaattcttgggatgtaaggatgtgtacatttttgatattaatacattttgtcaattagccctccaacatggctgtaccagttatcaaggagggtatccatagtctcatacccttaccagcccttgatattatcaaactttaaatctttatcaattgataggtgaaattttgttttcccagttttatttttcctgattaagaatctttttctacatttattgaattgtctgttcatattctatgcccatttttctactgagttgaaatttttcatgttaatttttcagagattatataataaattctgagtatcaatcatttgtctgttaagtatgctgcaaatatttctctagatatgtcagtatgtgcatttaaaaaacttttgatatgtatttccaaacatctctgcagcaaggatgttaccagtttgcacctccagcagccatataaattgctgtctgcaacatgatttctgtctcacgtaaagagttctagagtttaacaagctctttggcaaacgttatttcaatttatcctagaaataaagttaccccattttgtagtggtaatggttaaagaagtgggctctgagttacttacttgatgaacacttacttgctgcatgaccctggtcaagttgtctaacacttaatgccccagttccctcatctgtaaaatggagatactaatagaactgtccatggagcattgttgtgaggaataaattaaatatttataaagttcctaggaaagaacttacatgtactaggcattcattaaatgttagctataatgatgtaattgaatattagctatctttattagtattattatgactactaatactatagcagtaataatactactattaccatgtgccatttattagtttgaatatattacatgttgttggttgtcagatgctcacaactctccaaggaaagtattattagcctcattctacaaataaagaaatttaaagtaagaaagaagattcatgacttgttcaaggccacacagctaggaagtggcaaagagatcgctagaaacaagatctgttgatactccttccagtgagactgaaagcagtgattctagtaaggaggctgccacaccaacccgggaagagagatgaggccataagaaagtctaaatgaatgtgtgaatgaactactgagtgaatgagtgaatgagtaagcaaaaggatggctgaatgaagtagtagagagttaatgtggtccataagtcaatgactgagcaaataaatgaatatgtggaaaaagagttggagaactcaaaatcagcaacatgggtaaaatacagactagccagggagagacttaaaacgaattcttttcatcctcatatctgctcctgcaggaaactatgtcttcagttatgaccagtttttcagggacaagatcatggagaagaaacaggatcacacctaccgtgtgttcaagactgtgaaccgctgggctgatgcatatccctttgcccaacatttctctgaggcatctgtggcctcaaaggatgtgtccgtctggtgtagtaatgattacctgggcatgagccgacaccctcaggtcttgcaagccacacagtgagtagtaggctttcagccatcagcagtggccagaggagatgaaaaaccacacatggaaaaaaaaaaaaggcagagctggcagtggaaacttgggttctatcaccacttcttttgtccaaggtcctccatcatatctattccttggatatgaaataagtcaacacaccatgtttcccaaactcttcggtgtccaatgctatggaggggaaggatgggagaccaagcaaggcccactctgcctgagtttttaatctagctgcagaattagtattgccagagatggagtgtgacttcctctaggtcttccaaactactcaagctcaacctagcttctccctctctccctgagtacctccagtcctagaaggaaggcacatgtctccctatcctccccatccttccctctactttgtctcataggacacagtttatataggatcactaactcaacattgactcccatcaaggaagagaaacctacccagttcctcgatgcctgacaagagtttctttttctccttttctcctgttttctcctggccagggagaccctgcagcgtcatggtgctggagctggtggcacccgcaacatctcaggcaccagtaagtttcatgtggagcttgagcaggagctggctgagctgcaccagaaggactcagccctgctcttctcctcctgctttgttgccaatgactctactctcttcaccttggccaagatcctgccaggtaagcctgaggcctgagctttgttcagggctggtatcctgcaatacagcatccagtttcactggttccatcactccttccctgtatttggagttccctcactcccattgttcttccttcttatccaccttgcatatcctcaacactggataattatatccctctgctttctctccttctgcacgtagagaggaccattaccggggaacattaccccacctcacagaaaggaaacactataaattcatcacctcccaactcaactgagctcttaacacacatacatagttattttatgtctccacaggagctttttcaaacttcttctcctcttctaaaacctctgactaccttctcctccacacttagcaaataacctcacatcttacttcacaataaaaacagaagccccagacagagaatccttatttattgccaccaaacctacgaacttatctaattgtttatctagccttgcctcattctttccttttacaatggaaggcatatctctccttctgcctaaaaccaatcccttcacttgtacactggttcccatattcccagtctcctactctctagtctgtaatgtcctcacctcatacgccttgttgtccttccgccaaggcccaatccagaatgaatacaaccctccatcttcactatatcaattccgggctcatacagttgctcagacaggagtcactaaaaattcatactcttaacctctactgggttctccatggtctctgacaatcccatttccctggtcagttctcgaagtttatggggcagttttgccaaaccaccattatcctcagccttcccacaccccctcctccccatctccctcagcagacaacttcatgttctactacattcaaaatagaagataccagacagcaatgtccttgactcccagccacaaagcacctacaaactcataagcatcttcaaatgtcctctcctcactccttctcttctgtcatagtggaagaagtatcctttttcttgtgactaatccttccactgttgctctgtgccccattcccctctaccaccttaggaatcttgacctattggctctctcctcctctcctgtatcttcagcctctccctctctttaaacatgttttcaagtctcttgtatcttataaaaaaacattgcctcaacccctgatcactctctagctactgccctctttcctccctataacaggcaaactgcttgagagaagtcttcgctcttactatctacttcctcacctcctgctgattcttcagcacagcaaaaatattaccaccacttctcagaaactttttttgagtccacccataagccccaactaaactcaacatctttaagttgtttttagtccatcccctcctcaaccattaaacttctttccatctctactgccagcatcctagcctgatccaacatcattttttaaagaaaattttacctttgccctccgataatctattctttacaacagtcagaattttttttaatgcaaaactatctttgtcaccccaccctcagccctggtcaaaaccctttagtggacccccattcccccaggaccaaatccaaatttcttatcacagcttctaaagttctcaataatctggcttctatgtatctcttcggtctcacctttttgcatccctcctctcactatttcattcagtaatacattcattcatatactcattcacttacttataaatctgtcatcagtttatttatccattcatttaataaatgtttacttagcatctactgtgtgcttactcttatactggacaccagagacagagagataataagatgtttttgctcccatgcaactcccagtctgcttgtctttcaagccattttctccagaaagccataactcattttctcaggtggaagttatcccttaatcttataataaggccacagttccttgatggcagtgcagttggtggcaggggttggggaggtccaggaatcaactccctctaccaatttcacatgcccacctgccccaccaggattgcccagtaaaaagccctgcattcttcaaatctttctggaccttagctttctcacttgtatagtaaagggatgaatcccatgatcactaacagccctgccagctctgacatgccataagcttatgattccaacagtaaaagcctgataaatatccatccctgtaaccacaagcagatgctacctggaatggatggaatttcatctagactaggaacaatctagcatcagtccgagtcaacaaacattccctggggtaatccctttttcaagtcttgatcttatatattggggagaaggaaaataggtcccgtcctcaaaaaactctgaagcttcttgggaaattaaatgttcttccaccccaaggcagtcagaggctagaccagggttacaaatgactggagggaaggatgtaggggtcagaatttgggaacagtgaagtccttccaagggagaaagaagtgtcacaaaagttcccagagaaggaagaagcagagcaaggtcttcaaagggaagaaagggttggcccttttctttgccaggtcaaacctgaaggttgaagtgggagtactgggacagaagcttaaggattatacatctgcttcctcagggtgcgagatttactcagacgcaggcaaccatgcttccatgatccaaggtatccgtaacagtggagcagccaagtttgtcttcaggcacaatgaccctgaccacctaaagaaacttctagagaagtctaaccctaagatacccaaaattgtggcctttgagactgtccactccatggatggtatgtatatgagtgagtgtatgtttactagtgttggtctcacaaaaaccatgatgatcatgatgatgatgatgacgataacattataacagctaatatttatagtgtttattatgtgccaagcaaaattattagtattttacatgtattaattcatttaattttctgaacaattctatgtgataggtgttattattattttgattttttacatgaggaaactgagacataagagtaatttgtccaaggtcacacagctagtaaatgccaaagaatggaggcagctattacattcatcttataggtaaagaaactaaagttcagagttggcatccaattcatcttgagtggctcagcaagttggtgctaaagtgagtatctgcaccctaacacatataactccaattcctcgagtaacacttctcttgttagaaatgatatgtaaatcaataatcccagtgtttggtttttatgaaggaaatttcaaaaaccattgcctaggatttttttcaaggtccagtatgaagcattggggtcaaaacaggttttcaagtcagagagacctgggttcaaatcccacctttgacagttactggctatgaccatgggtaactctttaactgtctaagcctcaattttcccaaaggtaaaatatctggttgtaagaattagagatgatagaaaccattctagttattatgctttagtagaattaaatgatcttcacactcctacctcctttctttgctcaattgaaacaatgtccaaagctttctattgctggccctgttgtgtagaaatcatgtgttttaggcatcctcttatggatttatttaagggaagaggtcctcaactcatttcagtttgtcccttttccaactgaaacaaaagagtccatagtattccctgatttaggtatcttaagtggcatgtaatgactatacacacaggctctaaaaccagactatccatgttcaaatcctagcatgaccatttactagcttgggcaagcttcttaattgctctgtgtctcagttctcagttgcttatttgaaaaatgtaagtgataataattaaataggtatgcaaattaaatgagttaatatatgtaagaaacttactattatgcccactcccacatttctaacactagcaataaagtaaaactatcctatcccttttgtatatttctaccactgagactattcaaattcattatttctctagtggaaactatgttggtaccattctacctcgttacatttgcaaataaatagttatttacctatttttggggtgcaaactctgcccaaactgttgatccttaggctgaatctctcccattgaaatgatgctaggctgaacacagcagaaacaggaaaatagacattgtcagaatgaagtaaaaacagaaagacaaagagtcaagccttgatcccaggctggggaacacacacacatgcgcacacacacgtacacacacacacacacacacacacacacacacacacacacacacacacacagagagacagagagagagagagagaaggcagggatgagatacaggcaatcgatccatacacagaggtttgtaatagttctaaatgaaggcgcacatcctccttcctctctacaacacccttttccaacccaaagtaggcatgtatgggaaattccacattggagatggagctggggaagggttatgatgtcctacctctatcccttggctttgctcaggtgccatctgtcccctcgaggagttgtgtgatgtgtcccaccagtatggggccctgaccttcgtggatgaggtccatgctgtaggactgtatgggtcccggggcgctgggattggggagcgtgatggaattatgcataagattgacatcatctctggaactcttggtaagtgaatgctttgggccttcttatataccctccagagaggaggcccttacaaaattcttttctgcctcctccccaaagctataggggttgtttggacagaattcacagccccaggctgctgccatcctggactccctctctccactcgcatcccactgcagagttgatgagaaagtctggtagagttttttgaaaagaccttgaactaggccaaatagttagattcaacttgagtatgtgaagagctgtgtttctaaacccctcccccaccctagccccaagcttcatcttagctccactcctgaccctatccagctaaaggtccccacccagctcctgcctatctagtcattgcatatggcaagacttgaaagtcctatctcaaagcagcagaattatcagctacgactgccttgtcatggacagatgagcagaggcctgggaagacagcctggagccccaacttctggtgcacccccttgtgttatctggcacatgatcctgttgctctgggactgattatgggatctgtgtatatcttattcctttctgtctccaggcaaggcctttggctgtgtgggcggctacattgccagcacccgtgacttggtggacatggtgcgctcctatgctgcaggcttcatctttaccacttctctgccccccatggtgctctctggagctctagaatctgtgcggctgctcaagggagaggagggccaagccctgaggcgagcccaccagcgcaatgtcaagcacatgcgccagctactcatggacaggggccttcctgtcatcccctgccccagccacatcatccccatccgggtgagagccccaccatgcccattgccctctccacctatttattctgggagcctcacgctcccaacaaacctacatctgttgctgtcttcaattatttgctttcctgctaaccattccctttattgccagctttgtttccctttttgaaaaattatcagccattctggattaaccagtcttttccttgcatcagccattacctcatgcttattagattatcctaaccctaacaatagcgagtgctcacagcctataattcagagtttttcaaactggatcaagacaattaatgggtcacaaaatcagcttagtgggttatcattagcattaaaaaaagaaaagaaacagaaaatgttggagtacatcacatactaagggtatcatcaatttgtgaaaaatttgtatgcattttgggtatttgcatatacacatgtatgtgtatgtgtgcgtttatggtcacggtgtaaaacgtacttcttattgagaaatgagggcagaaaaataaaatcaaaagccataggattagctgctactttggatcctcaatatgagcatttactgcctttaaaaatgaactgctacttctttcttaaataacacgtatttgtgtgagtcagtaagccagggcagggaaaggacacttatttgtgacaattttgtggatgagaaatagtcactgctctttagactaacctagtatttcctttaaacactcattttatgaattaatttagtgacagcaccccagaattggcttggcgggggttccagaattggcttggtggggggtatcttctcacccagaaccatcccaaactaagatattagctaagtaaaatcagtgtgcttgctctgcaaacagcttccaaacagggctcctggtaccacctctgctccatccttttcaaaccaaattgctagctctgagctcctccttgatagaaattctggagctgccactaagcccctaatggaaaaaaaaaatctatcccaaaattcagtgatgttccctcatctagttccctccatctgcttaatggagctagtgatggtggagccagagtggcaggtactgattagcctttctcctgagtccaggtgggcaatgcagcactcaacagcaagctctgtgatctcctgctctccaagcatggcatctatgtgcaggccatcaactacccaactgtcccccggggtgaagagctcctgcgcttggcaccctccccccaccacagccctcagatgatggaagattttgtgggtaagttctcaacatgggtgcctacaggacctccctcccctcagccccaggatctgaaagagaagctgagaggacagagaccactgagtttacaaaatatttctggaacatctaatgtgtgccagcacctatactagggtcacaaataaatgagaagcagcccctacacttgtagggctccagtttggttggggataccatagtgaacacaaacaatgacactaagggatgatcaaagctccacaaggcagtgcatgatagagttgtcggagcagagaggaggggcctgactcagcctgagggatgcaagacccacttcctagtagaggtgacacctgagctgagtcttgcaaagtgagtggtattaaaagaaagagggcatggaagaagtattcctaccagagggaagagcatgaagataggtgaggagaatgagaagcagccagggatatatcaagaacaataagcaggtggtattggaatgtagggtcataggaatggagtggggcaggggagtatcaatctatgagtctacaaagacaacatgagatagagactggattgagaggcttgtagagctgagtagtttgagatttaccctgaaaatgccagtttagtcaattcacctaatgtttgttggatttctgttgggtagttttgtttttgtttgtttgtttttgtttttgtttttttgagacagagtctggctctgtagcccaggctggagtgcagtggcacgatcttggctcactgctacctctgcctcccgggtcctggctcaagcaattctcctgcctcagcctcccaagtagctgggattacaggcacgtgccaccatgcctagctaatttctgtatttttagtagagatggggtttcaccatgttggccaggctagtctcgaactcctgacctcgtaatccacctgcctaggcctcccaaagtgctgggattacaggcgtgagccaccatgcccggcctgggtagtttttaatgcagggcctgacattgaataggtgctcattccaggcctgttggatgaaagacatgtaggcagttgatggtctagcagaggagccagatatagatggtactggtccagtatgatgagctccagtattctgggagctagagggagtggacacattatggagagagagggtgggaaggatgaaattggagaggctttgtgagtaaggaagtttttatgatgcatgttgaagtacatgtgaatatgttgtaagaatattccagaataagggaattccacgagcaatgacctagagataggaaagcagtgggtatgtattgacaacataattctgtttgtctgaagcatgggcagtatgagaattcaaggaagacaagctaggtaggcgccattcattcattcaaaaacattaaataatgctggctaacattaagtacttaccatgtgccaagcactgttctaaacactttacacgtattaactcatctaatccccacaacaacctcaagagttagagatcctcttatcatttccattttgtacatgtggaaattgaggcacaaaaatatatagtcgctgatccaaggtcacacagcttctaagttgcaactgggaggtctgtctctacctccatggtcataactgctaggtctaccacctctctgagctgatgacccagactcctgggccttttgttcagtattctcttttgctctgggcttcaattgtagagctctcagtattcttggttctctgaatgtccacctaggctaggcttttgtaagaatatatgaggcatccacgatggctccaccagtccctaagttccatagccaatccatcctgaaatcctgcaaaagttatctataatctctctcaaacctatttgcttttctcccctgccacttctttaatccatgtcaacatgatttttttcctaatttctctgcttctctcttgctcctctcaaatcctttctcgatgatgaccactagagggatttttctaaaattctgactatattgctcccttgcttaaaccccttcatgtttccctctagactctaaagcagtgacctccaaggggtatgcaaaatgattacagggtgaaggaacagaatatgtattagaattttatgtttttttatcttaaaaataggaaatcaagcatcactgatactgatctttaatatacagactgacagttatacatgtatataatatataaacaaatatagagattggaggtacatgctaaaacatttgtactgatagggatgtatagtccaaaatttggaaacattgacatataggacagagttgaagctcttcagcatagcattcaatgccttccacatggtgatctctatgccctcacctcctccccacatgcattttgttttttcagctacactgaaggacttgtcgttccctcatttttttctgctctcttacctctgggactttgctcatgctgctctcttttgattggaatgccctccctcacactttcctctggcttactttccttcatcttgtagacttaacttaggcattctttcaacaaatatttattgagtaccaactgtgtactagatactgttctaggcactggggatgcagtagcaaacaaatcagacacaaaattcctaccctctggagcttacattctagtggaaggggtagtaaaaaaaattaccaaaaataagcaaattaagtagcacattagttctaagtgctatgggaaaaaataaagcaggataaggagaatgggataaggggccaggggcgagttcagagaagggttgtagtattagagtggcaagggtagaagacgctgaggtgaaacttgagcaaaaatttgaaggaggtgaagttagtgaggcagatatctaagggaatggcatcgcaggcagagggaacatcctaaggcagggaagacacaggagtattccttttatatttgaggaacagtaagaagatgggtgtgggtggaatggtataagcaagtgggagacagaaaaattgagtacatagaggcaatgtgggaccagattgtatagggtatggtaggccattagaaggagtttggcttttactctgagagcccttgaaaggatttgaacacaggactgatatttctgactcgggttttaacaaaattgctccaacttctatgtagagaatacactaaaagggagcaagggtggaagcagggagacccaagagtgggctacagtaatatcccaggtgagagatgatggtggctcagacttgatcataatgaaggcaataagaagtggtcagattttgaaggtagagccaagggtctttgctgatagatgggatatagggtaagagagaaagagaaaaataaaggatagctctgaaatttttggactgagcaactggaattgccatccactgagatgggaaaagctaaaagtagaatagcttggtggagggtagggacatgagtagctcagttgtactcctaagttagaaatgcatattagacatctaggtggagatggagaaaagccattggatatacaagattggaaaccagtagagtggcgtgagctggagattaaaatttctgaaccatcagcatatagatggtctttaaagtcatgtgactagacaagatcaacaagggcatgaacacagaaaaggccaagaacagagccctggaacgtacctggggtacttcctccagctaggtcaggttcccttctctgggttttcacacccccaggtggaccccctaccccaggtttcctggtcatagcaccaatgacacagtatagttactgtcattatcattgtcctcatagggcttagagttcccaagcagacagtcattcttgggccacagcacatcctatacttagggagtggtccaggccaggacagtatggcttcaaattgtgtcaaaggagagcttccaaatcttttataatatatatcccagcatccagatacaaatggtaatattcacggcacacacagaagcaaacagtaggctacttctggccctgaggtatcttgaagggttgagggggatcaatatcttggctcatctgtactgtgacagatttggaagatctagtctaacccattttttccctcccctccccctaccaccttcagagaagctgctgctggcttggactgcggtggggctgcccctccaggatgtgtctgtggctgcctgcaatttctgtcgccgtcctgtacactttgagctcatgagtgagtgggaacgttcctacttcgggaacatggggccccagtatgtcaccacctatgcctgagaagccagctgcctaggattcacaccccacctgcgcttcacttgggtccaggcctactcctgtcttctgctttgttgtgtgcctctagctgaattgagcctaaaaataaagcacaaaccacagcatgtgaagccttttattggacagggaacagacaagtgcattctgactccctcagacaagtggcagatctatgaggtaaccataggtcacttgttggtcaccattccattttaccaacagggaaacagaatgagaaagaggaaggaaatgcccaaaaactacacagtgagttgcaaagagctaggatacttggcagatttatttgagatggctcttctccaatggtttcaataaaaatccagggattgacgcttcactggtaatccgggccctggaaatctgggcccagggtagcccctgaagccaggaaatgagtcagccctaaccaaattccctagaaaggagtggttccccaaaaccaaagaggtattttccataaggggatatggatgtcttcctcaatccattatcctctctccctcccacggcatcccacagaacaggatttaccagtcccattctttttcttttctttttttttttttggagactgaatttcactcttgttgcccaggctggagtgcaatgcatgatctcagcccactgcaacctccgcctcccaggtacaagctattctcctgtctcagcctcctaagtagcttggattacaggcacgcgccaccacgcccagttaatttttttgtatttagtagagacggggtctcaccatgttaggctggttgcgaactcctgacctcaggtgatccacccatctcagcctcccaaagtgctgggattacaggcgtgcaccactgtgcctggtctaccagtcccattttcaaaggtgagaagaggcttggctagagcaagcactgtgttcaaagcaatgctcccactttccaggtcacagtatacaggaaacatt

SEQ ID NO: 3728 - DNA, 7544 bp, Homo sapiens
gcctcactattccctcctcccccctccctcctcccctttctctgggaattacatcattgggctacagccagccggcaaaccaagtattgagatagcttctctgactcaactttatggagtacctccacaatgtccaaagtgcaaccctgaaacaaatacacagactttatttatgcacaaatacactttccagcaaagacagaagtgatttaaaatcacacaacttcctggggcagctagtgtccgtgtacttcggacaggaaggtggaaagtggtgtaaggggctgggtcacaggattaaggcacaagaagctcaccaacaaggagctaggtaggaaggaaagcgaggaagagagggcttaaaagaggaagagaagggtaggagactttgagggagaagcaggaggcagctcagggaaggggagctggcctcagatcatgtgcaggggtgaccatgccagatgtccccaggcctccattggttcagctgggcctgctccagaggaagaagttgcaccgggaggaggggtcagtgggaggaccccggggcctggcacacatgtagaagcggcggcccaagttgggtcctggcttcttcacagtacgcatcacacatggctccctgtggcccccacagaggggtgtgcgcaagggccccgccagcacagacttccagaatgaggtccgtaactccttctcatctttggcttctgaagtcttggcctgccccttcaccactttggccactgccttctcttctggagtcttcggggtcatgagggcgctcatcagtggtaggctaggcagctctatgtcaggagaggcttggggacagctaggggagggctgaaagtagctcttcaggtttttctggcctctgctagagccaacctgactgggctgaggcctggttgagcgcacttgggctttgttttggcatgtctgtacccgggtttgattgttgtgctgcagcgtcgactgctccaacacaggactttgttcgagaggaactaggaagcgaaggatcttgagctgggtgcctgcaaactcagggaggaagcgggtgcacagaggtgggcactgttttgcaggcacagaggacacactcaagactgcacccacagggcagtggtcagagcccatcacctcaggcagcaggaaagaggcctgaaaggtgtctatgaccagggtcctgtcccccagcacatagtcaagccgggagccatagttgagatggcgggcgccagtgactgctgaccagcaggtgaaggccccctcctgctttggttggaagcagcggtagctatcgatgaagggccctacatgagaggcagactggcaccccaagttactgagcaagctgtccatccacttgcgccctgggtcctcttcaaagcattcctaggtgaggaggaaagggggttggaagagagagagacagaactagatacctagaactggaagggacttagactaactgctgcattttgcaaataagaaaatttggttgtcccaagaggactactgctcaaggtcacacagtccggaattggcagagctgggattctgattttcatccttactgatttaaaagaccatgcttgtttttccctctgcacgagcttgcatttgtcttgcattggtccgtcaatggcaaatctgaaagtttgcttactcaaagcaattcctggaactgcttttcaaaaggatggaaaacaggaagttaaaagtgtttgcctctaggaagcagggctggggttaagagttaggaagactgtcagcttcttcctttaaaccctctggcactatttggtttatctagtgtgtcaaagccctcaatgaccattcctacctcctgagctgaggacctgcaaggatccaggtctgaatacttccttaggctctgatccccaatccatcatccatcagtccatccattcaatccacctacccacccactcattcaatgcaagaaatgttcatggaatacctattatgtgccatgcatgatgccagggacaaagtaggaacctgatctactcctggggaccaaggaggcttcctttcgagaagtgatctggagctgaggtgtgggggctgagtaagagtaacctaggtggagggtgctcctaactttaagaacagtctctgtgctgggcctgtggagggagtgtgctgcgtacccaaaagacttgaggaaagaccagactggagaccagaataccagcaggaaatggctgccatagtcacacaagcaagatgatggtcacttggactagggtgggtgccagaggagacagaaacatgaaattatgagatgatttgtagctagaatcaacagtacttgctgactaactgaatgtgggaagtggagtaagaaagaaagacaatactagcacaattcccaggctttaagttgaagcaatcaaggggatgatggtgccatttacagaaatgacaagactaaaagagcaagcctggtagaaagtgggtatgttctgctattttggaaagactgtgtaagtcatctgagctggcactattagttctcttttcctggaggagaaaatgaaagaggtatacataagagatctaggatacctctgaactaagtagaaaaggcacaaagatgtatgatgctatcacaggaatctgaaagaacacactgaatgaatgcataagaggaatgaggcagggagggactgaaggctcacactttgtagcattatctccgctccccaccacaccaccaccaccattctctcattctctcacttctgctcattttcccagctgggagccatatctacatttatgtagctcttctgtgaattaatcaaggaatattcccacggtcccttctctaagccaagcccagtgctgagtaggactgtaccagcataaatcactgatcccccatcgtgagacataaggcaagaaaagatgagagctggcttgtggattctagggcagtggttctcaagcctggctgcacaataaagtcacactgggggcttttagaacgtgccactaccctggccccacactcgagagttctgagttcattgatctggagtagtgctaagatattgatatttttgttctaatatgcagttaggggctgaaaaccatgggcctaggggaacttagagataagaggttcatataacaaaaagacagggagggggtcatgtccaccaattcagggcacagtgagaaaagccagaatgagaataacttttacaacgggccgacaggagacaacctgtctagagaggacaaaatgtgtagggacactgaaggtggaaataagagacaggtcacagaccaaggagagccttgaatgctaggtctccatgttttctctgcatcacagaggtaacagggaggtactgaaagttcataaacaagaaatacagtgtattaaggaaatgaccaaggcaatgtggaattcacagtccttgaaatctgacccccaacaactctccagccccaccttctgccactcacctcccttcctgtgtcactaagaagaaagggacttgtggttccccatgcacacaatgcaaattctcaccttgaaacctttgcccatgctagaatgctttctacttcaaagctctgttctactcatctgttaagattcagccattttcagctgcctgtcctgatgtccgagctcacctaggaatcccatctctgagctcctgtagctttctgggatgccatctgtgcctctgccctgagaataccatcctataattggctagccatgtgtctgtagcccaccaccatgctggagagctcctaggagccaagggctggatctgactcctgagtcctcagtatgtggctcagggccaggccatgggcagagtcagtattgtctattgaatgaatgaccaatcctcagtactataagaatagtattgcaagccaagctccgctttcccataaaggaagctgtccctgggccaaaaactcagggttggttggctggacaaacagaatcagtcaggagtggggccaggcacctagagggagccttaccaggttgactgcatcccagtggtcaatggggcggtgggctgtattcaggtcacccagaatgatcacatggctgaaaaacacaatgtgggattgttagaaaggggtgcagcagtcctggcccatatactttttcctgggcccaagagctcagacaggccctctcccatattgaggcttcctagccaacagcaactcataacagcctacctctccaatcttaccacaaacttgctgcctttcatatctgaccaacccaattctgatctccaaaggtgacagtgttccatgtttgacatgactgcctcactaatcaggagccaatgggcatttttcttgtccttcaaagctgagctcagataccacctccccttgattgctctaacccaccctcactttcctgtcctccgctggaacaagactttcctttgctcccacgcactttaccattctcatctcattttacccttaaaactattgtgtagggtagagattcatatattcatttgacaaaagagaaaacagaggcaagactagccctagggctcacaatgagtaagagcaggagcctgaataggtgctcagagtacaaaacccatgtttgttttgagcagagcctattcaggtgggcatattggtgtttgcaactatgctgtgaaagaactcagagacaaagggtccatatccctttcaatggagcttgacacagggctgggcacccaggaccaactcaaggaagccttactgcccaggcttgcagtacctgcctgccgccaggagggcttctgctcggatttgcagcaaacgatagaagcgcatcttaaagactagccgctcaggcctcccagggtccgcatgggggcagtacacgttgattagggtcaaggtcttctccttaccttcccatgtgctggagaaaagagaaacccccaaaaggggtcagtttcaaacctccccttctgtcccttccccataccacatggcttccattttgtgactgtctgggatggaaaagaaaggggttaaagagacacaaatgatctggcatgcacaggacttggggactgactactgataaggcagggagagggatatctaaggattaccaccaggtaatggtgctgctattcacacagaacacccagaaagacagcaacctggggcactgagttcagcactaagttgcttttgagatgtctatggtaataagagctggatcactaggccagccccacattgtagagatggaaactcaagcttcagaggggggaaaaatttgccagggtcacacactgagtagcccagccaggactaaaccaggaaaggcaaatttgggaacttctccacggtgcatgtatgtttacatggcaagccttagaatcttcacactcaaagagtagcaccagcagtgctcagtagcagggagatatgagctattaccggatcttatgctgtgtgaggagggccctgccctcactatccagagcccggagttcctcttgggtaaactcatccatgtttccatagcaaccaacatccccattctgggtggcaaacaggccactcaggccttcttcagcagccactggggtagcattgtccttacagaaggtggctacacctgggaacagacagggcactctgagcagacctggcagtcaatagcctgttgcacagcctgtcccactccaattgtccccacacaagtcatctaagtcatcttcataaagtgtggttcttgggcaaccttattcaaaccctggagtctcagttcctacatctaaaaaagccacagaatgttctaagtgttttacattgatacatggtgagtgctcaagacgtattagcaattattattatcacatggattaattcatttaatccttgtaacagccccggaaggtaaacattatcctcattttctagctgaggaacctgaggcaccaagaggtaatgtaacttgccagagggtgcacagctaggaaatgagccatgattcaaacccaggctgtctggctccacagttcacacaattaagcaccacactactactgtacttctgaggtccagtaggataattctatccataaaaattatatttcatgtaatttactattatgcagctttagctctgtaaactaaatgtctaagatttcttattaccctctcatcaaatattggaaacccttttcccctatctgcctccctcactaatttaaagtccacagaaagccccatttaccagaatagccgctacggttgcggctgaagctgaaataggagttataaccctcaacgatagccaggggctctgtcagtgcatcccctggaaaaaaaaaatgtaagattaagtcagaggtaaaactagcatccgagaaacacaaaggcctggaattacagttgtaggctaattccttgcacacatcagagccagagttgggggtgacgggaatgaaatatccatgattagaggaggacctagaaagatgggaaatgtcagagaggaaattgatatcagaattagaaggcttggtggggggcggttagagactatgaagtggaggtggagaattaggtgggaaggggaaagaatcagagctaagcctgggggtctgaacgataggaggaagctggggatggggatggacatacgagaggatggtgggaatctgagctaagggtgagaggtaagagagagggaattaggggatctgaactgggggtggagggaaaaggaattaggggattctgaggggagataagagggtgaagaaataagaggacatctaagcttggggtgggaaatgaggtgggaattagggactttccgctgggaggagagatgggaatagataaggggtactggggttctgaggtggaaatgtgaaaaagaggaaattagactgagctggggtcaaagatggggtgggaattagaggatctgagcttggggcagggatgaagaattcgggggtttgacttggcggcggggagatggacagcgtatggaaggaggaaattcaggggactgagtttggggccggagaatgagtgggaatctgactagatatggggtttcgagaaggagctaaagtttgctgaagacaggagatggagtgcaattaggggatctagctagggtgggaaatggaagtttaagagggaagggacctgggtctaaggacaggactctaagaataggaaactgggaaagtaaaattacatgggacaggggacaaaagttagcgggaaagaaaaagtatgtagggatcctggaatccagagcgctcactggtcactttggtttcctggagacagacgatatccgcatccagctcgtccaaaatgcgccccacggccacggcggcacagttgctgggttcctgatttgccaccccttgcaggggtctccgaatcccattgatgttccagctcaccacgcgcaacatcttaaagggctggaacacctcccagcccgcgccaacctaggcgcgagc

SEQ ID NO: 3729 - DNA, 3600 bp, Homo sapiens
aagggacttacggaaaagttgaaacgtgaacacacggtttcctctaattagctgttacataataaatgtgggtacctctagtgtcatatatgaattcttcaagaagacctgaaggattggtttttattttttgtggtttttttaaaaaaaacatttcactaaagagtctctggagcatgttttttgttttttgggtttttttccccattggaatcaataggaggtaatgtttggctcaatagtgtggatagtaacaactgcctatttaaattaaatagcctttgcgtgtaactacacagatctcatcaatagttacctacatgaatcaagctaggtttgtctgaaatgctagaagactttttcaaatgcctgcttgctcacttacttttctacagagtaactcaaaagtaaccattgaattacaatccactttgtaaaaatctgaatgtaaaacagtaaataataaattaaataattggatcctaggcataccaataaatgttatttggggaaagaagctagcactatctcatgcagtgagaataacgggttctagtgaattatcctatctacactaccacctgaagaagttgaaagaaagattgataaatcaacgggagataagactttattagaaggtaacacctgcaaggtaccccacatagttggggccactcttttttctgtcccttatgagttacagaacagggagtctgctggagacacaaagccagcagtaaggtccctttagcctgtctcctgttctctgaagctccctgccgaggctccctcacgcccagaggacacatctccccttcttctctagatgttaatgtagggcctcagatgtggcatgtcaacactcccatggggaatttatgaccatagagatagtagaaacctaaatattttcagaaaaaaaattttttttgcaggatttccaatttatctttgaaaagacagtacaatcatgtttgaatgtctgatgaaagtgtcttatttttaggtttgcaataattgttactttcttattctcattcttatgtaagatgactattgagaaacagttgaaatttattctcctcaaatgagattttgaaagggatttatgggccataaaacttaggaatttcatagaaaattttgtctggtcatcttttataagatgatgatgagtcttatctgcacatagcagagtttgtttcttaggagtttatatgttttattgattctgtttacgatgtttacatgttcttgaaaaggttgtaaaagaaatacatatggcacatattaatgatgctgatcctaatgatttgtgaacctcttagaaattcttttgtctaaaagcctagagattcttctggttcctttagaaacatgtaacaaacttgggccaggggtgctgaggcatggggaggactgcttattggcaggaacacagagggggtgggcatcaggtagggtggaactggatgaccttccagaccccctcctactcagaagtcagcatgcaagcagcgcctgctgtctcccgatgcctgcagggaggaaaatgtctgtgaaggacactttaatgaaggacgaagctctctgctgctccctcaaagctgagttcactgtggcaggcaggaagcagagaagctcctgcccgccaaacccactgcacaggtggctgctgctggtatcagattctcctttttaagtgtcaatttctgttcacagacagtttgttttcaatatggctgatttaccctttcacctctccaccatctcatttaatttgtaaatttttagttctgtcttttctcattttaacttttaaaaaatctccttgctttttaaaaataaatattacccacatagttttcagatcttttttgtctggagagcattaaatatctgcactcatcaaagggaatatagcaaatgttgatcatctgtcagcagttttgcatgtgacacctttatatgaattattttcccaatttttgctctatgtaatgggtcaccataaaactgtaagacttggcaaatgctatagaaaaggttcaggtttcagtattctctctgaaggcatcattcctgggcttccggcagcatcacacgcttccagtgcctgcagggtgagggtgtgtggcacagaggcaagcagctcctctcttctgtaggagctttgggttttcagaggtgcagggaaggcagttttacaggttaccgtaaaacagaggttccgtccagtgttccttatgatgcctccccatttaaaaagaaaagagatctatggaaaactgggaatgtaatgtggattctgtcagagctcctacagagcacagttgcctttagtttcctttaaagatgtaaaaatattgtataatacagttttgtccctacacaattgtatttgccaagcttagtgcattatgatacctttatttatttgttttgggcagtattactatatatatataaacatacagttactgttttatatattcttaggtccattcaaagccatgtatgctgtaaatgtgctagtctttagaatgacacataataaataactgacaagatattaaatgtggtcttgcctgattcatcctattaggaggactagttctatgtgaccagcctgtgactggaccattgttcttgggcattgcattgagtgctcgggtgctgaatacatgtttgtaaacatgggaccatgggagacttccattttataagcgtgtttctgcctaatttgaagcagaggggcaacagcgttgagggttaagagcacggactttgggagcacacagaccaggtcccaatcctggattctgcccctgactggctggtgactctgagcaagttgcttgacctctccaagcctccgtttcctcatgtgcaaagtgtggacaacaacagtaccttcctcataaggaacgtggacgcgcctcagaagtacgtgttcataaatggtagccattgttgttaccttcccgtctgtgaacatggatcacatcatctctgtggtaacccagtcctcgttgtatgacttgtcaaaatgcagttccacttgtattaatattgaccctgttcatcgtcaccaggactgcatcttgcaccactgtgccgtcttctaggcacacacgacccgttatctcccttggaaaaattcctctcactggaaatgtacaattaaaggatgattgaaatgtttaactcttggagtttttagtattaccaaactcctagaaatttaagctaccaccaaaaataacatgtgccttttccctttattctcattgatggtagcagtgcacctcgtttcagtgtcctgattccttgattactgtgaacactgaacatcttttatacctttatgatatttctatgtttgtgacttcattggaatgttgatctatttcatatagattgtttttaatatacaatgtattagcccctgtcatatgttgcacactttttaacctatttgtcagctgtcttttggtctgtggtaggagttatacagtattttaaatggtttatgtagtcacatatacctgtctttcattttgatgcttgttctgaaatggagtcctggcttcaccatgg

SEQ ID NO: 3730 - DNA, 3600 bp, Homo sapiens
aagggacttacggaaaagttgaaacgtgaacacacggtttcctctaattagctgttacataataaatgtgggtaccctctagtgtcatatatgaattcttcaagaagacctgaaggattggtttttattttttgtggtttttttaaaaaaaacatttcactaaagagtctctggagcatgttttttgttttttgggtttttttccccattggaatcaataggaggtaatgtttggctcaatagtgtggatagtaacaactgcctatttaaattaaatagcctttggctgtaactacacagatctcatcaatagttacctacatgaatcaagctaggtttgtctgaaatgctagaagactttttcaaatgcctgcttgctcacttacttttctacagagtaactcaaaagtaaccattgaattacaatccactttgtaaaaatctgaatgtaaaacagtaaataataaattaaataattggatcctaggcataccaataaatgttatttggggaaagaagctagcactatctcatgcagtgagaataacgggttctagtgaattatcctatctacactaccacctgaagaagttgaaagaaagattgataaatcaacgggagataagactttattagaaggtaacacctgcaaggtaccccacatagttggggccactcttttttctgtcccttatgagttacagaacagggagtctgctggagacacaaagccagcagtaaggtccctttagcctgtctcctgttctctgaagctccctgccgaggctccctcacgcccagaggacacatctccccttcttctctagatgttaatgtagggcctcagatgtggcatgtcaacactcccatggggaatttatgaccatagagatagtagaaacctaaatattttcagaaaaaaaattttttttgcaggatttccaatttatctttgaaaagacagtacaatcatgtttgaatgtctgatgaaagtgtcttatttttaggtttgcaataattgttactttcttattctcattcttatgtaagatgactattgagaaacagttgaaatttattctcctcaaatgagattttgaaagggatttatgggccataaaacttaggaatttcatagaaaattttgtctggtcatcttttataagatgatgatgagtcttatctgcacatagcagagtttgtttcttaggagtttatatgttttattgattctgtttacgatgtttacatgttcttgaaaaggttgtaaaagaaatacatatggcacatattaatgatgctgatcctaatgatttgtgaacctcttagaaattcttttgtctaaaagcctagagattcttctggttcctttagaaacatgtaacaaacttgggccaggggtgctgaggcatggggaggactgcttattggcaggaacacagagggggtgggcatcaggtagggtggaactggatgaccttccagaccccctcctactcagaagtcagcatgcaagcagcgcctgctgtctcccgatgcctgcagggaggaaaatgtctgtgaaggacactttaatgaaggacgaagctctctgctgctccctcaaagctgagttcactgtggcaggcaggaagcagagaagctcctgcccgccaaacccactgcacaggtggctgctgctggtatcagattctcctttttaagtgtcaatttctgttcacagacagtttgttttcaatatggctgatttaccctttcacctctccaccatctcatttaatttgtaaatttttagttctgtcttttctcattttaacttttaaaaaatctccttgctttttaaaaataaatattacccacatagttttcagatcttttttgtctggagagcattaaatatctgcactcatcaaagggaatatagcaaatgttgatcatctgtcagcagttttgcatgtgacacctttatatgaattattttcccaatttttgctctatgtaatgggtcaccataaaactgtaagacttggcaaatgctatagaaaaggttcaggtttcagtattctctctgaaggcatcattcctgggcttccggcagcatcacacgcttccagtgcctgcagggtgagggtgtgtggcacagaggcaagcagctcctctcttctgtaggagctttgggttttcagaggtgcagggaaggcagttttacaggttaccgtaaaacagaggttccgtccagtgttccttatgatgcctccccatttaaaaagaaaagagatctatggaaaactgggaatgtaatgtggattctgtcagagctcctacagagcacagttgcctttagtttcctttaaagatgtaaaaatattgtataatacagttttgtccctacacaattgtatttgccaagcttagtgcattatgatacctttatttatttgttttgggcagtattactatatatatataaacatacagttactgttttatatattcttaggtcattcaaagccatgtatgctgtaaatgtgctagtctttagaatgacacataataaataactgacaagatattaaatgtggtcttgcctgattcatcctattaggaggactagttctatgtgaccagcctgtgactggaccattgttcttgggcattgcattgagtgctcgggtgctgaatacatgtttgtaaacatgggaccatgggagacttccattttataagcttgtttctgcctaatttgaagcagaggggcaacagcgttgaggttaagagcacggactttgggagcacacagaccaggtcccaatcctggttctgcccctgactggctggtgactctgagcaagttgcttgacctctccaagcctccgtttcctcatgtgcaaagtgtggacaacaacagtaccttcctcataaggaacgtgcgacgcgcctcagaagtacgtgttcataaatggtagccattgttgttaccttcccgtctgtgaacatggatcacatcatctctgtgggtaacccagtcctcgttgtatgacttgtcaaaatgcagttccacttgtattaatattgaccctgttcatcgtcaccaggactgcatcttgcaccactgtgccgtcttctaggcacacacgacccgttatctcccttggaaaaattcctctcactggaaatgtacaattaaaggatgattgaaatgtttaactcttggagtttttagtattaccaaactcctagaaatttaagctaccaccaaaaataacatgtgccttttccctttattctcattgatggtagcagtgcacctcgtttcagtgtcctgattccttgattactgtgaacactgaacatcttttatacctttatgatatttctatgtttgtgacttcattggaatgttgatctatttcatatagattgtttttaatatacaatgtattagcccctgtcatatgttgcacactttttaacctatttgtcagctgtcttttggtctgtggtaggagttatacagtattttaaatggtttatgtagtcacatatacctgtctttcattttgatgcttgttctgaaatggagtcctggcttcaccatgg

SEQ ID NO: 3731 - DNA, 544 bp, Homo sapiens
ccagccctgattgccaggctgctctgcagacagtgcatgaacccattggattacctggcacccagaacaactgtcctccaggagacagcagaccagaacgccttcctagccagctggctttgctacatgttgaattctgcaaggaaagtcagcattttgaatttgatgtgattacagctcttgctaatacagaaaagtccggctctttaaagctctgaagtgcaactttagtaagagtagtaatatttctttttccacttcatttgctatgtgagggaatctttgaaccacaagttatgatagaaccccaaaagacatgagctacatgaaaccattcacttggaaaaagtttgcttccacttagatacagtgctgcttttaggaacgcacaactcacagccccacgcagcatgtgtccatctctgtgcttcttaattgccttgttcagaaacctgccatcttacatatgtatttgttgtaaatgagtccggcacccatttaaattaatcttttttttaatgttatgaaaatgatcagttcattt

SEQ ID NO: 3732 - DNA, 544 bp, Homo sapiens; identical to SEQ ID NO: 3731

SEQ ID NO: 3733 - DNA, 489 bp, Homo sapiens
cccttaatgatgagtgtttttaattatctatttaagaaatattagctatgttttacaacatttaaaaactcatttgatggtagtatacagacaatgacactctgatgggtaaaaggcagaactctttgttactggcagctccaaatcagagaaggctgccaggcagggccccataggggatttcacccaagaccatggtaacaacaagctggagctacacggggcagcttatggtaagcaggatgtgtttagctaggtcttccaagcttctcacggattgcctaatctgaatgatctccggggctccagtgtatagggactatccttaattgtttcctacctggttctggggcaataggggcaggcgcacagtggccttagtgtgtgagatcaaaatagtagaaatagttgaagtgtggctttaatcagctgctcagaaaggaaaactgattgtcctctagccagggcttcaggactgggtcaagaaac

SEQ ID NO: 3734 - DNA, 489 bp, Homo sapiens; identical to SEQ ID NO: 3733

SEQ ID NO: 3735 - DNA, 476 bp, Homo sapiens
ggctgtccttgaactctggggttcaagcgatacacccacctaggcctcctaaagtgatgaaattacaggtttgagccaccgcgctgggctggtgtcatagtcttttatgacattgccatttttgagcaatacagacaagtggaatcatctctccgtttaggtttatctgaggtttcctcatgactgcattactgctgaactgatgttgtgttttttaacatatcaggaagcttatgatgttgatttgtcccctctaatgataatgtcaacttgtttcatcctgctgaacccacagttggaatcaccccaaaagccttagcaggggagtttccacaagggagtgccccagaccttttccaggtggggccagttgggattccaagggaagtagcacttagcactaaataaacaacagggtgatcagtccaaagcatttatttattcatttagacagggtctcgcttgctctgttgccc

SEQ ID NO: 3736 - DNA, 476 bp, Homo sapiens; identical to SEQ ID NO: 3735

SEQ ID NO: 3737 - DNA, 476 bp, Homo sapiens; identical to SEQ ID NO: 3735

SEQ ID NO: 3738 - DNA, 417 bp, Homo sapiens
aacagaaaagcggtgatccccctaggtatatccaagcaaagtggtcaggggatagagtttatgtgagcctttaaggcatttggctcagggctggggcttgtttctttctgttttggtaacaacctagataattttatcagtgccaggaaatgttcaagaccccagtgtgggttcaagccttcagggtaaaacatgttgggtcacagagggatcaaaaggactctgtgatctttgggtcaagacacagaaataggggacagacactgggggaccctacagctttgataacttagttaaggtgatatacaccagttttccctattatacgactagcttactctttttcgctttgtaattaataaatatcttattggaacatattttgaaactaaactaaataaatatcctgtttttatt

SEQ ID NO: 3739 - DNA, 292 bp, Homo sapiens
ggcacagtggctcacgcctgtaatcccagcactttgggaggccgaggtgggcagatcacgaggtcaggagatcgagaccatcctggctaacacagtaaaaccccgtctctactaaaaatacaaaaaatgagccgggcgtgatggcggcctgtagtcccagctactctggaggctgaggcaggagaatggcgtgaacccaggaggcagagctttcagtgagccaagattgtgccactgcactccagcctgggcgacagagcaagactccatctcaaaaaaaaaaaaaaagaaa

SEQ ID NO: 3740 - DNA, 417 bp, Homo sapiens; identical to SEQ ID NO: 3738

SEQ ID NO: 3741 - DNA, 287 bp, Homo sapiens
ggcacagtggctcacgcctgtaatcccagcactttgggaggccgaggtgggcagatcacgaggtcaggagatcgagaccatcctggctaacacagtaaaaccccgtctctactaaaaatacaaaaaatgagccgggcgtgatggcggcctgtagtcccagctactctggaggctgaggcaggagaatggcgtgaacccaggaggcagagctttcagtgagccaagattgtgccactgcactccagcctgggcgacagagcaagactccatctcaaaaaaaaaaaaaa

SEQ ID NO: 3742 - DNA, 144 bp, Homo sapiens
ctgtagtcccagctactctggaggctgaggcaggagaatggcgtgaacccaggaggcagagctttcagtgagccaagattgtgccactgcactccagcctgggcgacagagcaagactccatctcaaaaaaaaaaaaaaagaaa

SEQ ID NO: 3743 - DNA, 417 bp, Homo sapiens; identical to SEQ ID NO: 3738

SEQ ID NO: 3744 - DNA, 433 bp, Homo sapiens
cataaatgtctgaaatttaaaagaaatttaacttatatatgtatataaaatatgtacatatatataaaaatatctagcattatgcctggcctgtagtggttactcaaatgccagatgaattttaatgactagcactcagccttacctaaaaagacaagaacatcttgcaagtaattgcttctgtcttctaagataactgctgctgtttggcaacacagtagggactcccagtagaagcaaccttgctctcattgcatctgctccagagaaatcaagaaataattacctttttatttggagacttgattgatgcatcagccttccccgtggctgtagagagataaactgggccaaagagaataacctggattttattctgccttgattactcctgttgcagggataatttgagttcagggcgggaagtaccaca

SEQ ID NO: 3745 - DNA, 425 bp, Homo sapiens
gctaaatttagctaattggtaaatttcacatattttataccatttggacatgggagattgggagttaaataaagtttgaaagaataatttaggctaacatccagggtgatccccctgtcaccaaggaccctttaggacaaagagaagattagaactgctgtcctaagcgtttaagatgacaacggcaagctgttgtagtgtatatatcagtgcgtgtgttatgcattagaaaaaggctttgcaaactaccacatgctcataataaaaacgtagtggaaagatgatagaaacacaagtttgaagtactactgagctgctgactagctcagtgaccttggtcatttcactcactcactgagcttttcctcactcttacttgaagatgattcaaaccttacagtgttaatatttttgtgcatatgtga

SEQ ID NO: 3746 - DNA, 1055 bp, Homo sapiens
attggaggctcccattccatgttcatgaatactgtgaaaatgtgacatcctgcattgccaaggtagctgtctgaattatatgaatacaaggagatacagggtttaatgatcagcggcaatgtcaaggactggaatcatgacaggaacaagtactgcttcctaaaacacagtgtaaatgatttatagttgaaaatggcaatcacttcaatttatattgatgaaaatagaattcttttagaaagtctctatttaaaaaaaaatatgcctctttcagtgatgatagctacatgactaccccatattaccagttgaaaattaacattaaaatacctttcacctacataatctttggaatggatgtggaaaatattcagattaccaaaggttgtaaacacttcaatcgtaatgctttttttttaacttggctagtttcttatacttaaaaaaataaaaataactaaaaatacacttaaaactgtctatattttataaacattaattaggtaaataggggaggcataagaatagtggaaggctttgtacagaaagattcagtgctcttagtaaatgtcagtaaggtataatgagaggagagcagtgttacaattgagagcagctagattcaaatcttcatcaccatacactagctgtgtggaattacgcaaatcattgtatccctttgaattttactgtcctactcaaaaagttgagatgacaaatagaactattggttaaaagtttctagaagttttcatgtcattgtaaatgtaatatgctacgtagattattttaaagcactgcgaaactgttcaacattttcattaacaatattagctaaaatgtaattaatttatcaaggaataaataaaatatgttaaacccagtgtgaagtccacagtaggtcttcgataatggtgataaatgaaagttgtattgaatatgttatttattgtctttatttttcattaaaaaatctgctaaatgttgaatgatgagtacttcaattcatgtaaacaaagttaactggtcaaataaacattaaaaatattaagtga

SEQ ID NO: 3747 - DNA, 4970 bp, Homo sapiens
cccttgtggggatcccactcaacctcgtggtgctcaaccgactggggcatctcatgcagcagggagtaaaccactgggccagcaggctggggggcacctggcaggtgagggggctgctggacggggtggggatgggtcacttctagaatgaggggctgtggtgggaattggggttactaatgacaagaggtgggagcaagtgttactggtgaggttgtgttgggattgggggtcactgctcagaatagggtccttagtgaaaaagggcattaatggtggagatggggtgggactgggcagacaggaaggacatgaggcacaggctccaggcagggaacctggagaacacagaccaggtgaagagcccccttcttactggggacagctctggcctgcctccagctccctcggctcccacgcatggggtgaaggcctcaggaggcctggggacaatgttgcacccacaggatcctgacaaggcgcggtggctggcgggctctggcgccctcctctcgggcctcctgctcttcctgctgctgccaccgctgctcttctcccacatggagggctggagctacacagagggcttctacttcgccttcatcaccctcagcaccgtgggcttcggcgactacgtgattggtgagagttcctggcggttgggctggcggggacattcggctgcctatacctctcactcatctgctcccgcagctggcgcacctgctgtgtgcacgccatgtgggggcttttgggcccaaaatccggagacactgtcctacccgcttttgttgtgtgacgggtctgaggtcactctggcccttcttgaccaacgcggagaggtccaacacgtccgcgggcccacctattgtgcttagagctctccacatgacgggagtccccgcctccctccggggtccatgcttgccccagggtctcccttccccacttcactctctccctatggaaggccaatctgtcccacttctctggggctggagatcacagtacccggggatcagacagtagggtccgggagactcctggaaccccagcctccccagagccctgtgggaaaacagttggcaggcagattctgagtgccagcaagaaagggcctcatggtcagtggacccagggtgggtttaatcagtggcacaacccaacctaggcaagacaagggccctagaagccaccagccttgcataatcaggctgagtccgatgcccagcaggtggcagtggagggacattctgtgccgtggcggagtggctgcgccccagctcagcctcatcaccgccccttcctgtccctgaaggtgccgctggcaccactaccgcgccagcctcaagcggcttcatgcactccctctgatcccagaccctaatgtggggaggaggccttgcccttcttcacttcttcagcgacagaacccagcctggaagaatgaagttagtttcagctaactcctcaggcaacctacagcaacaattgtcacccccattttactgaggaggaagctgaagctcagagaggctgagccatctgcctgagactgcacagctagtaagatgtgaatcctgatctatttgactccaaaattcatactgtttccaggccacctaaaatgtctcctctctgggcctcagtgttcctgcctataaaatgaggcaatccctagagcccctcagtgccttctagcctctgtttgcaaggtccccaggaagaggggtcaggtgttggggcctcacactgcccccttctggatctccctcatcctgggaggtctgttgctctggaaggaaattcttgggaagatttcttccaactgggtcatgttcccacctttaccctcagagtagagagatatgtcccaggacagctgagcccagtagctccaagggccatacctgcaccctcgcagctcagagtatgattcttagatctgtcatttcttctctatttccactgccatttccctagttcaggcagggttgttgcatatagctgcacaggttgggcactgcacaatcctatagttttgctacttacacagagcataataaggatggcacccagggacttgtgcagcttctctccttgtcccctgttggctcttatgacctttaaaaattacaaaggctatgatgtcacctgcccagctcctctgaagaacttcattgttttcccatagttttaggataaagtccaaaatctgtaacccccctcctaccaatacaatctgactgaggagatctagtccaaattctgtaacccccctcctaccaatacaatctgactgaggagatctagtccaaactttaagcccagagggactgcccaggcctggggcaaggatgggcaagaacactcctgcccagcggccactgcagttggcagagcttctcccttcaccacatctatggagacttgctacctcctgggcccctctgcagtcatggcagtgcctcgtagcaggtcaccacaataagagccccaactgcttcacctgcaggggatcttccttatacagatggagacactgaggcctggaggagggaagggagttgcataaggtcatagagcaagtaagtcagggcaaatctaggataaactcccaagcctgggcccttcacaccacccatgtttcagagtcttccatgcctattcctcaaacctctcaggtctccttgtcctccagtaacagggacaacccctttcttggatggggatactgaggtccaccagttggctactgggtgttcacatccctgcatcagcagccacaagaggcgctgtcttcacagccactcctctgcctgaaggctgtggccagagccgcccccaggtcccatccggctactcctccccagccccatagcctggcgcctcccaattgcatttgcagctcagttgagcgccttgccagctgccaggtctcctgccacttatgatttcagcttaaaaaaatgaaataaaaacggagaagagcgcctcctcccctctgtcaccaggagcaagccaagctggcgggtggcagggccagagagccggctcagtgcctgatctcatttaggaccatcagcggaatcatagccccataacccaatcagcctaatccaatcccagctcctgccaggcagcacaggtcagctcccaggtggcagcctcatccccatgtgggggtcctagagaggggcccagccttgggggacctggagagagaggctgtcttggggccagcaggacaggatgaggagtagacagaggcatggtacagggagcaaagacagaaaaggatgacgaaggaataggaggggagagctctaccctttgaatgattccaatctgatgagggaggcagcacagacctccagggagggtactaaatgatagggcaaatccttggcaagatttatctaagactcacagcagctcccatcagtcccctccctcagctatacttacccagcaccaacttcgttgggggtgtccgatggtgagtgaaacaagcaaccacctatagatcttgggcacctgttatgtaccaggcaccattctgagcacttgagctgcatcagcccatgtgatcctcccaacagtcataggaggaggactcttactgtctccattttacagatgaggaagtaactttcccagcagacacacataggccatgaaagcagcacgtgtaacagaggaacccaacgtggtctgtagggagtgatgtctgaactgaggtctgcaggatgagggaaggtaaccaggccaagaaaaatggaaaatgaagagcatttggagccgagaggccataagtacaaaagcccagaggcagaaagaatgatagatggggaaacgggaaaaagaccagaatgaccaggcagtcagaggggagaggtgtgctgcagaagcgggcagagggccttgaggatttggacttcatcctaaaagccaagggggcgcagtcgtattccccatctcacaggtgaaggaggttcagacaggtggctgaagaaccgagtcaggatacatattcttatggttccattgttcatcccaaatcccctggctccagcaagctgcctcatttcagatacgagaaaaccaaacagagactggcaaacactagagcggacatcgaaatcctctgggggcttgttaaaatacagatttctggccgggcacggtggctcacacctgtaattctaacactttgggaggccgaggtaggtggattgcctgagctcaggagttcaagaccagcctgggcaacaatggtgaaaccccgtctctactaaaatacaaaaaaatagccgggcgtggcggcaggcgcctgtagtcccggctactcgggaggctgaggcaggagaatcgcttgaacccaggaggcggaggttgcagtgagccgagatcacgccactaaactccagcctgggcaacagagtgagactctgtctccaaaacaaaacaaaacaaaaaatacggattgctgggcctatgcccagagtttctgatccagtaggtctggggtaggggccccatcatttgcatttccaacaagctctcagggatgctgatgctgccggccccagggaccacactttgagaactgctgggatggagcataaacagattccctcagaaagacaaagaggaaatgtagctcctaaacccaagtgccaatccagggaggctttctggaatccttcggaggtgaccatgaggctaggagtctccatgttctgtcccattggcacctcaacttgcttatatgaatcaaaccatgtatctctgtttctgtttggggaatgtggtcctgactttcccaggcctccatcgtctgaccttgcctcttccccaggaatgaacccctcccagaggtacccactgtggtacaagaacatggtgtccctgtggatcctctttgggatggcatggctggccttgatcatcaaactcatcctctccca

SEQ ID NO: 3748 - DNA, 462 bp, Homo sapiens
ttctgctcacgctgcaggctgtggcaaggacagctagttatactccattctttggtcgtcgtcctcggtagcaagacccctgattttaagctttgcacatgtccacccaaactaaagactacattttccatccaccctagaggctgggtgcagctatatgattaattctgcccaatagggtatacagagacatgtcctgggtgacatgggatgtgactttcgggtgtcggggcagcatgcccttctcccccacttccttactttagcgggctgcaatgccgccgatatgatggctgggagctctggcagccatacggcaccatgaagtagcggcaatgtttgagcggcacaataagataggaagagtctggatctctgatgatcacagagccatcctaacaaacggaatatcacccgacctcctttatgtgagagagaaataaacatcttatgtaaaatacc

SEQ ID NO: 3749 - DNA, 165 bp, Homo sapiens
ctctactaaaaatacaaaaattagctgggcgtggtggcacatgcctgtaatcccagctactcgggaggctgaggcaggagaatagcttgaacccaggaggcggagtttgcagtgagccaagattgtgccagtgcactccagcctgggcaagagagcgaaactacg

SEQ ID NO: 3750 - DNA, 3562 bp, Homo sapiens
tcagaattatcaaattagaccgtgagaaggctccatatggaatcctgttaatatagtccctcactgaatcaccttaacaaaatttcatctgaatatttccctcatagctttaatcaaagttactttagtaaatatccatatggaacttacttctacatttttgcacaaatattaaaaacattgtccttcccgtcaacatatcactcatagttccccatattattaaaaaaactttattatgaaaatttagctacaatttatttcgggaaaagcgattctccttaggaattatcttttctgataatcaaaactacaatcgattatgatttctttttagccttagaggaaacttatttgaaccatagcaattatgttgattgaagtaattaacatatttggttaattcatttttttctttcggtttttctacttcaattcctaatttgcaaatttttttgagacagggtctcactttgttgcccaggctggagtgtagtggccttgacctctggggctcaagccatcctcgcacctcagcctctcaagtagctgggacgatgggcacacgccaccatgcctggctaattttttgacgttttgttgagacaagatctcactatgtgtcccaggatggatataatttgcaattttattgcatagaattttggtgtaagtcacctcaaaccctgatattcaaaggatttgtcaaggagtcttgtctaaggttcagtatttaattgagcctcacattaaatcaaagtttctctaactaggcaccattgacattttgagctagatgattctttgctgtgggggctggggctgtcctgtgcactgcagggtgttgagcagcatccttggcttctacccactggatagcagtagcagctccttagttataacaaccaaaaatgtaatcagacagtgcccgatgtccctgcagggcaaaattacccccagctaagaactactgcattaaatcacccttgaaaaactgacccccaccactatttcagtaactcttgggaagttcatcatgaggccagactcggtggctcacacctgtaatcccaacactttgggaggccaaggcaggtggatcatctgaggtcgggagttcgagaccaacctgaacaacacagtgaaaccctgtctatactaaaaatagaaaaattagccagacatggtggtgggcgcctgtaatcccagctactagggaggcaaaggcaggaaaagattgcagtgagctgagatcatgccactgcactccagcctgagcaacagagcaaaattccatctcaaaaaaaaaaaagaagttcatcatgatagataataggtagctaggtagatagatacacagatagatactcacactctgttcacttacatgagatgaattgaaggtgtgtctgcacttactatcaattcctaaagcagagccgcttctgtctgagtttacatagaaagaattttctagggctgggcctggtggctcatgcgtgtaatcccagcacgttgatgaagctgaggcaggcagattgcttgagcccaggagttcaagagctgcatgtgtaacatggcaaacccttgtctctacaaaaaaacacaaaaattagccaggcatggtggcgcacacctgtagtcccagctactcggggggctggggcaggaggatcacctgagcccaggaggttgaagctgcagtgagatgtgactgtgacgctgcactccagcctgggcgacagagtgacagaccctgtctcaaaaaaacaaacaaaaacaaacaaacaaaaagatttgccaagaactacagaactctcgagagaaatggagagcttaaaaaaaaaattctaatctgttatctcatttgagcccaataatccatcaaaaataaaactgttgttatttcattttttagatgaggaaattgaagtccagagaataaaaatagtcaacttccagactaaattccaaattcagtgttgatcctttcacagcgagggaaaatgggtctgtttctctccctgtctctatataaccacaaatccctccctaggtgatcctccctggggatggagtcctagaaagccaaagacagtcttctaaagagccaacagcctaaattggcatttaatccagtcaacatctagaaaatggattactacttcccagattatgttgtactttaattaaagctcgcaaattacttttagatctagtttctcctttgcaaggaatacaggcgatagaggaagaagttagaggacactagcagtcacatccagaagcaggacattctataagacatggtctttactgaaggagcaggattgaaaaaaaagacaaatggtctgaacttttctgaagaatcattatcaagaaaataaacaatcaaaaacaaaaccatggagagatggtttcagaataaaatagactagcaaaacctcagaatcaaatgtaatatgtgaaccttgattggatcctggtaatgtgtaaaaggaattatgttgaaggaattcttagaatgaagggaatttgaatgtggctggatatgagtgtagaggtcagtttgttagagttgtaagaatcaaaatggagtcacttgtgtttaaaaacaaaacaaaaaactgacaaatggagccagagaaggctatgaagggagagttctcgtgcataagtgcctgaaaacaaaaactatcacaaaagtctgcaaaaattgcaaccttgcacacaggtcatcggagccttacacaaaaaaatacttctgcgaggacatctgccaaaacaactggctgttcaacctcaaactggcgtcacccttgttactgatctttgttggcaaggataattatctcaaaacaattatataatcctcagttttcctttaaaaaccttcgtcttctttaacctttacatagttcactatggcatgcatattcccattgcaatgatacatacccagatgaatattatttttttagagtgcctctctatttgatatttaggtcaactagtgttaattttctggtataacaggaaactgttcttattcttaaaagatacatgctgaaaatattttgggataaagtgtcatgattgctgtaactttcaaagggtcaacaacaacgaaacgatgatattggtaaagtattatatatagagaaaatattaacatttttaaaaatttaaatgaaagatgtacaggagtgtgctgtactggtcttccgtttctctgaatgtatgaaacatttccataatagaaagttgtggggagccaggcatgctggttcacacctgtaatcccggcactttgggaggccaaggcaagcggatcacctgaggtcaggagtttgagaccagcctgaccaacatagtgaaacccctgtctctactaaaaatacaaaaattagccgggcgtggtggcaggtacctgtactcccacctactcaggaggctgaggcaagagaattgcttgaacctgggaaatggaagttgcagtgagccgagattgtggcattgtactccagctctgtctccttttgagacagcaagactccgtctc

SEQ ID NO: 3751 - DNA, 381 bp, Homo sapiens
ccagagagtgttggggaaacgaaggtaaaaaataaaaacatcctgttgtgaaactcatagaaaggtgaggtggttggttaagtacttatggaatttctatagctcttttccagtcctgaactatatgttactaggaacagagaatacaggtttacaagtgtaccgttcaggtcacagaactcctgtaatcagaaaatgtcataataaagcaaactgaatcatgtcaaagccagtagaggaggttgataactaagagtgagtcttgggtaagcttttttctaagttaagaatatttaatcactctccaatttgtggtatataaatctggattactataagtgtacttgtgcatatattaatatattcaatcttaagaataac

SEQ ID NO: 3752 - DNA, 381 bp, Homo sapiens; identical to SEQ ID NO: 3751

SEQ ID NO: 3753 - DNA, 2005 bp, Homo sapiens
tgaacaccatggacgctgactcacttgtgtctagatgactgacagcctgagagactctataagaacatgtttttctaagccctttttgtgccaggtgtcccgttaacgtctctgttagttcagaggtgagttttgttcagacgttttgaacaaaaggcaaagatttcctcatgggaagggtgttcaaaactgacagctataaatgtaggtcagagacccacccacctcataacagtcatacactcccagagttaaacgattggcctctgatggccacacacccctatgggcttgtgtcttggactctgggatttaaaagatatatatgtatatatatttatgtaaacctgagcatctcagtttgggtagagttttaaggttatatgaaactgatagaacttttgtattttttttttaaatattgttttgatatatcagatatttgttttgtctggatcacaagtgagaaagaaaagagaacaatgctctttttcacaatgaactggtcaaattgactatcttgtaaagtgatactttactatgtcagtgaaatttcagtttgattttagtcaaccagattatatcctttgtatctactgatattaacacatcatattaacacatcatttcttaaaaaaacatttcttctgtttggcaatcataattaactctggttatcagcctattttgtaattattgtctttgtcgtcacttttcttgaattgttttctagtcattaaacagatatgaaggcattgccaaagagctttaatatccagtaacaagatccagaaaccacactttaaccagtgatcagttttccgtgctgcattgtaactcagctcattctggcattcaagttttaggcaaaaaaagaggaaacttctaacatttagcttgtaagtcctgacataagatagtgaagatatttatcttctttctaatatttgtatagtccgccaatgtattttcttcccactattcccattaacataccaaacactgtttctaggtccaaagtctatttctaggagtggccaatatttgtattgttgaatctcctagggaatgctaaatgtttcactttaaaatacctatttataccaagtagcatgagattagtactagagtgagatttggaatattagtccacatatcacaaactgcttgcctacatgtatagattttttttttcacccaccttcctaaccaggaatttgtttccttaaatttgttgttgttgttgttgttgtttgttgttatttttttgagaagagtcttgccctgtcgccaaggtgggaatgcattgacgtgatctcagttcactgtaacctctacctccccggtttaatcgattctcctccttcagcctcctgaatagctgggattacaggcaccacatttttagtggagatggggtttcaccatgttggccaggctggtctcaaactcttgacctcaagtgatctacctgcctcagcctcccaaagtgctgggattacaggtgtgagccactgcacccagcgttttttgttgttaagacagggtcttgctctgttgcccaggctggagtgcagtggtgtgatctcagctcactgcaacttctgccacctgggcttaagccatcctcccacttcagcatcccaaatagctgggactgcaggcacacaccaccacacccagctaatttttgtattttttgtagagacgggatttcaccatgttgcccaggctggtgttgaactcatgagctcaagtaatctgctggccttggcctcccaaagtgctgagattataggcgtgagccactgcatccagctcactcctcatttctttctagccccaaaggtgttgagtcagcaaatcctgcagcctttgtgtgactttgagcatcactttcccctttcagcattaaatatatgacctctctgccttattttagaacttactacatttcaataaaactttttaaaaaatccagacattgcctatgttcgtttataat

SEQ ID NO: 3754 - DNA, 2005 bp, Homo sapiens
tgaacaccatggacgctgactcacttgtgtctagatgactgacagcctgagagactctataagaacatgtttttctaagccctttttgtgccaggtgtcccgttaacgtctctgttagttcagaggtgagttttgttcagacgttttgaacaaaaggcaaagatttcctcatgggaagggtgttcaaaactgacagctataaatgtaggtcagagacccacccacctcataacagtcatacactcccagagttaaacgattggcctctgatggccacacacccctatgggcttgtgtcttggactctgggatttaaaagatatatatgtatatatatttatgtaaacctgagcatctcagtttgggtagagttttaaggttatatgaaactgatagaacttttgtattttttttttaaatattgttttgatatatcagatatttgttttgtctggatcacaagtgagaaagaaaagagaataatgctctttttcacaatgaactggtcaaattgactatcttgtaaagtgatactttactatgtcagtgaaatttcagtttgattttagtcaaccagattatatcctttgtatctactgatattaacacatcatattaacacatcatttcttaaaaaaacatttcttctgtttggcaatcataattaactctggttatcagcctattttgtaattattgtctttgtcgtcacttttcttgaattgttttctagtcattaaacagatatgaaggcattgccaaagagctttaatatccagtaacaagatccagaaaccaaactttaaccagtgatcagttttccgtgctgcattgtaactcagctcattctggcattcaagttttaggcaaaaaaagaggaaacttctaacatttagcttgtaagtcctgacataagatagtgaagatatttatcttctttctaatatttgtatagtccgccaatgtattttcttcccactattcccattaacataccaaacactgtttctaggtccaaagtctatttctaggagtggccaatatttgtattgttgaatctcctagggaatgctaaatgtttcactttaaaatacctatttataccaagtagcatgagattagtactagagtgagatttggaatattagtccacatatcacaaactgcttgcctacatgtatagattttttttttcacccaccttcctaaccaggaatttgtttccttaaatttgttgttgttgttgttgttgtttgttgttatttttttgagaagagtcttgccctgtcgccaaggcgggaatgcattgacgtgatctcagttcactgtaacctctacctccccggtttaatcgattctcctccttcagcctcctgaatagctgggattacaggcaccacatttttagtggagatggggtttcaccatgttggccaggctggtctcaaactcttgacctcaagtgatctacctgcctcagcctcccaaagtgctgggattacaggtgtgagccactgcacccagcgttttttgttgttaagacagggtcttgctctgttgcccaggctggagtgcagtggtgtgatctcagctcactgcaacttctgccacctgggcttaagccatcctcccacttcagcatcccaaatagctgggactgcaggcacacaccaccacacccagctaatttttgtattttttgtagagacgggatttcaccatgttgcccaggctggtgttgaactcatgagctcaagtaatctgctggccttggcctcccaaagtgctgagattataggcgtgaaccactgcatccagctcactcctcatttctttctagccccaaaggtgttgagtcagcaaatcctgcagcctttgtgtgactttgagcatcactttcccctttcagcattaaatatatgacctctctgccttattttagaacttactacatttcaataaaactttttaaaaaatccagacattgcctatgttcgtttataat

SEQ ID NO: 3755 - DNA, 5671 bp, Homo sapiens
attttacatttttttttttattattatactttaagttctagggtacatgtgcacagcgtgcaggtttgttacatatgtatacatgtgccatgttggtgtgctgcacccattaactcgtcatttacattaggtatatctcctaatgctatccctccccccctccccccaccccaaaacaggccccagtgtgtgatgttccccttcctgtgtccaagtgttctcattgttcaattcccacctatgagtgagaacatgcgacgtttggttttttgtccttgcgatggtttgctgagaatgatggtttccggcttcatccatgtccctagaaaggacatgaactcatcattgtttatggctgcatagtattccatggtgtgtatgtgccacattttcttaatccagtctatcattgttggacatttgggttggttccaggtctttgctattgtgaatagtgccgcaataaacatacgtgtgcatgtgtctttatagcagcatgatttataatcctttgagtatatacccagtaatgggatggctgggtcaaatggtatttctggttctagatccctgaggaatcgccacactgtcttccacaatggttgaaccagtttacagtcccaccaacagtgtaaaagttcctatttctctgcatcctctctagtacctgttgtttcctgactttttaatgatcgccattctaactggtgtgagatggtatctcattgtggttttgatttgcatttctctgatggccagtgatgatgagcattttttcatgtgtctgttggctgcataaatgtcttcttttgagaagtgtctgttcatatccttcacccacttgttgatggggttgttttttttcttgtgaaattgtttgagttctttgtagattctggatattagccctttgtcagatgagtagattgcagaaattttctcccattctgtaggttgcctgttcactctgatggtagtttcttttgctgtgcagaagctctttagtttaattagatcccatttgtcaattttggcttttgttgccattgcttttggtggtttagacatgaagtccttgcccatgcctatgtcctgaatggtaatgcctaggttttcttctagggtttttatggttttaggtctaacgtttaagtctttaatccatcttgaattaatttttgtataaggtgtaaggaagggatccagtttcagctttctacatatggctaaccagttttcccagcaccatttgttaaatagggaatcctttccccatttctcgtttttgtcaggtttgtcaaaggtcagatggttgtagatgtgtggtattatttctgagggctctgttctgttccattggtctatatctctgttttggcaccagtaccatgctgttttggttactgtagcctggtagtatagtttgaagtcaggtagcgtgatgcttccagctttgttcttttggcttaggattgacttggcaatgcaggctcttttttggttccatatgaactttaaagtagtttttcccaattctgtgaagaaagtcattggtagcttgatggggatggcattgaatctataaattaccttgggcagtatggccgttttcacgatattgattcttcctacccatgagcatggaatgttcttccatttgtttgtatcctcttttatttcattgagcagtggtttgtagttctccttggagaggtccttcacctcccttgtaagttggattcctaggtattttattctctttgaagcaattgtgaatgggatttcactcatgatttggctctctgtttgtctgttattggtgtataagaatgcttgtgatttttgcacattgatttttgtatcctgagactttgctgaagttgcttatcaccttgagattctgggctgagacgatggggttttctagatatacaatcatgttatctgcaaacagggacaatttgacttcttcttttcctaactgaataccctttatttctttctcctgcctaattgccctggccagaacttccaacactgtgttgaataggagtggtgagagagggagggcatccctgtcttgtgccagttttcaaagggaatgcttccagtttttgcccattcagtatgatattggctgtgggtttgtcataaatagctcttattgttttgagatacatcccatcaatacctaatttattgagagtttttagcatgaagggctattgaattttgtcaaaggccttttctgcatctattgaaatgatcatttagtttttgtcattggttctgtttatatgctggattacatttattgatttgtgtatgttgaaccagccttgcatcccagggatgaagcccacttgatcaaggtggataagctttttgatgtgctgctggattcagtttgccagtattttattgaggatttttgcatcaatgttcatcagggatattggtctaaaattctctttttttgttgtgtctctgctaggctttggtatcaggatgatgttggcctcataaaatgagttagggaggattccctctttttctattgattggaatagtttcagaaggaatggtaccagctcctccttgtacctctggtagaattcggctgtgaatccgtctggtcctggactttttttggttggtaagctattaattattgcctcaatttcagagcctgttattggtctattcagagattcaacttcttcctggtttagtcttgggagagtgtatatgtcaaggaatttatccatttcttctagattttctagtttatttgcgtaggggtgttcatagtattctctgatggtagtttgtatttctgtgggatctgtggtgatatcccctttatcaatttttattgtgtatatttgattcttctctcttttcttctttcttactcttgctagcggtctatcaattttgttgatcttttcaaaaaaccagctcctggattcattgatttttttgaagggttttttctgtctctatcttcttcagttctgctctgatcttagttatttcttgccttctgctagcttttgaatgtgtttgctcttgcttctctagttcttttaattgtgatgttagggtgtcaattttagatctttcctgctttctcttgtgggcatttagtgctataaatttccctctacacactgctttaaatgtgtcccagagattctggtatattgtgcctttattctcattggtttcaaagaacatctttatttctgccttcatttcattatgtacccagtagtcattcaggagcaggttgttcagtttccatgtagttgagcggttttgagtgagtttcttaatcctgagttctagtttgattgcactgtggtctgagagacagtttgttataatttctgttcttttacatttgctgaggagtgctttacttccaactatgtggccaattttggagtaagtgcagtgtggtgctgagaagaatgtatattctgttgatttggggtggagagttctgtagatgtctattaggtccacttggtgcagagctgagttcaatttctggatatccttgttaaccttctgtctcattgatctgtctaatgttgacagtcgggtgttaaagtctcccattattattgtgtgggagtctaagtctctttgtaggtctctaaggacctgctttatgaatctgggtgctcctatattgggtgcatgtatatttaagatagttagctcttcttgttgaattgatccctttaccattatgtaatggccttctttgtctcttttgatctttgttggtttaaagtctgttttatcagagactaggattgcaacccctgcctctttttgttttccatttgcttggtagatcttcctccatccctttattttgagcctatgtgtgtctctgcacatgagatgggtttcctgaatatagcacactgacgggtcttgactcttcatccagtttgccagtctgtgtcttttaattggagcattcagcccatttacatttaaggttaatattgttatgtgtgaatttgatcctgtcattatgatgttagctggttattttgctcgttagttgatgcagtttcttcctagcatcgatggtctttacaatttggcatgtttttgcagtggctggtaccagttgttcctttctatgtttaatgcttccttcaggagttcttgtagggcaggcctggtggtgacagaatctctcagcatttgcttgtctgtaaagtattttatttctccttcacttatgaagcttagtttggctggatatgaaattctgggttgaacattcttttctttaagaatgctgaatattggcccccactctcttctggcttgtagagtttctgccaagagatcagctgttagtctgatgggcttccctttgtgggtaacccgacctttctctctggctgcccttaacatttttgccttcatttcaactttggtgaatctgacaattatgtgtcttggagttgctcttctcgaggagtatctttgtggcattctctgtatttcctgaatttgaatgttggcctgccttgctaggttggggaagttctcctggataatatcctgcagagtgttttccaacttggttccattctccctgtcactttcaggtacaccaatcagacgtagatttggtcttttcacatagtcccatatttcttggaggctttgttcatttctttttattcttttttctctaaacttctcttctcacttcatttcattcatttgatcttccatcactgataccctttcttctagttgatcgaatcagctactgaagcttgtgcattcgtcacgtagttcttgtgccatggttttcagctccatcaggtcctttaaggacttatctgcattggtgattctagttagccattcgtctaatcttttttcaaggtttttaacttctttgtgttgggtttgaacttcctcctttagctcggagaaattcgatcatctgtagccttcttctctcaacttgtcaaagtcattctccatccagctttgttccattgctggtgaggagctgcattcctttggaggaggagagatgctctgatttttagaattttcagtttttctgctctgttttttcccctctttgtggttttatctacctttggttttgatgatggtgatgtacagatggggttttggtgtggatgtcctctctgtttgttagttttccttctaacagtcaggaccctcagctgcaggtctgttagagttttctggaggtccactccagaccctttttgcctgggtatcagcagtggaggctgcagaacagcaaatattggtgaacagcaaatgttgctgcctgatcgttcctctggaagtttcatctcagagggatacccggccgtgtgaggtgtcaatctgcccctactggggggtgcctcccagttaggctacttgggggtcagggaaccacttgaggaggcagtctgtccgttctcagatctcaagctccgtgctgggagaaccactgctgtcttccaagctgtcagacagggacatttaagtctgcagaggtttctgctgccttttgtttggctatgccctgcccccagaggtggagtctacagaggcaggcaggcctccttgagctgcggtgagctccacccagttcgagctt

SEQ ID NO: 3756 - DNA, 5676 bp, Homo sapiens
aatgtgattttacatttttttttttattattatactttaagttctagggtacatgtgcacaggtgcaggtttgttacatatgtatacatgtgccatgttggtgtgctgcacccattaactcgtcatttacattaggtatatctcctaatgctatccctcccccctccccccaccccaaaacaggccccagtgtgtgatgttccccttcctgtgtccaagtgttctcattgttcaattcccacctatgagtgagaacatgcgacgtttggttttttgtccttgcgatggtttgctgagaatgatggtttccagcttcatccatgtccctagaaaggacatgaactcatcattgtttatggctgcatagtattccatggtgtgtatgtgccacattttcttaatccagtctatcattgttggacatttgggttggttccaggtctttgctattgtgaatagtgctgcaataaacatacgtgtgcatgtgtctttatagcagcatgatttataatcctttgagtatatacccagtaatgggatggctgggtcaaatggtatttctggttctagatccctgaggaatcgccacactgtcttccacaatggttgaaccagtttacagtcccaccaacagtgtaaaagttcctatttctccgcatcctctctagtacctgttgtttcctgactttttaatgatcgccattctaactggtgtgagatggtatctcattgtggttttgatttgcatttctctgatggccagtgatgatgagcattttttcatgtgtctgttggctgcataaatgtcttcttttgagaagtgtctgttcatatccttcacccacttgttgatggggttgttttttttcttgtgaaattgtttgagttctttgtagattctggatattagccctttgtcagatgagtagattgcagaaattttctcccattctgtaggttgcctgttcactctgatggtagtttcttttgctgtgcagaagctctttagtttaattagatcccatttgtcaattttggcttttgttgccattgcttttggtggtttagacatgaagtccttgcccatgcctatgtcctgaatggtaatgcctaggttttcttctagggtttttatggttttaggtctaacgtttaagtctttaatccatcttgaattaatttttgtataaggtgtaaggaagggatccagtttcagctttctacatatggctaaccagttttcccagcaccatttgttaaatagggaatcctttccccatttctcgtttttgtcaggtttgtcaaaggtcagatggttgtagatgtgtggtattatttctgagggctctgttctgttccattggtctatatctctgttttggcaccagtaccatgctgttttggttactgtagcctggtagtatagtttgaagtcaggtagcgtgatgcttccagctttgttcttttggcttaggattgacttggcaatgcaggctcttttttggttccatatgaactttaaagtagtttttcccaattctgtgaagaaagtcattggtagcttgatggggatggcattgaatctataaattaccttgggcagtatggcccgttttcacgatattgattcttcctacccatgagcatggaatgttcttccatttgtttgtatcctcttttatttcattgagcagtggtttgtagttctccttggagaggtccttcacatcccttgtaagttggattcctaggtattttattctctttgaagcaattgtgaatgggatttcactcatgatttggctctctgtttgtctgttattggtgtataagaatgcttgtgatttttgcacattgatttttgtatcctgagactttgctgaagttgcttatcaccttgagattctgggctgagacgatggggttttctagatatacaatcatgttatctgcaaacagggacaatttgacttcttcttttcctaactgaataccctttatttctttctcctgcctaattgccctggccagaacttccaacactgtgttgaataggagtggtgagagagggagggcatccctgtcttgtgccagttttcaaagggaatgcttccagtttttgcccattcagtatgatattggctgtgggtttgtcataaatagctcttattgttttgagatacatcccatcaatacctaatttattgagagtttttagcatgaagggctattgaattttgtcaaaggccttttctgcatctattgaaatgatcatttagtttttgtcattggttctgtttatatgctggattacatttattgatttgtgtatgttgaaccagccttgcatcccagggatgaagcccacttgatcaaggtggataagctttttgatgtgctgctggattcagtttgccagtattttattgaggatttttgcatcaatgttcatcagggatattggtctaaaattctctttttttgttgtgtctctgctaggctttggtatcaggatgatgttggcctcataaaatgagttagggaggattccctctttttctattgattggaatagtttcagaaggaatggtaccagctcctccttgtacctctggtagaattcggctgtgaatccgtctggtcctggactttttttggttggtaagctattaattattgcctcaatttcagagcctgttattggtctattcagagattcaacttcttcctggtttagtcttgggagagtgtatgtgtcaaggaatttatccatttcttctagattttctagtttatttgcgtaggggtgttcatagtattctctgatggtagtttgtatttctgtgggatctgtggtgatatcccctttatcaatttttattgtgtatatttgattcttctctcttttcttctttcttactcttgctagcggtctatcaattttgttgatcttttcaaaaaaccagctcctggattcattgatttttttgaagggttttttctgtctctatcttcttcagttctgctctgatcttagttatttcttgccttctgctagcttttgaatgtgtttgctcttgcttctctagttcttttaattgtgatgttagggtgtcaattttagatctttcctgctttctcttgtgggcatttagtgctataaatttccctctacacactgctttaaatgtgtcccagagattctggtatattgtgcctttattctcattggtttcaaagaacatctttatttctgccttcatttcattatgtacccagtagtcattcaggagcaggttgttcagtttccatgtagttgagcggttttgagtgagtttcttaatcctgagttctagtttgattgcactgtggtctgagagacagtttgttataatttctgttcttttacatttgctgaggagtgctttacttccaactatgtggccaattttggagtaagtgcagtgtggtgctgagaagaatgtatattctgttgatttggggtggagagttctgtagatgtctattaggtccacttggtgcagagctgagttcaatttctggatatccttgttaaccttctgtctcattgatctgtctaatgttgacagtggggtgttaaagtctcccattattattgtgtgggagtctaagtctctttgtaggtctctaaggacctgctttatgaatctgggtgctcctatattgggtgcatgtatatttaagatagttagctcttcttgttgaattgatccctttaccattatgtaatggccttctttgtctcttttgatctttgttggtttaaagtctgttttatcagagactaggattgcaacccctgcctctttttgttttccatttgcttggtagatcttcctccatccctttattttgagcctatgtgtgtctctgcacatgagatgggtttcctgaatatagcacactgacgggtcttgactcttcatccagtttgccagtctgtgtcttttaattggagcattcagcccatttacatttaaggttaatattgttatgtgtgaatttgatcctgtcattatgatgttagctggttattttgctcgttagttgatgcagtttcttcctagcatcgatggtctttacaatttggcatgtttttgcagtggctggtaccagttgttcctttctatgtttaatgcttccttcaggagttcttgtagggcaggcctggtggtgacagaatctctcagcatttgcttgtctgtaaagtattttatttctccttcacttatgaagcttagtttggctggatatgaaattctgggttgaacattcttttctttaagaatgctgaatattggcccccactctcttctggcttgtagagtttctgccaagagatcagctgttagtctgatgggcttccctttgtgggtaacccgacctttctctctggctgcccttaacatttttgccttcatttcaactttggtgaatctgacaattatgtgtcttggagttgctcttctcgaggagtatctttgtggcattctctgtatttcctgaatttgaatgttggcctgccttgctaggttggggaagttctcctggataatatcctgcagagtgttttccaacttggttccattctccctgtcactttcaggtacaccaatcagacgtagatttggtcttttcacatagtcccatatttcttggaggctttgttcatttctttttattcttttttctctaaacttctcttctcacttcatttcattcatttgatcttccatcactgataccctttcttctagttgatcgaatcagctactgaagcttgtgcattcgtcacgtagttcttgtgccatggttttcagctccatcaggtcctttaaggacttatctgcattggtgattctagttagccattcgtctaatcttttttcaaggtttttaacttctttgtgttgggtttgaacttcctcctttagctcggagaaattcgatcatctgtagccttcttctctcaacttgtcaaagtcattctccatccagctttgttccattgctggtgaggagctgcattcctttggaggaggagagatgctctgattttttgaattttcagtttttctgctctgttttttcccctctttgtggttttatctacctttggttttgatgatggtgatgtacagatggggttttggtgtggatgtcctctctgtttgttagttttccttctaacagtcaggaccctcagctgcaggtctgttagagttttctggaggtccactccagaccctttttgcctgggtatcagcagtggaggctgcagaacagcaaatattggtgaacagcaaatgttgctgcctgatcgttcctctggaagtttcatctcagagggatacccggccgtgtgaggtgtcaatctgcccctactggggggtgcctcccagttaggctacttgggggtcagggaaccacttgaggaggcagtctgtccgttctcagatctcaagctccgtgctgggagaaccactgctgtcttccaagctgtcagacagggacatttaagtctgcagaggtttctgctgccttttgtttggctatgccctgcccccagaggtggagtctacagaggcaggcaggcctccttgagctgcggtgagctccacccagttcgagctt

SEQ ID NO: 3757 - DNA, 1553 bp, Homo sapiens
tgcgacccgcactcccacccccaacacgctctgcagactccgcccagacggccccggggtcacctaatatcagcaagcccccatcccaaaccgggggacctccatgcagaaaccgaaaaaccatctgccccagaagagaagtcggaggccccaggagcgggaggggcggggagcaaggggagggagggagacagggctgcgctgcggggccgagaaggcaagggtcctgggaccggggacaaggaggaggaaggggcacgaacgcccgaggagcctggagtcaggaatcggggcggcgggagagaccgggggtcactcccaggaaggggtcgaggtcacgaggcgcatggagtcgagagtccccaaaagggaaggccaggataccgaggaaaagcgggtgcggggtcaccaaggggctcgggggcaccgatgagtgcggggtcaagggttaccagaaaacgaaaggtcgggggtcaccaagctgcgcggtacagggagtcacccggaagagcgggaaggaaaggttgggagggttgtcgtggaaggtagggttaaggttcacggcagggggtcgccggggggcgggggggcaggtcaaggttcacggcggtggtcgcggggcagcgcggggtcaacgttggcggcgaagggcggggtcggaaggggtcgcggcggagggcgggggtcccgccgcgctcgcccccgccccacggcccccagaacccccagccccgggcgcaggggtccgcggggagcgccggacccacaagcggggtcgggccaggcaggggtcgcggtggagccggggcgggggtcgcaaccagagcctcacctcgggcccgggtccggccgggcgcggagcccgcggcgcctgtttctccgagcctcgcagctgccgccgctcacttccgggtttcgggcgccatcttgggggccccgcgcacttccggtcatgccgcggggcggggcctccacctgcgggggcgtggtctcggttcgggggcggggccaccttccaagccaatcccttgaggtccttccgctattcggaaggggctgggactcctacggctctgggttcgaatcccgccctgcctggttctcttgagaccccagcatgtgctttcacctcctcaagcctcagtttcctcttctgcaccgtgctggtgaaatggaatctgctttgtggtacagcatccccttttttcctccttcctcagaaccccctccaagcctctgcatgtgccacgtcccccactggggctcactcacccgagacttttaaactgagactccctcaaaagctactaagacgatcaccagccgggcgcagtggctcacgcctgtaatcgcagcactttgagaggctgaggcggatggatcacttgaggtcgggagtttgaggccaacctggacaatatgatgaaaccccgtctctactaaatatacaaaaattagctgggcgtgatggcgggcacctgtaatcccagctactcaggaggctgaggcagtagtatcgcttgaacctgggaggtagttattgcagtgagctg

SEQ ID NO: 3758 - DNA, 1710 bp, Homo sapiens
atgtgttcaaattaatgggattgaaaatctctccacacctgactctcatctgatctggatggttttggttttgtatcttttttacttctcccagaaaatactaaatttaaaactgtaaattaagaatataccactagataacaattatcaaattgagctttatgcatcattactcagaaagcttgccttcctttctttgctacttcaggacacagagttgacatttgcttactacagctttagatctagaagtttattcgtgcaacaaatatttattgagtaatttatactgtgccaggcatgttttgatatgtttctgtcatatgttttgatatgttccaacataagtttctgtcactttatattcagtatatattttctacagtgggtaaatttaacaaatggaaaggaatagaacactgatattttacagaattaaaccccttcattgtaagggctttgtttacatattaagtgtcaagtatttattcaggggatcttatttcattgtattttatctgttatctaggttgtccatttaccggttggacactgatactctgtcaaattcctttcaaaaatgactctttagtctgctgaaatttagcactagtactttagtgttctgatcctggaaaattcaaggtgaagctttatttgtggaccatctgatttaattattgaggattaaaaacctaaacctttgctcattctaaactcaagcttttaagcctcacagaatttacaggggtttgctttttgtttgtttgttttttcattttttactgtgcttattaaactcttggaattagttattaaagggagtaaattctcatcttgggaattttgaaaatctatggacttacaactttcaggaggattaaatgtcttaagttttgtactagagcagaatgaaatctttcctattcattgagtttttgcctgccatagaggaatttttttaaaaattaaaatgacagtttatattagtggcaaagtgaataaagacctcactttcccaccccacccttcttcctttctcttacttttctttggattaaaggtcaggtgtagtactatgaagattcactcctgaataaagtgatttcagaagctaaaatttaacatacctggaaattttgtgatgtgttagccaagtgaagacattagtgtgttccatcttttgctaatggttcatggttgatttcttcattgtttcccatgaaattagcatagtcaagtggtacccttgacgcttgactgctggtcagtttgaccctgtttttaacaactaatgtagtcatgccgcttgattattccatgaagtcccagcaaaataataatgaggaattaactaacattatgttatctatctaatttgtctgtgtccctaaatgcccatgcctaacttgcttctctagtttattccttctgtggagggattaaaacgtgggtgttgcaagttgccctaagctaaacatagttttcttacatctttttgggaaaaaaaatggaatgggaagtatgcaagattaagcaagagtgatttttttttttttttgacaaatcaggtggccttcctaaacatactaagaattatgttctttcatgtgtggagacacatttgtttgcagcactttaaaaaatatatatggaataaaagtttacatgttggccctctagggatctaattaaggacattaaagtaca

SEQ ID NO: 3759 - DNA, 774 bp, Homo sapiens
ctcctgtgagtccactggacatttaccacagtgtctccagtaactgagtctttttaaaaactctgaatgagttaagtttctaaattatgaattgattcatcaaatgaagatactcagaattgtccaaactgattttatattgcaatttggtagacattataaatgtgtgcttaaccactgataagtacatcacaagcaatttttacagggatgagtctcatccttgagaatgttatcacaaaacaggaactgattgtgccctgtttaagatctctagcatataaaacgtagaatgtatgagggaataggtgcctgagcagcttcctgaagctttaaaagaccgttggcctcgtgttttaatgcaattcatgtattggtctttgtcacattggataacattttaaagttaagcagggtacttttttaattgaaattccttgaaattcgagtcctcagttttttcttcatttgcgtaaagtttatcggggggaatttaattttctcagctttttgttaagagcacttcctccaaaaaatttttttcaagtaataatgctctgctttgggttggtttttgtaagattttttgcacacctaaagagtgtttgcttttgtgctagccttatccctccactaaagttattttaaataatttcacatttctgcaaattagcactttgcttatctgcaatcttttactttgatttttgaagttttaaagcaattggagtaatactgttgaatgaactagtttcacttccaaaatagaaaaaa

SEQ ID NO: 3760 - DNA, 1423 bp, Homo sapiens
gtattattatacaatgcagtattcaaatttgtccttgtagtgcagagatgactgataatttctaaaagattcgatccttaaaacttgtttccaagcagacttataaggaagctgatttttgagtcagaggccttaaacgtgtcatatacaagtggcatcattttaagtccaaagtgaaacacttgatttgaataagctagtttataaactaaagctgttttcttatgttacagtatttcagcacatttcattccacataaaaagaatattaagtgtccctggttgtgggagagtgtttatttttctcaaaattatctagcattttgcttacagtgctttgaatgtttgacttaaaattattattgatgttgaattgtagggtgctgatttaggtcttgattcatacacatttaaaggaggttggtaaccccctcatggtagagtgaagggagaaaagggccaagaagacaaagtaccactgataaagaagagattgtcaaatagatgcattcctagtcatgaattacccttttccaaacatttttaaagcaatgcctttgtgtcaactcaacccttcttccccatttcttgtcatagaatgtagcatggccataggtgaaaaagcttatcattaaagtatgaaaccatgaattataagcattttgccatgatgcccttttatacatatgtttttaaaagtactaaccaacatataggagtttaggaatggtgaagatataatttgattaagttgtaggtaaacagaaaggatcatcttaggctcagaatttctaatatgattacatgagtctactttataaactggtataggctatgtaattagcccgtaagttacttaaaggaccaggggacctaatttttgtcagttttccagtcacattggtgccattcaggactccagctgtttacaggaaatatgtacttagcagaatagtatttttccttgaaaaaaatttgaattcagcctaaatacagaatgaatatgaatagtttgtgaaaagggttagagaacaacaatattcctatagtttctgtattaatgcagtagagacagaggttcctaacgcaaaaagaaaaccacaagtaaagaccgtcaaattagagctttagaatatgacttgaaaaagtagggatgggcaaaacagcataagaaaatattttttcttaatgcagatggacagtgttttcttgttttaaaaatgttttgcctatttgccagcattttttgaagtaatacactgctgctacctggaagatgtctaacttcattttctacaactcttatgtgattttgccattgtcattaagatgcattgattttatttatgaggtgtatgactttaaatatctaaatgctgtattaagtgacttgtttcaaaggaataaatgaagtgaaaacgtt

SEQ ID NO: 3761 - DNA, 976 bp, Homo sapiens
ttgatgctcacagaatttttattgattttttgccaaacatattcagccatgatttgacagagttgcatcttactctgctctttccccaacaagtaaccttaaatccagtaagtgaacagctggtaaaccatttctcaccttcctgttaattatttttattaaactgaagactctttttggctttggcagcatgtatttctgaacttgttaatgacatgaacaacttctttgctgaatcacagaataatttccaaatgcgagaaaaatatttcctccactttttgtgttattcacaatggaatggctacaggtacaatgcactgttaagtttaatctgtattactaacatcactgtgaagaataatcaacagaaccataagtcaagccttgatttacagcatttgccaattgcaatggtgtaaatattcacaccgtggcccatttccagctatcaacctgacggtgtcgagctcagagtcaggaagagacacgcacgagcaaaccatcacgtggtggcctccctccacacagacacagtggacatacataacatccaaattatagaaaatagtgatatgggccaggcacggtggctcatgcctataatcccaacacttcgggaggccagggcaggcagatcacttgaggtcaggagtttaagaccagcctgaccaacatggtgaaaccccgtctctgctaaaaatacagaaaaattagccgggcatggtggtgcacgcctgtaatcccagctattcaggaagctgaggtaggagaatcgtttgaactcaggaggtggaggttgcagtgagccgagatcatgccattgcactccagcctgggaaacagagactccatttcaaaaaaaaaaaaaaaaaaaaaaaagtggtatgattaggaagtcatgaatttagagtacttattacctttgtcttattatttgattgtacatttgcctaattttaaaatgatggctgtg

SEQ ID NO: 3762 - DNA, 495 bp, Homo sapiens
gaattctcaaaactcaaaaataagaaaagaacccaataaaaatatggtctagcctaataaaaatatgggctaacaatgtaaatagacacttcaccaaagaaaatgtatgatagaaaataagcacatgaaaagacactcaggccaggcgcggtggctcacgcctgtaatcccagcactttgggaagccaaggcgggtggatcacctgaggtcgggagtttgagaccagcctgaccaacatggagaaacctcgtctttactaaaactacaaaaaattagttgggcatggtggcacatgcctgtaatcccagctaatcagggggctgaggcaggagaatcacttgaacccgggaggcggatgttgcagtgagccgagatcatagcattgcactccagcctgggcaacaagagcaaaactccatctcagaaaaaaaagaaaagaaaagaaaaaaaaaaagatactcaacatcattagtcattaggaaaatgaaaataaa

SEQ ID NO: 3763 - DNA, 495 bp, Homo sapiens; identical to SEQ ID NO: 3762

SEQ ID NO: 3764 - DNA, 292 bp, Homo sapiens
ggccaggcgcggtcgctcatgcctgtaatcccaacactttgggaggctgaggcgggcggatcacgaggtcaggagatcgagaccatcctgactaacatggtgaaaccctgtctctactaaaaatacaaaaaattagccaggcatggtggtgggcgcctgtagtcccagctactcgggaggctgaggcaggagaacggcgtgaatctgggaggtggagcttgcggtgagccgagatcacgccactgcactccagcctgggcaacagagcgagactccatctcaaaaaaaaaaa

SEQ ID NO: 3765 - DNA, 299 bp, Homo sapiens
ggccgggcgcggtcgctcatgcctgtaatcccaacactttgggaggctgaggcgggcggatcacgaggtcaggagatcgagaccatcctgactaacatggtgaaaccctgtctctactaaaaatacaaaaaattagccaggcatggtggtgggcgcctgtagtcccagctactcgggaggctgaggcaggagaacggcgtgaatctgggaggtggagcttgcggtgagccgagatcacgccactgcactccagcctgggcaacagagcgagactccatctcaaaaaaaaaaagggggta

SEQ ID NO: 3766 - DNA, 334 bp, Homo sapiens
gctgcttctgccactgctgggctccacttggctcctctcacttcccagggggtcgcctgtcctgcctgtgggtttccatggcttcccagagctccctctgccccagccagcgcctccaggcccagctgaggagctgtgagaagcagcagaggggactccccatcccgggcacaccctgtcctcccacccctgcccccttgcccttccagccctttcagctgcagctgggagctggcccgtcaagtgctgcccctgcctgtgtctgggtttctgttggctgtttttcttttcttgagtggtgatttttctctaaataaaagaagtcaagcactga

SEQ ID NO: 3767 - DNA, 2067 bp, Homo sapiens
caactttaaaaggctttaatcataatgcaggacacaggtaactcctctggctccttatttcgacaggctataaagacagccctggaaaatccagagagcaggcccaggtgcggcccagtgggtgatatgagctggctccggcacagacaccagcatcaggccagccctaacacatcagcctttggcggtccagctcattttgtgggtacccgcaacacctgagtgggaggaacttgcagttcagagttgatctggaaaagaaagggtgaaagtcgttacatttttcccagggccctccttctttgccacccttgcgagccacgctggctctcccatgggcctccaaagccctgcacgcatctcctctccaaagctgagagatgctgaacacccacagactgcctccctgcaggagacacgcctgagccttcttgctcagcttctgctccagctgtgacctctggtagcgttcttcatctcccgcccgtccattctctgcagtcttcccctctcctctctccacgcacccatgccatccccaatctagcctgccccacctcttcctcccccagcctcttgtatacagtagcatctgtggaagcgggaaccataccgtccagaatgtctgggtcctgtcacaggccaagggtcattatgaggccaaggttcactacaacatcccactttcagctgtggcctgggacctgggactgtgctggggccacgcagcccctgtggctggacttggagctggcctcagtcacctcacacgtgtgcaactaacagctgcgtcacgaccttcctggcctacagccccagctgcaggtgcccacacccgcagagcaggaaatgtcagcaatggactttttccttcctcctcttgccaggccatggggaagttgtccacaactattgcagggttgggcacagatgggggccagggaatatctgccccagcagagcctccttccccatgcgaggatgaccctccagtcatatcccaggcagggaaccggggctggtgggtggaaagagcccaggctctggacgagttgcaaactctgcaagttgtgattgtcctttgtgtgaaatgaggagcattgtttccgccctgtccacctcacacagcgggtgtgaggatggaagaagagagcacagctggaggctctgtagctggggagctgctcctggctgtggcactgcttcacacagagcagtcccagctggccactggcaccagaaaccacagtatcaaagagacactgtcacacctgagctgtcctggaggagacttcaggcaagatctactcctttggccagtagttgtctcaaggtgccactcttgattttttacatcatatcacaaagctcccttgcctctgacggggaggggactcctcgttccctaatcccagctccagtgcccctgccccacccgtgtctcccgctgcccctccttggaaggccccgccgcccaccttggagttcagatactgctgcagtagcgcctgcagctctgtgttctgctgctccagagaactgttttccagcagcagcttggccctctgggtcaggacaaggctttggacagaaaaatcggttagaggctcactgaatcctccatcctctgccaagtaggggccagggtcttggtggttgtactttggctacaggtggagggagactccagaagctacactcttcacccagccgccaggtgagccaggttagcaggaacagaacaggcaggccagggcccaagagccaactgccccacatgatccacccacacaggagatgccaagggcagctcttccctcccaggttcagtgggacagggaggcagcaaacgcggctgctcccaacaaccgttcctcacctgcccgccagcaccctcctgctccatgacatgcacacttactggtacttctccaaggctgtgtagagggcatcccagaggttctgcttggaggaagggatcactgtggtcagggcctgccagtactccgagtccttggagttgtcacgcacattcttctgtaccctcagcggggcccgcgagtccct

SEQ ID NO: 3768 - DNA, 682 bp, Homo sapiens
cttaactgtggtctctgcccaacttcactggactctgaggttagagtatttcatttctgaaaaattagtgggatatgtgagaaccagctaaatcatcaataaaacaatgtactgagattgtgaactatttttagattaatctgatacatatatattaaatagttttgtaacacattattccaaatacctttaattggaaaaggcatatcacagtgtgcgtgtgggaatggtcaggcatttgtgcttttctaccatcttggcttaccacatattaaaaggcaaagtttttaaattcaaggcttctggatgtaattaaaatccttgtaatggaaactaatagttgcagttttcataaaggtagcctggtgtggaggaaagcacccagcctctggtttcaatgtaacctggacccaaatcttagttgccattagcagctttagaaccatgagtagatgaatgtctctgaggcttaatttcttaatctctaaagtatctctaaagaggaaaattctaaatacctcacaggttcattgtgaggcttaatacataagattgtatatgtcctataaacaatgcaatgctgcatgctggtggccttagtagcagttaggtccattcctttctcatccctaattctaaaaaacaaaaaacttcttgcccctgagctgcggggcctttaagg

SEQ ID NO: 3769 - DNA, 682 bp, Homo sapiens; identical to SEQ ID NO: 3768

SEQ ID NO: 3770 - DNA, 6892 bp, Homo sapiens
atgcattgatggaaaaaaagtgggtaaagaacttacagaaaagccaaaatttattctgtcggtattacttctgtggaacttcgggttattaattgtggaccgtatccttgatattctatgtactattcccttacttattctgatgtatactaatacaagattaatgttttctataataatgattggagatgtgagctccttctgaaaatgagtgtggggtgggttagtaggctcacttaactgtggtctctgcccaacttcactggactctgaggttagagtatttcatttctgaaaaattagtgggatatgtgagaaccagctaaatcatcaataaaacaatgtactgagattgtgaactatttttagattaatctgatacatatatattaaatagttttgtaacacattattccaaatacctttaattggaaaaggcatatcacagtgtgcgtgtgggaatggtcaggcatttgtgcttttctaccatcttggcttaccacatattaaaaggcaaagtttttaaattcaaggcttctggatgtaattaaaatccttgtaatggaaactaatagttgcagttttcataaaggtagcctggtgtggaggaaagcacccagcctctggtttcaatgtaacctggacccaaatcttagttgccattagcagctttagaaccatgagtagatgaatgtctctgaggcttaatttcttaatctctaaagtatctctaaagaggataattctaaatacctcacaggttcattgtgaggcttaatacataagattgtatatgtcctataaacaatgcaatgctgcatgctggtggccttagtagcagttaggtccattcctttctcatccctaattctaaaaaacaaaaaacttcttgcccctgagctgcggggcctttaaggtagaaaaggtaggaaaaacctgggaaagttttgtttttcttcttaaacataaatttgtttttaaataaaaaaaatttatatattttaaatcatctagtctaagatgtcattaaacataagtttctttccttttcttttttttttaatttgagacattcttgctctgtcacccagactggagtgcagtggcacaatctcagctcactgcagtgtccgcctcctgggttcaggtgattctcatgcttcagcctcccgagtagctgggactacaggtgtgtgccaccacatctgactaagttttgtattttcggtagagacgggggtttgccatgttaaccaggctgatcttgaacgcctggtcccaagtgatctgcccatgtcagcctcccaaaatgctgggattacaggtgtgagccaccacacccccaaatgtaagtttcaattaaagatctgactatggtgtttgcttcagcaaaattggaatgatacagagattagcaaaaataaaaatatgtgtttaggccgggtgcagtggctgacgcctgtaatcccagcactttgggaagccaaggttggggaatcacgaggtcaggagttcgaaaccagcctggccaacatagtgaaaccccgtctctactaaaagtacaaaaaaattagctgggtgtggtggtatgtgcctgtagtcccagctactcgggaggctgaagcaggagaatcgcttggacccaggaggcagaggctgcagtgagccaagactgtgccattgcactccagcctgggtgacagagtgagactccatctcaaaaaaaaaaaaaaaaaattaaaaaaaaaatttgaatctgtttatagaaaacatatttatgagcagtccacattagtagtagtattttttgtctttaattttgctattaaagcatttggaatttctatactccatcagctggtatagttcattatgaatttggtgtcctctgttgtctttccttgacctaagtccagatattcattttcagtacaatggctttttatttggattaatgctactctccattgcacgattatttcaggtaaacataattgtttaattagattttttcccttttagattagtttttagattgtaaagggaacagtgtagtgggtgataggtaaatttatttgactgttttgagctgccaagtgcgatagacacttttattaggtatttctcacaaattccatcttctcttttgaccataattttcttcatttaacagatgagacaattgtactccaaaagcttgttagcatgcggcaggcctgaattaaattgagtttttgtttgtttgtgttttgaaacagtctcactctgtcacccagactggagtacaatggtgcaatctcagctcactgcaacctctgcctcttgggttcaagcctcatgagtagctgggattacaggtgcacaccaccacacctggctaatttttgcatttttagtagagacagggtcttgccatgttggctcgaactcctgacctcaagtgatcctcctgcctcggcctcccaaagtgctggaattataagcatgagcccctatgcctgccctaaattacattttctttgctttgtttttttttttttttttttttgagaatgagtctcgctctatcgcccaggctggagtgcgatggcacaatcccggctcactgcaacctctgcctcccaggttcaagcaattcttgtgcctcagcctcccaagtagctgggattacaggcgcccaccaccatgcctggctaatttttgtatttttattagagatggggtttcaacatgttggccaggctggtctcaaactcctgacctcaagtgttccgcccgcctcagcctcccaaagtgctgggattacaggcatgagccactgtgcccagccccgaaattacattttgtctggttgggataatttatgtacaaatgaagtctctagcagcagtctttacaatataataactatgacagtgatactttactgtcagcagcatgaagattaatgtaatagaaagggatttggaatcagaagaactgtgtgtaatcctgactaatgttaatgagctatgcaactcagggcttactcaaatacatggctactaagattacatacattccatgtatttttttttctttttttttttttttgagacggagtctcgccctgtctcccaggctggagtgcagtggcgcgatcttggctcactgcaagctccttctcctgggttcacgccattctcccgcctcagcctcccgagtagctgggactacaggcgcctgccaccacgcccggctaattttttgtatttttagtagagacggagtttcaccatttacagtatggtcttgatctcctgacctcgtgatctgcccacctcggcctcccaaagtgctgggattacagacgtgagccaccgctcccggtcttttttttgtcttaagagttggagtcttgctctgtcacccaggctggagtgcactggcgcaatcatggctcactgcctcctcaaactcctgggctcaagcaattctctcacctcagcctcctgagtcgctagaattacaggtgcacaccaccatacctggctaatttttttttttttttggtagagaaggaggtttcactatgttgtccaggctggtcttaaactcctgaccacaagtgatcctcccactctggcctcccaaagtgctaggattagagacaggtcttgaactcctggccttgaacaatcctcctacctctgcttctgagtctctgggattacagatgtgtgccaccacacctggcttacatatatcttattgagtaaacttcagaaccattctgtgaagttgttagaattattattcctcctatagaggaggaaatcagaaattcagattttggggccatccctttgtacatggaatcgaagtctctgggaatggggcttaagactctctaaggaattttgatacaccatcaggcttgagaaccattaactgaaggcaagttatttaaccctcctagcctcattttccccataaaatgaaatttaccgctacattcttagttgtaaaatggggctacttacctcacagggacattggaaagatcaaatttgataatctaaagttctttgtcaactataaatgtctggataaacttttctcttttaaccataaaaagcttcatagtaattagaatataactggtgttcaatgaatatttgttggatgcttattgaacaaataaaatttgactatggaatcagctagaccttacccagatcttaaataagttataaaattgaagagagacctagaagcattcccactcttttttgttattactcctaaagctaccaattctagaccgcacctgatgagagaaggaaactggcctttcatggtccctgtggcagtttcccctgcagaacatcaggactgttatctcatttaatccttccgaaattcctgtgaggtggatagatttcagactttctttttttttgaagacaacgtcatgctgtgtcacccaggctggagaatgcagtggtggagtcacagcacactgtaacctcaacctcctgggctcaaacagtcctcctgcctcagcctccagttagctgggaccacaggtgcacaccaccactcccggctaattttttgtatttttactagagacggggtttcgccatgttagccaagatggtctggatctcctgacttcgtgatccacccacttcagcctctcaaagtgctgggattacaggtgtcagccaccccacccagccaaattcttactataacttcttagttatagtaagctggttttgttttgtttgtttgtttgtttgttttggagatagcatcttgcattgtcacccaggctggagtgcagtggcgcgatctcagctcactgcaacctccacctcactgcaacctccacctcacgtgattctcgtgtctcagcctcccaagtagctgggattacaggcacccaccaccatgcctggctaattttttgtatttttagtagagacagggtttcactatgttggccaggctggtctcaaactcctgacctcaagtgatccacccgcctcggtctcccaaagtgctgggattataggcatgagccaccacgcctggcctttgtttgttctttttacatcagaatacctttagttttcctaagtagtgtttgtatcaagtgcagtgactggtgccttcagcctgatagtgctatataagttacctaatctacaatataaaattcaattgatttttttggtagcatagcatcctatatatttgttcatgttctcattcccagcccttctttggaaatcaactccagctattctgaaactgtgaggggtgaaggtaatttaattctctgggctctaattcctaaaggagagtttgcagtatgttattactgatgacatgtaggatatgatctcagcataaggcttagtatgtgataaatctttgttggaatagtgaatttatgaacacattagactcagtataaaagctagctgggctggtcgcagtggctcatgcctgtaatcccagcactttgggaggctgagacaggtggatcagttgaggccaggagtttgagaccagcctggccaacatggtgaaaccccatctctactaaaaatacaaaaaaattagccaggcgtggtggtgggcacttgtaatcccagctacttgggaggctgaggcaggagaattacttgaacccggaaagtggaggttgcagtaaacgagaccgtgccattgcactccagcctgggcaacaagaacaaaactccatctcaaaaaaaaagctagctggaatcacttgcctatgttttccttatactggttatagaatatttaccttgggccaagcatggcggttcacgcctgtaatcccagcactttgggaggccgaggcaggtggatcacctgaggtcaggagtttgagaccagcctggccaacatggtgaaaccctgtctctactaaaaaatacaaaaattagccgggtgtgttggcacacgcctgtagtcccagctactcgggaggctgagacaggagaattgcttgaaccgaggaggcggaggctgcagtgagtcaggattgtgccactgcacttcagcctgggtaagacagagggagactccatctcaaataaaataaaataaaataaaaattttaaaaagtaggtattgtttatttttgttatttatttattcattttggagacagggtctcactctgtcacccaagttggagtgcagtgtcgtcatcatggctcattgcagcctccacctcctgggctaaagcagattctctcacctcagcctccagagtagctggtgctacaggtgcaagccatcacgcctagctaattttttttattttttatttttttgtagagacagggcctccctattttgtccaggctggtcttgaactcctggggtcaagcaatccttccacgtcggcttaccaaagtgctgggattgcaggtgtgagtcaccacacttagcctaattttagttttttaaataacctttttgtaggataattttagctttccagaaaagttgtagaaatagtacagagagttcctatatatccctcacccattttcccccattaccaccttacataaccatggtacattcatcaagactaagaaagcaatattgatgcatttgaatttcacccgtttttcctttaatgtccttgttctgttccaggattcaatctagaataccacattattgcatttcatttaccctgaattttaaagtgatatttcccttttaaatctcctagaaaaggcatatggaaggagcatttctctttgctgttctcctacatttcaagcatatctacctctatgtagcaccagcttatggtgtatatctgctgcgatcctactgtttcactgcaagtaaa

SEQ ID NO: 3771 - DNA, 478 bp, Homo sapiens
gttagttcagtctcttttctgtgttcgaatataattttcataaaataaaaataggatcttactgttttgtcacctgttattgtcacttagtaatatatctcaacatttaaatgacatacatttttacataaaggtttttaaattataatttggacagtcaggaggtgcacatttgcagttctgttcttaatttggctggtattatgatatataatttagagtgttaaattagcctggtctgcagtttttactcttaaggactgaaataatgtatgctctctcagttttcaaaatccttactttggggtttacgtggctttttatttttaattttgttaaatgaagactttgttttagatcagcacagcttagaaaaagacgtggaacaggccccgaggtccttgtttgtgctaccattttttctttttttttttttttctagtgagaaggtcttactatgtcgcccaggctggcctca

SEQ ID NO: 3772 - DNA, 478 bp, Homo sapiens; identical to SEQ ID NO: 3771

SEQ ID NO: 3773 - DNA, 7017 bp, Homo sapiens
aacatacacgccatgtgcctgaacagtaaaagcagaggggttcttgatttccagatgccaagacctaccatctctgcttccttgtaggatttcttgtctgctgtggaggatgcagagaaccggtttactggctcactgcctgtgaatgctgggcgcctgagacctgtctcttctaggccacaggagactgtgcaggcacagtcctccaggctgctgctgttacaccccactgctccctcagaggctttgggcctgccagacttggacctctgcctccctgcctccagcacgcccagtgctgacagccgtccatcatgcataggagcagctcccctaaggcctgtctctacttccagcagctggattggcaatcagagaagagtgacagtgacagaagtgctcagagagccagcaagacctcagtcctcagccttacaccccctactcacctttgagagccaacagcagcaagttggtggctttgaggggcctgaacaagacgaatttgataaagtcctggcaagcatggagttggaggagcctggcatggagctggaatgtggagtcagcagtgaggccataccaatcctgcctgcccagcagcgggagggttcagtattggctaaaaaagcccgggtagttgatctgagtggatcttgccagaaggggcctgtgcctgccatccacaaagcgggtatcatgtccgcccaggatgagtctctagatcctgtcatccaatgtaggactccacgaccccccttgagacctggtgctgtgggtcaccttcctgttccaactgccttaacagttcccactcagcaactccactgggaagtctgtccgcaacgctcccctgttcaagcacttcagcctctccaagctgctagagggaccattcagagcagccctcaaaatcgtttcccttgtcagccattccagtctccaagttcctggttaagtggcaaagctcatttacccagacctcgaactcccaactcaagctgttctactccctcaaggactagctctggattatttcctcggatacccttacaaccgcaagctccagtgtcttccattgggtctcctgttggtaccccaaaaggtccccagggagctctgcagacacccatagtcaccaaccacctggtgcagctagtcactgctgccagccggacaccccagcagcccacccatccctccaccagagccaaaactcgccgtttccctggcccagctgggatcctgcctcaccaggtgagtgagctggctttataggatttggtgggcaagggagagaagcagggttccagcactgtccagccctagcatatcttccctcttgcagagaaggaaggaaggaagtgcagagaggcttttcaaagctgcaggagaaataaaagggaagaactgaatgctagaaaatccactgtgaagaagtgcttaaggctctgaggacatcataattttcttttttcttctcctttttttttttgagatggagtcttgctgcaacatccaggctggagtgcagtggcgcaatctcagctcactgaaacctctgcctcctgggtttaagcgattctcctgcctcagcctcttgagtagctgggactacaggcccccgccaccatgcctggctaatttttgtgtttttggtagagacagagtttcaccatattggccaggctggtctcgaactcctgacctcaagtgatctgcccgcctcggcctcccaaagtgctgggattataggcgtgagccaccacgcctgaccctcttttcctttttttaagaagaccctcttttcctttttttaagaattagagattggctatgttgctcaggctggtcatgaactaggctcaagccattctcccgccttagcctcccatatagctgggactacaggtgtgcactagggcaggaagtcattcttgtgcatttgttaaggtcttatgtgttggacaatttgcttggaactgagaatacagagattaaaagaaacagttcctgtcctaaagaacttacagtgaaatggaagaaacagatgtaaacaaacaaacatgcacaaagcacacagtgtgaacaggggtcattccctgggtgctgggaagacactggctctgccttaggcttgctgagtgggctttggatggatgagtaggaggttaacaggtgtgtggcggagcgggcgctgtgctctgtggatgttctggcagtgggaaagcagggaagagcatgtgtaagggcacagaggcagaagagcaaggtgctctcagatccacacaacagttcattgtggcacgtgtggggaagctggggctgaaaaggagacagccctggtgagacttggattaaactagtcttggatcagatcccagataattggactctgaggatctggactggttgtgataggtgtgccctcttcctcccattttaagggtgtttgaaacaatttctgcctgttacttgctcttccctagcatgttagcagatatccaaagaggccgtctatgttcctcctgggctggatctccctggaggaaagggttaggacttggggaaagctgcccctttgctcatcacaggcctctcaatttttctttctttctttcttttttttttttttaagacagagtcttgctctctcgtccaggcaggagtgcagtggcacaatctcggctcactgcaacctccacctcccagcttcaagtgattctcctgcctcagccttccaagtagctggcattacaggcatgggccaccacgcctggctaatttttgtatttttggtagagatgggggtttctccatgttggccaggctggtctcgaactcctgacctcaggtgatccacccgcctcagcctcccaaagtgctgggattacaggtgtgagccgccacgcccagccaggcctctctatttgggtcactgcccccttcaggcagccctggtttttgcacctgggcgagctccggcttcctcacgttttcaaaccaatccccaaagtatcttttttgagctgccaaagaggctcctgagactttgttaggagagatgtaatatgtgttaatagtccctgatcatttcctgaactcattatgtaaaccagacaataagctgtacttgtaaataacagctgctaagcttgctctcatcttctccttccctcccctcttagcagagtgggagaagtctggaggacatcatggtttccgcgccccaaactccaacccatggtgctctggctaaattccagacagaggtaacttatgcaaatgttaactttctgggtgtgatttgagagtgaggggcgtccctgtgtgtttcaggagttaagaatcaagagctgatgctgctaggcctgtttgctggtgtcacacactaaaaggcatttgaggcaggtagttgggggaggcagcaattttactggcattaagtgaggcctgtcctggtgccaggtaggtattatctgatgccatgggtccagccttctttcccatctaagaaataaaggcccagctagctccagcttcccctgggggaggagactgtgataagtattatgagattgtgtctcaggagcccttcctctcaggtttctgagaactgagctgggaaggatctgccttctcttgcctttgctgggttccctttggtgggtgagaccctgcttcccttctccttggggttctggttgacctgctctgccctcaaacccagttttgcttttaattctccccagtattttttctctgctgtagctccgcagatctgccagtccatttcagatccaaagcagcagatactctctggattcaaagcatgtattaatgtaagaaggttaattgttaaagctagaagcatgccaaatagaatatgactggtttcaaaatggctaagccactctggaagcctataaatatatgtggtggatccctacccctaagactttttgagtctgttacaaaaaataagcgtagatagccttctgcttcaatgcagttaaagtcaggagctgattttattttattttattttattatgttattttatgttattttattttattttattttatttttgagacggattctcgctctgttgcccaggctggagtgcagtgtcgtgatctcggctcactgcaacctccgcctcctgggttcaggctattctcctgcctcagcctcctgagtagctgggactgcaggcgtgtgccaccatgcctggctaatttttgtatttttagtagagacggggtttcaccatgttagccaggatggtctccatcttctgacctcatgatctgcccgccttggcctcccaaagtgctggggtaacaggtgtgagccactgcgcccagtcaatttttgtatttttagtagagacgaggtttcaccatgttggccaggctggtctcgaactcttgtcttcaggtgatccacccgcctcggccttccaaagtgctgggataacaggtgtgagccaccgcgtctggcccaggagctgattttattaaaaatttgtttttcatacctagtcctgcagacaggacctgattttaaaaagaaaaaaaaagagtatctgctgaatgaaacctgtgatacgcgacaagattttcacgtgcttcaaatgccaaagcaatcagaaaaaaaaaaaagaaaaagagaaaaaaaagatgtcacataccattttctggccttggagataaatgagaggagagactgtggccattgtactacagtttttccgaggggatttgcctttcctctctcacccttccaccctgtttcaatcaagagtctgtagcaaggtagacctattcatacaggctccccctctgctctgtggtaccagattgttgctagttcccaggcatctgtggaggaggattttgggcgagggccctggctgaccatgaaatccacgctaggcctggatgagagagaccctagctgcttcctctgtacctacagcattgtcatggtgctgcgcaaggtaaggattctgggtgctgagacccaaaggaaagaccatttttctccctctctctgacctactgccctactccaccttaggaaggggctgtttgctccctcgtaccctatacaagtagcagcacgaagcccctttggttgtatcttccacttacctaccttttcactgtcatccataggattgggcccaggtggaaggagagagtgggttatggtatgcctctgcacttccaggccctgggtggggtggggtgagcacactgccaccctcaaatctccctagtggttaagggttgtgtgcagagacatgccagtacatgtgccaacatatccctgcctgtgactgttatgatggaacattgtgtaaacacatataaacaaaagaaagtgctggacacagtggctcacacctgtaatcccagcattttaggaggctgaggtggaaggatcacaaaggtcaggagttcgagaccagcctgggcaacaaagcgagaccctgtctctacaaaaaaatacaaaaaaaaaaaatcagctggatgtggtggcacatgtcttatagtcccagctactagggaggctgaggccagaggatcacttgatcttaggaggttgaggctacagtgaactatgatcgtgccactgccctccagccggggcaatagagcgagagcttgtctcctttaaaaaaaacccaaggccgggcgtggtggctcacacctataatcttgagaggtcaaggcgggcggatcacctgaggtcgcgagttcaagaccagcctgaccaacctggagaaaccctgtctctactaaaaatacaaaattagccggacgtgttggcacatgcctgtaattctagctactcaggaggctgaggcaggagaattgcttgaacctggaaggcagaagttgcggtgagccaagatgtgccattgcactctagcctgggcaataagagtgaaactccgactcaagaaaaaaacaaaaaccaaacaggtcaggcggggtgggtcacgcctgtaatcccagcactttgggaggctgaggcgggcagatcacttgaggtcaggagttcgagaccagcctggccaacatggtgaaaccccctctattgaaaatacaaaaattagccaggcttggtggcacacgcctgtaagtccagctactcaggaagctgaggctggagcatcgcttgaacccagaggcggaggttgcaatgagccaaggtcgtgccatggtactccagcctgggcgacagagcgagactccatctcaaaaataaaaaaataggccgggtgcggtggctcatgcctgtaatcccagcactttgggaggccgaggtgggtggatcacgaggtcaggagttcaagacaagcctggccaacatggtgaaaccctgtctctactaaaaatacaaaaattagccgggcgtggtggtgggcgcctgtaatcccagctacttgggagcctgaggcaggagaatcgcttgaaaccagaaggtggaggttgcagtgagccaagattgtgccattgcacccagcctgggagcgaaactccgtctcaaaaaataaaaaagaacggaggcaggggagagaaatgaaggacctcccagctctaggtctgtcagagagagatggggtacctccttgtcctccacaaagaagatcatcactataactatactctgacccctcctaaccccggttgccctggcacacttggagacctgggaagtcacaagtgggccgtggaaggctcagcatatgcctctccttgtaagcaggcagccctgaagcagcttcctaggaacaaggtccccaacatggcggtgatgatcaagtccctgactcggagcacaatggacgccagtgtggttttcaaggaccccacgggtaaggaattaggtcctaggttgtctggtgagtgggctccattgaggccaggaaatgaggtggaatcaccctctccctttgcagacaggaaaactgaggcagtgagcagcccacttcccagccag

SEQ ID NO: 3774 - DNA, 20522 bp, Homo sapiens
taaggcgcctgccgccagtctcctggcgactttccctatatcgcagagactcatccctctgaccccagcccggaagcactgtccctcggagtccgagacttccacctgggtcgtgtccaaggccccggcgactccccggactcggggtgccgggccaacctccccgccgaggcccacccgccgtcgctatggtaatgccgcgcccagcttgggggctggcgggccgcagggccccctggcctccggaactgctcatggggttccagcccctcgcccgcgcaagttgcaggaccggggtctgggtgggggttcggcggagtcgggagacctgggctgtcgtcagggcttgtcatggacgcgccggagaccctgagaaagcattctcctcccccgggcctcagtttccctcctgttgccttcctaccctcctgggaaacccccctttccagtgcgctcagacgtcactaccgcttgggtccatccctttcccctccccgccccacactttctactttttttttttttttttttggacgaagtctcgttctgtcgcccaggctggagtgcagtggcgtgatctctgctcactgcaaccgtcgtctcccgcccacccctttcactctgacccttagagtcttgggaactgtatcgccagctgtagctcctgcggctctggcatctggggttaggcaccacctctgatctgggtttgacactcatcaggaactggctacagcagccctgctggctagaaagaaggaaccgtggactggggcatcctactctcctgggaccctagtttttgggccttggattaggtagggaaactactggcttcatttgcagaaacaatgccactgtgcagacatgtttggatttatggtagtttctcttatgtttgacataagattggtcaggcgaaacctttgggatattgcaaaatccttaggcccaagccaggggccgtggctgacacctgtttttgtttgtttgtttttttgagacagagtctcactctgtggcccaggctgaagtgcagtggtgcgatctccgctcactgcaacctccacttcccaggttcaagcaattctcctgccttagactcccaacaagctgggattacaggcgggcaccaccaccccagctaacttatttctatttttagtagagacgaggtttcactttgttggccaggctgttcttgaactcctggcctcaggtggtccacccgccttggcgtcacaaagtgctgggattacaggagtgagccaccatgcccagcctgtggctgacacctataatcccagcactttggaggccacagtgggaggatcacttgagcccaggagttcaagactggcctgggcaatgtagtgaggccccgtatctataaaaatttaaaaattagcctgggcgcagtggctcacgcctgtaatcccagcactttgggaggctgaggtgggcagatcacaaggtcaggagttcaagaccagcctggctaacatggtgaaaccctgtctcaactaaaaatacaaaaaaaaatagccaggcattgtggcttggcctgtaatcccagctacttgggaggctaaggcaggagaattgcttgaacctggaaggtggaggttgcagtgagccaaaatcgtgccgctggacttcagcctgggcaacagagcaagactccgtctcaggaagaaaaaaaaaaaaagaaaattagctgagcacggtggtgcacacctgtagtcccagttactcaggaggttgaggtgggagggtcacttgagcctaggagattgaggctgcagtgagctatgatcttgccactgcactccagtctgggcaatagggcaagaccctgtctcaaaacaaaagacaaaaacaaaatgtttacgcccatgtgcacagtcctggagaactgcccttgctcccctaggcagccttccctttgccccctttcttcccttccaggattagtgcagatggttctgagtggattatgttacaagaaagttttttaatctttctttccttttttttttttaagacagagtcttgctctgtcgcccaggctggagttcagtggtgcaatcttggctcactgcaacctctacctcccgggttcaagcaattctcctgccttagccttccaagtagctgagatcacaggcatgctccactaggcccggctaatttttttttttttaaagacagagtcttgccctgtcgcccaggctggtgtgcagtggtgcgatctcggctcactgcaacctctgcctcccagttcaagcgattctcctgcctcagcctcctgagtagctgggattacagatgcccaccaccacgcccagctaattttttgtatttttagtagagacagggtttcaatatgttggccaggctggtctcgaacgcctgaccttgtgatccgcccccacctcaacctcccaaagttctgagattataggtgtgagccaccacgcccgaccaaattttgtattttaagtagagatggggtttcactgtgttggtcaggctggtcttgaactcctgacctcaggtgattcaccagctttggcctcccaaagtgttgggattataggcatgagccaccgtgcctggcagaaagtgttttaatctttttctaagaggcgggtctcactatgttgcccagcctagcctcaaactcctgggctctagggatccacccacctcagcctcccaagtagctgggactgcaggaatgagccactgcacacagctaagtaagttttttagaatacttgggtcttttttttttttttttttgatacagactcactctgtcgcccaggctggagtgcaacctctgcctcctgggttcaagcgattctcctgcctcagcctcccgagtagctgggattacaggcatgagccaccatgcccagctaacttttgtatttttagtagagacaaggtttctccatgttggccaggttggtctcgaactcctgacctcaggagatccacctgcctcggcctcccaaagtgctgggattacaggcatgagtcaccacgcccggccctagattgtttaagtctttaacgaaatcccatttcttctcattccttagtcctttcccagccgtagcaaaaacaaacaaaaaacaatatacctgatggtattgttagtgctgggaagaagcagagtgaggacagaatgtgcttgcaaatggtatttctcaaccccagttggttttttttcttttcaggcgtgcagtttgcagaagctgtttgctgtggaagaggagtttgaagatgaggtagggaagtgttgatgatcagaggtggcagacgaggtcttaaaatgtaaacactcaggttcagaacattttggattagcctgtaccagcctccttttagttgacatgtgtatgtttttgcctgtgaggtgctgagaagtgatgagaagtgtaaacaacctacttaactgtcttagaaacaaaaaaccagagcaatgaattgcctaattgtcatacctttaaattataagggctctttcctggaagctgtgtcatctagctgatttaattcacctctatgataacatacttgcagtgggaagggctgtgtatgtagagccagaaccatgtaagagatagcatagttactggatggcaggaggccaggggtcagcaattggctatgtgaatcagggcaagttactttattctctggtcttctgttttctcttctacaatatgagggatgctcttctgcctcagatgttcttcccttccctctgtctaatcacaagatgaggggtgagactagatccaaagctcgcacgttagaattacccttgtctaggctctaccacacaccaattaaatcagaatttctgggaatggcccagccagggatatttcttttttttccttttcttcaacatttattttaagttcaggggtacacgtgcaggtttgttacataggtaaacatgtgccatggtggtttgctgcacagatcatcccatcacctaggtaataagcccagcatgcattagctattcttcctgatgctctccacctccctgcccccggcagcccccactgtgtgaacttctttctttttttggagacaggatctctttctgtcacccaggctggagtgcaatggcacaatcacggctcactgcaacctcaacctcccaggcataagtgatcctcccacctcagcctcctcagtagctgggcctacaggtgtgtgccaccatgcccagctaatttttcgtttttttgtagagacagggtcttactaagttgcccaggctggtctcaaattcctgggctcaaatgatccttctgcctcggcctcccaaagtgctgggattacaggtgtgagccagtgggcccgtcctgatttttgcttttacaaataattcacaactgccagttttgtcaaggagatgtgtccttgtctttgtctttcagctttggagatatgtgattacaggctgaaaaagtgactgttaaaatgaccctcttgggtcttacaaggtgatgatgggactgctaagtgagtaatggaattagagtaaaggaatctgacagctgaagtttctgttccttgaaaatggcagatcagtcccttcccccttcctaaagcagatgatgtcatgtctgagagtgagctctttgggagaaaaaagaccatcaacctccagagtcatcaggattttattactgctatagttctggttattattattattgttgagtcctgtggttgtcctgcctgagtatgggactcacttaataatacacaaagcaggaaaaagcctttctgtagcccagacaatccagtgcagtagcagagggtgggggtggtggggaccctcctgtcagttaaatcagcagttctgactcaaaaccaccctcagaacaggtctgttgctcttgaaggtgtcaatctcaccttgcttcccaactggaatccatactttatttagcttgcctgaaaagctatatttaacttctgccttttttgctggctccaagtcctctctggcttactgaagggtagctatctctgtgtagtgtgtgtgtgtgtgtgtgtgagagagagagagagaaagagagcacacgagtgtgtattggggatgaggagtgagctaaggacaggcagcatgaccagctggatagatccctgtttagataacaggccagacaccagaaagtggtctccttgagatggttgttgtgtgacctagggtgatttgtctgacttcttggttccctggaacgtttgcttctcctgctgttctcctctaactgcccctctccccacccatgaagactgaagaaagaggttacctgaagacttagccttagattggagtgtttttgatagagccttgtgtagggccatgggtgaggtcagaggtggtaagagacaccactattggctttcatgctttggtttctttttctttttcttttctttcttttttttttttttttttgagacagagtctcactttgtcacccaggctggagtacagtggcaccatctcagctcactgccaacctctgcctctcaggttgaagtgattctcctgcctcagcctcccgagtagctggaactacaggtgtgcacccccatgcccagctaatttttttatttttagtagagacggtttcgccacgttggccaggctggtctcgaactcctgacctcaagtgatcctcctaccttggcctcccaaagtgctgggattacaggcatgagccaccatgcccgaccctcatgctttggtttctttcaagtatctacacacaaacatacacgccatgtgcctgaacagtaaaagcagaggggttcttgatttccagatgccaagacctaccatctctgcttccttgtaggatttcttgtctgctgtggaggatgcagagaaccggtttactggctcactgcctgtgaatgctgggcgcctgagacctgtctcttctaggccacaggagactgtgcaggcacagtcctccaggctgctgctgttacaccccactgctccctcagaggctttgggcctgccagacttggacctctgcctccctgcctccagcacgcccagtgctgacagccgtccatcatgcataggagcagctcccctaaggcctgtctctacttccagcagctggattggcaatcagagaagagtgacagtgacagaagtgctcagagagacagcaagacctcagtcctcagccttacaccccctactcacctttgagagccaacagcagcaagttggtggctttgaggggcctgaacaagacgaatttgataaagtcctggcaagcatggagttggaggagcctggcatggagctggaatgtggagtcagcagtgaggccataccaatcctgcctgcccagcagcgggagggttcagtattggctaaaaaagcccgggtagttgatctgagtggatcttgccagaaggggcctgtgcctgccatccacaaagcgggtatcatgtccgcccaggatgagtctctagatcctgtcatccaatgtaggactccacgaccccccttgagacctggtgctgtgggtcaccttcctgttccaactgccttaacagttcccactcagcaactccactgggaagtctgtccgcaacgctcccctgttcaagcacttcagcctctccaagctgctagagggaccattcagagcagccctcaaaatcgtttcccttgtcagccattccagtctccaagttcctggttaagtggcaaagctcatttacccagacctcgaactcccaactcaagctgttctactccctcaaggactagctctggattatttcctcggatacccttacaaccgcaagctccagtgtcttccattgggtctcctgttggtaccccaaaaggtccccagggagctctgcagacacccatagtcaccaaccacctggtgcagctagtcactgctgccagccggacaccccagcagcccacccatccctccacccgagccaaaactcgccgtttccctggcccagctgggatcctgcctcaccaggtgagtgagctggctttctaggatttggtgggcaagggagagaagcagggttccagcactgtccagccctagcatatcttccctcttgcagagaaggaaggaaggaagtgcagagaggcttttcaaagctgcaggagaaataaaagggaagaactgaatgctagaaaatccactgtgaagaagtgcttaaggctctgaggacatcataattttcttttttcttctccttttttttttttgagatggagtcttgctgcaacatccaggctggagtgcagtggcgcaatctcagctcactgaaacctctgcctcctgggtttaagcgattctcctgcctcagcctcttgagtagctgggactacaggcccccgccaccatgcctggctaatttttgtgtttttggtagagacagagtttcaccatattggccaggctggtctcgaactcctgacctcaagtgatctgcccgcctcggcctcccaaagtgctgggattataggcgtgagccaccacgcctgaccctcttttcctttttttaagaagaccctcttttcctttttttaagaattagagattggctatgttgctcaggctggtcatgaactaggctcaagccattctcccgccttagcctcccatatagctgggactacaggtgtgcactagggcaggaagtcattcttgtgcatttgttaaggtcttatgtgttggacaatttgcttggaactgagaatacagagattaaaagaaacagttcctgtcctaaagaacttacagtgaaatggaagaaacagatgtaaacaaacaaacatgcacaaagcacacagtgtgaacaggggtcattccctgggtgctgggaagacactggctctgccttaggcttgctgagtgggctttggatggatgagtaggaggttaacaggtgtgtggcggagcgggcgctgtgctctgtggatgttctggcagtgggaaagcagggaagagcatgtgtaagggcacagaggcagaagagcaaggtgctctcagatccacagaacagttcattgtggcaggtgtggggaagctggggctgaaaaggagacagccctggtgagacttggattaaactagtcttggatcagatcccagataattggactctgaggatctggactggttgtgataggtgtgccctcttcctcccattttaagggtgtttgaaacaatttctgcctgttacttgctcttccctagcatgttagcagatatccaaagaggccgtctatgttcctcctgggctggatctccctggaggaaagggttaggacttggggaaagctgcccctttgctcatcacaggcctctcaatttttctttctttctttctttttttttttttttaagacagagtcttgctctctcgtccaggcaggagtgcagtggcacaatctcggctcactgcaacctccacctcccagcttcaagtgattctcctgcctcagccttccaagtagctggcattacaggcatgggccaccacgcctggctaatttttgtatttttggtagagatgggggtttctccatgttggccaggctggtctcgaactcctgacctcaggtgatccacccgcctcagcctcccaaagtgctgggattacaggtgtgagccgccacgcccagccaggcctctctatttgggtcactgcccccttcaggcagccctggtttttgcacctgggcgagctccggcttcctcacgttttcaaaccaatccccaaagtatcttttttgagctgccaaagaggctcctgagactttgttaggagagatgtaatatgtgttaatagtccctgatcatttcctgaactcattatgtaaaccagacaataagctgtacttgtaaataacagctgctaagcttgctctcatcttctccttccctcccctcttagcagagtgggagaagtctggaggacatcatggtttccgcgccccaaactccaacccatggtgctctggctaaattccagacagaggtaacttatgcaaatgttaactttctgggtgtgatttgagagtgaggggcgtccctgtgtgtttcaggagttaagaatcaagagctgatgctgctaggcctgtttgctggtgtcacacactaaaaggcatttgaggcaggtagttgggggaggcagcaattttactggcattaagtgaggcctgtcctggtgccaggtaggtattatctgatgccatgggtccagccttctttcccatctaagaaataaaggcccagctagctccagcttcccctgggggaggagactgtgataagtattatgagattgtgtctcaggagcccttcctctcaggtttctgagaactgagctgggaaggatctgccttctcttgcctttgctgggttccctttggtgggtgagaccctgcttcccttctccttggggttctggttgacctgctctgccctcaaacccagttttgcttttaattctccccagtattttttctctgctgtagctccgcagatctgccagtccatttcagatccaaagcagcagatactctctggattcaaagcatgtattaatgtaagaaggttaattgttaaagctagaagcatgccaaatagaatatgactggtttcaaaatggctaagccactctggaagcctataaatatatgtggtggatccctacccctaagactttttgagtctgttacaaaaaataagcgtagatagccttctgcttcaatgcagttaaagtcaggagctgattttattttattttattttattatgttattttatgttattttattttattttattttatttttgagacggattctcgctctgttgcccaggctggagtgcagtgtcgtgatctcggctcactgcaacctccgcctcctgggttcaggctattctcctgcctcagcctcctgagtagctgggactgcaggcgtgtgccaccatgcctggctaatttttgtatttttagtagagacggggtttcaccatgttagccaggatggtctccatcttctgacctcatgatctgcccgccttggcctcccaaagtgctggggtaacaggtgtgagccactgcgcccagtcaatttttgtatttttagtagagacgaggtttcaccatgttggccaggctggtctcgaactcttgtcttcaggtgatccacccgcctcggccttccaaagtgctgggataacaggtgtgagccaccgcgtctggcccaggagctgattttattaaaaatttgtttttcatacctagtcctgcagacaggacctgattttaaaaagaaaaaaaaagagtatctgctgaatgaaacctgtgatacgcgacaagattttcacgtgcttcaaatgccaaagcaatcagaaaaaaaaaaaagaaaaagagaaaaaaaagatgtcacataccattttctggccttggagataaatgagaggagagactgtggccattgtactacagtttttccgaggggatttgcctttcctctctcacccttccaccctgtttcaatcaagagtctgtagcaaggtagacctattcatacaggctccccctctgctctgtggtaccagattgttgctagttcccaggcatctgtggaggaggattttgggcgagggccctggctgaccatgaaatccacgctaggcctggatgagagagaccctagctgcttcctctgtacctacagcattgtcatggtgctgcgcaaggtaaggattctgggtgctgagacccaaaggaaagaccatttttctccctctctctgacctactgccctactccaccttaggaaggggctgtttgctccctcgtaccctatacaagtagcagcacgaagcccctttggttgtatcttccacttacctaccttttcactgtcatccataggattgggcccaggtggaaggagagagtgggttatggtatgcctctgcacttccaggccctgggtggggtggggtgagcacactgccaccctcaaatctccctagtggttaagggttgtgtgcagagacatgccagtacatgtgccaacatatccctgcctgtgactgttatgatggaacattgtgtaaacacatataaacaaaagaaagtgctggacacagtggctcacacctgtaatcccagcattttaggaggctgaggtggaaggatcacaaaggtcaggagttcgagaccagcctgggcaacaaagcgagaccctgtctctacaaaaaaatacaaaaaaaaaaaatcagctggatgtggtggcacatgtcttatagtcccagctactagggaggctgaggccagaggatcacttgatcttaggaggttgaggctacagtgaactatgatcgtgccactgccctccagccggggcaatagagcgagagcttgtctcctttaaaaaaaacccaaggccgggcgtggtggctcacacctataatcttgagaggtcaaggcgggcggatcacctgaggtcgcgagttcaagaccagcctgaccaacctggagaaaccctgtctctactaaaaatacaaaattagccggacgtgttggcacatgcctgtaattctagctactcaggaggctgaggcaggagaattgcttgaacctggaaggcagaagttgcggtgagccaagatgtgccattgcactctagcctgggcaataagagtgaaactccgactcaagaaaaaaacaaaaaccaaacaggtcaggcggggtgggtcacgcctgtaatcccagcactttgggaggctgaggcgggcagatcacttgaggtcaggagttcgagaccagcctggccaacatggtgaaaccccctctattgaaaatacaaaaattagccaggcttggtggcacacgcctgtaagtccagctactcaggaagctgaggctggagcatcgcttgaacccagaggcggaggttgcaatgagccaaggtcgtgccatggtactccagcctgggcgacagagcgagactccatctcaaaaataaaaaaataggccgggtgcggtggctcatgcctgtaatcccagcactttgggaggccgaggtgggtggatcacgaggtcaggagttcaagacaagcctggccaacatggtgaaaccctgtctctactaaaaatacaaaaattagccgggcgtggtggtgggcgcctgtaatcccagctacttgggagcctgaggcaggagaatcgcttgaaaccagaaggtggaggttgcagtgagccaagattgtgccattgcacccagcctgggagcgaaactccctctcaaaaaataaaaaagaacggaggcaggggagagaaatgaaggacctcccagctctaggtctgtcagagagagatggggtacctccttgtcctccacaaagaagatcatcactataactatactctgacccctcctaaccccggttgccctggcacacttggagacctgggaagtcacaagtgggccgtggaaggctcagcatatgcctctccttgtaagcaggcagccctgaagcagcttcctaggaacaaggtccccaacatggcggtgatgatcaagtccctgactcggagcacaatggacgccagtgtggttttcaaggaccccacgggtaaggaattaggtcctaggttgtctggtgagtgggctccattgaggccaggaaatgaggtggaatcaccctctccctttgcagacaggaaaactgaggcagtgagcagcccacttcccagccagggcccataccagtcgctgtgctgcccttgaccccgagactgatgggccatgtggtatttgcaggagagatgcaggggacggtgcacaggttgctgctggagacgtgccagaatgagctgaagcctggctcagtgctgctgctgaagcaggtatggggagcagctctccacaccactgccccccggatagagccctcagtgtctgtctccttacctgtttggctgccttcctctacaacaccaggcacggagtggctgaaccattgctaggccctggcttgagctcagggaaggcctgtggcccttgagctggcccccattcttcagggtggatagggatggagggttgtgttaaggggagattgtggcaaatggttctcttctggcaccaaggctaggcagaggacaccaagtgaaaggcaggtgggagccaggtgtccatctggcagctcccagtgctccatcaggacactgaccttccctttccttgactccagattggagtgttttctccttcacttcgaaatcactacctcaacgtgacacccaacaacctggtccatatttacagcccggattctggggatgggagcttcctcaagccatctcagcccttccccaaggtaagaggagcaggaagaaacgggagactggtaaggccctccttctgcctggatcttctgatttcttcctctcttccaccctggggagcagaggtctgaagggggcaggtgctctgaggtgaaaaggtatctttggggacaggaccatctcctatccctcatccagccgcctggcagatggctcagtaacagtacctagaggagcagctggcttcttggtgatccctgagcatctgatggcaggcttgaacatctgagaggataggagtcacttgagaactaaccaagtggagggcccaccagggggtggtggcagtaaatgaccgagggtcagatctgctacaggtggcagtgtggagaacagtgagctacaaatggcctgtcaggtgagccagcacctgctctgtgtcttccctcttggcatctgcctctgctaaattagggggaagctgcacagagcactggtggggacatcctctttaggaaccgagacgagcatttggcatttatgggaggtaagcatgggcttccaggcagatccactccaggttgagagtgtagagcctgggcttgacttgccctgcccccaccaccttcctaggatcttgtgtactgaaaacgtgtactgtgaccttgggcaagtcctgttgcctcccttgcaacagcttcatctatagtacgtttgacttgatgacctctagtcatcttagacagaggttttcatctaagctccaactttccacttccattttcctcatctttccccttagcccctccacattctctcaaaatcaccccacttctaaaccctttctttttctttcttttcttttcttttttttttgagacagttttgctctgtcacccaggccagagtgcagtggcgtgaccttggctcaatgcaacctctgccttccagattcaagcgattctcccacctcagcctcccgaacagctgggaccatgcccaactaaatctttttgtattttttagtagagacagagttttgccatattggccaggctggtcccgaactcctgacctcaggtgattggcctgccttggcctcccaaagtgctgggattataggcatgagccaccgtgctcggcctatttttcttttaaatttcaaattatctatacttattgaaataaatcaaaatagcacagaataagcaaaaaatgggtcctacccttccccactcctatttcctaggactaaccatggttaaccatttaattaccggtatttatttattttttttttttgaaatggagtctcactctgtcacccaggctgtagtgcagtggcatgttctcagctcactgcaacttcacctcccgggttcaagtgattctcctgcctcagcctcctgagtagctgggattacaggtgtgtgccaccacactcggctactttttgtatttttagtagagacgggatttcaccatgttggtcaggctggtctcgaactcctgaccttgtgatccacctgcctcagcctcccaaagtattgggattacaggcatgaactaggcgtgccaggcccagtttttgtgtttttagtagagatggggtttcaccatattggccaggctagtctcaaactcccgacctcaagtgatcctcctgccttggcctcccaaagtgctgggattacaggtatcagccaccgtgcctggccttaattaccagttttaattacctgcccatatattagctatatattcctttggggattgttaacaactaattttaaatctcaggctaactcttcaatgtatttctgaatggcctcttcactctctgctctagttatagagaatctctaaaatattagataccaacagaactaggaaagcaaatcagccaaaagaggtttgttttttgttttgtttattatctgctgctttgggtgtttggtgtttcagctgcctcccttcagcatgggcctgggtggctggcctctgccatactcttccatcatgtttctttttttttttttttttttttttttggagcaagggtctcactctgtcccccaggctggagtgcagtggcacgatattggctcactgcaacctctgcctcctgggttcaagcgattctcatgcctcagcctcccgagtagctaggattacaggcgtgtgccaccatgcccggctctgtttttgtatttttagtagagatgtggtttcaccgtgttggccaggctggtctcgaactcctgacctcaaatgattcacccgcctcggcctcccaaagggctgggattacaggtgtgagccaccacacctggccccatcatgtttctttcctgagccccacactgttcgtttgaggttgtctgggtagaggtggtgccatctgaagggatttcagggacacaggcattggtaaccagatcctctgtccccaggattcagggagcttccagcatgatgtggctgcaaagcccgaggaaggcttcagaacagcacagaacctagaggcagaggcgtcccctgaggaagaactcccagaagcaggtaaagcagtcagcccatctgggagcaagagaggttctatttcctgttgaatagctgaaccagaatcttcctggctatatcttgttcctctttccatgaatctttggatcttatataatcttacagaaatcagatacagtgtcttgtttggcaaggctgcaggccacaaactcgttaacagtgtgatggggccatgtaaaacaaagtgtcatccacaggtttcccccattttcaggttatgtgccatcagccacaaggaggaaacatcaccatcccctgtccagatggacaggcgctatctttgtgccacactctgagtcctctgtgggctgatgaccagaccacagaggcagatttcccatcctgagtaagcttagaggagtgctgaggagtcaagacgtccactggtttttgggaaaaccaggctacaaaccagagaggcccaaatgcagaccccttgtggttgggccagctgcttcctcagaaggcagcatcacccaggtgaaactaacaccattcaggatctagttttagctttttttactttaatttttatttttgcgacagggtctcattctgttgcccaggctggagtgcagtgttatgaacacgcctcactgcatcctcggcctctaggctcaagcagtcctcccacctcagcctcccgagtagctgggactataggtatgtgccactatgcccagcaatttttttttttttttgagacggagtctcgctctgtcacccagggtgaagtgcagtggtgcgatctcagctcactgcaagctccgcctcccgggttcatgccattctcctgcctcagcctcctgattagctgggactacaggcgcccgccaccatgcccagctaattttttgtgtatttttagtagagacggggtttcactgtgttagccaggatggtctcgatctcctgacctcgcgatctgcccgcctcagcctcccaaagtgctgggattacaggcgtgagccaccgcgcccggccatgcccagcaatttttaaattttttgtagagacagttttgccatgttgcccaggctggcctcgaactcttggggctcaagcgatccttctgtctctgcctcccaaagtactgggattagaggcatgacctaccgtgcccagcctggtctttagcttttcaattccaaaaattcaatcctgtctggccccaaagttcacaggattatatgtgggcagaaacctacccaggtgccgaggcaagagactgaaggcacaaactgttccagtataatacagaaaatagttagaataagaaaagttatactagaaataggatatagagatgattatatatggatattaccaatcattagtttttagtactaatttctgtattattattataactgagaaaaaaaccagccaatatagagtcaagagctgaagggacattgtgagaagtgaccagaagacaagagttgggtgccagatgtagggtccagccctactgggccttgtgggttttctcttcgtatgcagagacgagagattatagaaaaataagacacaagactaagagaaagtaggaaagacagctgggcccaaggggccactaccaccaatgcgtggagtccggtagtggccccaaatgcctggatgcgctgctatttattgtatacaaggcaagggggcagggtaaggagtgtgagtcatctcaaaagattgataaagtcaagcaagtcacgtgtccacgtgatgggggcctttccctttgtggtagctgaagcagagagggaggacagcatatgtcagcgttttttctgtgcacttatcagagaaatcaaagactttaatactttcactaattcactactgctatcttccaagaacttaaaagaagaaccaggtatacaggcggaacatgaaagtggacaaggagcgtgaccactgaagcacagcatcacagggagacgttgaagcctccagatgattgtgggcaggcctggctaatgtcaggcctcccacaagagctggtggagcagtgttctcgaactcccccaaggagagttccctttcccagtctgctaagtaacagttgccttcccaggcactggcgctaccgcaagactgaggtctgctaagtaacgggtgccttaccaggcactggcgctactgctagaccaaggtgtcatcaggcagcccttatcagggcgtgacagaggactttcactcttgtcttctgctcacttctcacaatgtgccttcagctcctgactctgtactggctgttttttttctcggttataatgataatacagagattagtattaaaaactaatgattggtaatattcatatatagctgggcacggtggctcactcctgtaatcccagcactttgggaggccaaggtgggcggatcacgaggtcaggagatcgagaccatcctgactaacatggtgaaaccccgtctctactaaaaatacacaaaaaattagccaggcgtggtggcgggcgcctgtagtccagctactcgggaggctgaggcagaagaatggcatgaacctgggaggcggagcttccagtgagccgagatcgtgccactgcactccagcctgggcgacagagtaagactccatctcaaaaataaaaaaaatccatatataatcatctctatatcctatttctagtataacttttcttattctgttttctttattatactggaacagtttgtgccttcagtctcttgccctggcacctgggtaggtttccacccacaattatggataggtgttctcacactacctaattcacagtataccaatggataaaccacaaaggccattatatcttgtgaaaaagcatatgtctcttatcctggaatcttgcattgcctggaagcctgcactctttctttgtgagacaagccaaggcatcaccagaaggttgctggtagtgacagagagttgattatagaatattagggctggtgggccgggcatggtggctcatgcctctaatcccagcactttgggaggccaaggcaggtggatcacgaggtcaagagatcaagaccatcttggctaacacggtgaaaccccatctctactaaaaatataaaaaattagccaggcgtggtggtgggcgcctgtaagtcccagctactcaggaggctgaggcaggagaatggtgtgaacccaggaggcggagcttgcagtgagccgagatcacgccactgcactccagcctgggcgacagagtgagactctgtctcaaaaaaaaaaaaaaagtttgtttcaggtaaagtggggttgataacaggagctaactggagatgccctacctatgaatgtttattgaggcacagagcaagcactcagtcagtattagctgctgctagtaaataatattgctagggattatcgaggtcagctgtgtccaagttctcggacataagtaccacatctgagaactgtagtcttacacaggcactttgaggaagggggtgatattttccactgtcagatgagaagccaattaaggaactgtgtaactctgaacacatctgatggcttttcccagccctctttctccttcagccaatgagagttgcactaggtgacctctgaagccttcttgtttggcactatgactggatggaaggagaggaatcagtgaggctcaggggaatcctcttcctcgtcagaatggcccagggattacgcccccgccttttgtcatgtacgggtacaaggggagcagagggaagatggaagtcaggccagcctcaggcccattggcatgggtaccactgcctggaggagccgcctgcccagctatacagccaggtccaggccctcctgaagggcagaaactttggacctgagtcacatggaatgctgatgttgtcactaaggctacccatcattcccctctctgtagatgacctggatggactcctgagtgagcttcctgaagacttcttctgtgggaccagtagttgagactgccccaacgcaggacaacccaccatgagcaggcagctctgggcatgtgtctggtcacatccaagggggagaagaaggccagcatgattggagagtggacacagccggggggcttctgtggttgctcccaccctgggtgttttccctgagagccccctcatctctgcgctgccctcactttgggccttcctttgccgttggcaccagaatccggccggagactggctctccagccaacaagaaaggcctgtcaccctcgccttgggtgtccctctcctgcctcagcttaattttagaggatattgggcctggttttcttgtcccttcataccctagtccctggacagctgaggagatgaaaggagccacaccacaacaatggcggcctgcccctccacacaggggagaagcacgctcaggcttcctctgctttgtctcttcagacctgtggttgctctgctcatccatgcccaaggttcccaggtgcaggacagaggtgtggcctattgtaccttgttctgaaataaagcatctcctgctt

SEQ ID NO: 3775 - DNA, 87 bp, Homo sapiens
ctcacacctgtaatcccagcactttgggaggccgaggtgggcggatcatgaggtcaggagttcgagaccagcctggccaacatggtg

SEQ ID NO: 3776 - DNA, 554 bp, Homo sapiens
gttaagtttatgaagttggcagttgtactgtggtaacgtaaaagaacgttctcagttttagtaaatacacactaaagtatttagtagtaaagggccatgatgtatataagttactctcagatgctccccgctcctagatgtgtgtgcgtgtgggaggggacagaataaatgcatgcaaacgataaataaaaacactctaccagaaatgttaacagtaggtaaatctgaataaagagtgtatcacttttgctgagcttgaaattctttctaaattaaaaaattatttatttttatgtttttgagatggagttgcccagggtggagtgtaatggtgccatctcggctcactgcaacctccgcctcccgggttcaagcgattctcctgcctcagcctcctgagtagctgggattacaggtgtgtgccaccatgcccagctaatttgtgtatttttagtagagatggggtttcaccatgttggccaggctggtctctaactcctgacctcaggtgatccgcctgcctcggcctcccaaagtgctgagattacaggcat

SEQ ID NO: 3777 - DNA, 816 bp, Homo sapiens
gttgctgtgttgtatggttaagtttttccaaagtacttacagcatctaccctcccaccaacagtgtacaagagttgcagttgttcgtcttaacccagacttggtgtgtggtggatttaagctgtatgatcctgatgacaaatattgttgactgtcttttcctgtacttagcggtcatttgtatattttcttctgtgaaatgtccatttgaatcttttgcccatttttcattgatttgtttattgagtgacaactcaatagtaagagttcttcagatatcctagatacaaattctttgtcagatttatgtgttgcagattttttttctagtctgtggcttgtcttttcattttcttagtggtggtttttgaagaacagaaatgtatggaaccccatttataaacttttttcttttatggttcatgcttttttatgtgctagctaagaaatttttgcctaccacaaaattacgaagtttttaaaaaatggtttttcaaagaaattttgtgcttttagcccttacatttaactcagtgataaattttgagttaatttgtgtatatgaaatgagaaagtaaataaatgttcatcctctcactccatggatatcaattattcccacatcatttgttgaagaagactgttatttccctattgaagtatcctgatgactttgtctaaaatcatttgaccacatatgcatagcactgtttgtatggttatgtgaataaaagaaatgaatttatataatgcctttgaaggaaattcaagatcatgtaatacttctcaagtattataataaacatttattttcata

SEQ ID NO: 3778 - DNA, 1171 bp, Homo sapiens
tcactatctttttggtgacctagtttgattacagtggtaaaaattattacagagccttatgcacaagagcccatgtatgtcttaagaaggtggagttactgttcagttcgggtatcactccaaggatttaatgtgagtctgattgtatttgttaagtcctcttttgtatttgatctattttctaccacagcaaagtcaacagaaaaagcctgtaatgctaccagatacagattatctacttctaggccagaagtaaatctgagaggatttagaggaaattagtacaaccggtgagctctcatacagtggtcgacctggttggtgagaccatcttgtccacttgccatggccaagtggggtccgttgctgtcttatccaccacctgcaactgtgagtgtcttaatcgactcggtttagggacttttgttttcttcaacttgtctttgctttgaagttttaatatacatttatatacagtatatgctgggtaatatacattataacctggactcagagcacccctcagttagtgttttcattttttgccctttttctgtctctcctgttccacattcttctcatttgctgcgtactttctgagctcatgatgttcctttctgagttttctaacttctccagaagcaccttgatggcacaggccatcccaaatcttgccagtattcatgcagtgttgtcttcaggttttatttgttgcctagttttaaagttcactgtctgtggccacgctgatggtgcccatgcacagtgctgaccgcaaggagctctattccgtgctgagctggacacttggagctcacatgacgtttcacggtgaggaagcagggattctgaatcgcaaaggagcagcgcgaatgagggatgtttggcccccgcctgttgctgggttgtgacctcccttcacagaatctcttgagatggatgccactcctgaagtgacttggctctgttttaggggcctactcgtggggtggtgtgtgcagctctcccggcgctcaggaaaagtggagtacagggacgcctgagggatgatctgccatcggccagggccctgcctgccttagcccccgctgagagctcagcatagtcatagcttccacctgcagctgtcttcctgagtatttgcttaagtgaaaataaagattcagccatg

SEQ ID NO: 3779 - DNA, 665 bp, Homo sapiens
acaacattgagttctattttttgagaagatataattgtttcgtgatgtttaatgtaggctagctactgaagtctaacttgcaatctaaaagaaatctattacatttaaaatttactgtatattatcttagattattttggaccatttttcatcttagcatgtgaacgtaataataaatggagatttcctaggcttttttgttggctcccactaatagctgctttacctcttgccaccaccagagctccacattacatcagtttttacctggcagcttccaaggtaaacatttgaaggtgtgcattctaatatgcagaatcaagcaggtttcttgctgacaaactgctattatggaaatactcccttttgcttgaggaataatcagacatcatcaaaataaggacattacgttgaaaataatatcttggggaaaactatttatttctaatacggccagtgaggagttgtcttagggaatgaatgggctgaccaagaggattagaaaagagattcagcacttccacctggtttggctctagccctggtttgcagtgactaagagttgtcacctagacatctgtttgtagggcagagtgagacaagtctgtgacctcagctcagttcctgtggacagatgcccaccccttgaagttaacactcttgtt

SEQ ID NO: 3780 - DNA, 439 bp, Homo sapiens
gtcccagtgaggtttattcaggtaggctctaagggtaatcatagaatttatagatatatttttatgcacaaaaaggaacctctgtgagagagagatgaaaaggacaattttttaaaaatggcttctaatggcaggggatgtactctctaatttaattttcacaatgaccctgactgaagtattagcagtctcattttacagatgaggaaactgagactcagagaagatgattaacttaacatggtaaaggcaaagtcaggattcatgcccacatctgatagaactaaaagcccagtctaccaaggaatagagaataagtataggttttggacctggataattccggattggaatcctggatctagtactaaatagctgtgtacattggtcaaactaatgaacttccctatgttctaatttcctcatcggcaaaaaaaaa

SEQ ID NO: 3781 - DNA, 545 bp, Homo sapiens
atgatattttctacttaaaatggaggaattctcataactgtgatctaaccgtcataatgaggctaaaaaggaaatcaaactgctcttgctttgcattctcttcagtagctcctttaccctttatttcaactccagcagataaaatagagatactatttgtcacccaacccctccttatcagttcagtgagggtgaatgagttaatgtcgtgaaagcacttgagttctccaaaacaaagatgttgtgataatattactacagtactttgtgattacaagttagctttgtaaataattaccaatgtgccatatccagtcgtgttctatcttggcctaggagtgttaggatttaccctcatttataagtaagcctgttaagcactatggatgttgagccaggaattaatatagccctcctcttcccaccaaataatctctcctctaggttaaatttctagaatttaaaaacacaatgagaacctgattaggaacatggcaaagatgattttttgggagaatgtaagtgtgtttgagagtatgaattta

SEQ ID NO: 3782 - DNA, 490 bp, Homo sapiens
tgactccctcatcctgccacacacacccccacgccaccccgcagctctgaaacggcttttctttcttagccagccgcacgctgttgccattccaggctcgtgtgggagaagattgttgtgcgcctgggtctgtccgcccgggcggctccagcctctggtttataaaaggtgcagatggttaaaacacaaacgtgtgacgtcagggtcggtttttaaaagtctcttctacccactacatcagttgtgtctcttgggatggactttagagaatcgattcgagcctaatggcagtctagagaaatggagatcttcgtcaggactatcagattattgtaatgctgcacttataacaaaaaacttagatttagccacgcaaaaaaaaaaaaaaaaaagaaaatagagtgcaagataaaaaaacacacctgattaactgatagtacgacccttccaatattctttgagatatccatgctatggttccattgaaaca

SEQ ID NO: 3783 - DNA, 1159 bp, Homo sapiens
ctttaatttttcagtcagaattatgtaagcttaaccaattgagatgtctgtggtgttggctcttgtttgtgcggttaatcgtcagtcttcttcaattaggatacaaacaagatattttcctcacaaattgatgtggatggtctgccactgtgggctttatgtttgacatcgtcttgtcccttcttcaaatgagttatccatttgtaaactgcttattttggggggcagggggcattgtccccataaactattcataaagcatcaatgatttcaccattcttccacccaagcttcaccataaacttgaggtttgttcttgcctcaattttaacagaattcatgttgttctgatacgggctcttttcaaactgacgtcttatccttcttagtgctgcaaactgtatcctgttcagatacattataacaagttaatataagtttatgttggtgaaaaaaaattgaaatccagcgagacacagtggctcatggctgtaatcccagcactttgggaggccaagacaggtggatcacttgagcccaggaatttgagaccagcctggccaatgtggccaaagcctgtttctactaaaaatacaaaaattagccagatgtggtggtgcgtgcctgtaataccaataatttgggtggctgaggcacaagaatcacttcagcctgggaggcagaagttgcagtgagccaagatggcactccagcctggacaatggagcaagactctgtctcaaaaagaaaaaaaaaggaaaaattaaaatccatgcatattttttcataatatgcattttccatgaactttttgaagatgccttgtacattttcatagctgctgaaaaaaataggaaaaaaaagtctatacggccaggtgcagtagctcatgtctgtgattccagcactttgggaggccaaggtgggcagataacttgaggccaggagtttgagaccagcctggccaacatggcgaaaccctgtctctactaaaaatacaaaaatgagctgggtgtggtggcgcatgcctgtaatcccagctactcaggaggctgaggcacgagaattgcttgaacctgggaggcagaggctgtagtgagctgagatcgtgccactgcactctagcctgtgtgacacagtgagactctgtctcaaaaaa

SEQ ID NO: 3784 - DNA, 6854 bp, Homo sapiens
gtgtgaggcagaagcaacacaaaagatcttgatatgaagcaattatttttggtcttaaactgctgggactccagatgacccagaccacggtcagcaggcagaagccaggtaaatttatataattctcagctctgttaattcaattattgaagctacttgtcttctgaaagggttttaagtctgaaataattttctattaaaatgaaaaaacatttgaaggtgtctggccttcaagatttgggtaactacaaagaaggaagatgatatttaagagtaaggatgtggagttgtaataaaagaagaaagggtttcagtgtgagtattggaaggtgaggaatggcaaatccttcctacttcaacttttgttttttagtagtctcaaattgcttttatttttcctagattaaagatatatctcccattcttgaaaatccctggactattagacttaaattttaatgtctttcctatttatttataaggtaaactattacaccgtccacagattcttccatgaaggaaattgctagtgtcactctatacatttagtatttcaagttcaatattatgattttccattttcatcaactatgtcaatttgacattcaaacacaggcaattttacttaaaatggtggatccttacatgagggaaataaaatgtttgtttcattataaagtttcctgccagttctgaaactcaatggtgtaatgatgagtcttcatcaggccaaaaaaaaaaaaaatgcaatgtttgacttactgtatttgtcaatatgccggtagctcttaagcagttgattttttttcccccaatgaataagtgagttgtaagaattgaggttctaaagaatataaccacctctaggaataatgatgataaaggaactgacttagaaattttgagtagaggaaaggaagttgcatggatcatataagtttttctcccttatcatgcattcatataaattattattaagtttatcttatatccattacgtgcagatactgtgcgaagtggcattctgaatgtgtgacaagagacctagatcaatgcagaactaagataattctgatggcagtttccaattttaatttagcgagcatatttatacttctaatggaattcacttattaactgacaacattgttttagtgttgataaaagcatggaagtgtttataatagtctgaaactattacaaatgggaaaggagaaaaaaagaataaaacaaaaaccaatctatgttacatccagtaaacatgacttcgaggtgaatattttgtatttttatttttaacagctttatggagctataaatcacatgccatacaattcacaaacttaaagtacacaattcaatggttttcagtaatgttacttttattaatttttaatttttaaaacagtggtatatatcacataaaatttgccattttaaccatttcaagtatacaattcaatgccattaattccactcacagtgttgtgctaccattaccactatttccgaaatgtttttataactctgaactgaagctccatggccagtgagcattaacaccccattcccctccaaccaatcccaggtaaattctgatttaccttctgtctttatgagactcgaggtacctcacctaagtggaatcatacagtatttgtccttttgtgtttggcttatttcacttagcataatgttttcaagattcatccatattgtagtatgtatcagaagtttaatcatttttattgctgaataatattcccttgcatgtatatgtcacattttgtttattcattcacctgttgatggaaatttgggtagtttccatcttttcactattgtgaatactgctatggggaacattgctgcatgaatatctgtttaagtctctattttgattcttcgaggtatataactaggagttgaattgatagaacacacggtaactcttttttaacttttgaggaactgccaaactgtttttgatagtgctgcaccatcttacattcccaccaacaatgtgtgagggtttctatttctcctcatcctcatcaacacttgttattttcagtttttaaattattattattattgctatctcagtggatgtgaattggtatgtaattgtggtactgattttcatttccctaatgactagtgatgttgaacatctttttatgttcaactatatgtaatcttctttgaagaaatgactattctagtcctttgcccattttgaaattgggttgtctttttgttcttaagttgtatggatttttatatattctggatattaaacttttatcagatacgtacttttgaatattttctaccattttgtagattgtcttttcactttcttgataatgtcttttgttgcacaaaagtttttgattttgataaagtccaatttacttatttattttttgttgttgcttgtgcttttggtgtcatatttaagaaagaatcaatttccaaatccaagatcatgaagatttaccactatgttttcttttaaatgcattatggcttttgctcttacatgtagctccttgatccattttgagctaatttctgtatgtggtgtgaagtagggggtccatctgcattcttttgcattgcaaaatccagttgtcccaatatcatctactgaagagactatttgatccccattggatggacttggcattgttgtcaagcatcaattcatgacagatgtataggattatatttgaattttcaattcagttcaattcaattgatctatatgtctgttctcatgcctcatgccgataccacactgttttgtttactgtacttttgtagtaaattctgaaatttggaagtttgagttctccaacattgttttggctatttggtacccttgcaatttataaatttgagaagaggtttttcacttttgcaaaaatggctgttggaattttcgatagagattgccttgaatctgcaggttgctgtattagtctgttctcatgctgctgtgaagaaatacctgagcctgggtaatttataaaggaaagaggtttaattgactcacagttccacaggcctggggaggcctcaggtaacttacaatcatggcagaaggggaagcaaatatgcccttcttcacacagtggcagccagaagtgcagagcaaaagccggaaaagccccgtctaaagccatcagaccttgtgagaacttactcactatcctgagaatagcagcatgagggtaaccacccccatgcttagattacctcccactaggtccctcccacggcttgtggggattatggaaactagaattcaagatgagatttgggtggggacatggagccaaaccatatgagttgctttagttagtattaacgtctcgacaatattgtcctcctttccatgaacttagtgtgtcattccatttagttaggtcttatttaatttctttcaataatgctttgtgattttaagtgtataaatctttcacctcattggttaaatttattcccaggtattttattcttttagatgctattgtcaacagaattgccttcaagattccttttctgattgttcattgctggtatgtagtaatacaactgatttttaagtgttgctcttataccttgtaacttctctgaatttgtttatttgctctagtagctttcttgtggattctttgagattgcttatatatagtatcatgccatttatgaatactgaagtttatgtcttcttttccaatttgaatgcgttttacttccttttttcccatttcctctggcaaaagtttatttttgataactacatttatccctagcttagtggggctataaaacttccttaatgtaaacaatttaaagctagtgtataggaaaattatgatggcaatgttggacagtttcagggtgtagtctcattgccacttaaagtgaacatctttggactagataagtgaataaacctttatctgggttgaaaggaaacaaaggtgacagtgagactagctgtcactccgaatgctgaagtgtctaggacagagtgacagcacaatgttcctgctgagaggcctgtccttcaaaatgaacatctttttacacacattgcaagtttgttaatttttaaaatacacttttataatttgtttcagtgagtgttttctattaactttatttactaaattgattgccatttttggtgataaatgggtgatttaatttctttatgttaactacagatgtgtgcttccccctcccgccaatttaccagtaagtcacttggtgtgtctgtaaaactgctcaggctgcttagtgaaactcaccggacacctagtttccattaccatctcatgggagtaacactgttacaatagttcatatttaaaattaggtttagaaaatattcaaagaaaaatgagctcaaaagcttaaatttttttattttttatttttagagacagagtctcactctgttgtccaggcttgtatacagtggtgtgatcatagctcactgcagccttgaactcctgggcccaagcgatcctcctgcctcagccccctgagttgctgggactataggtgcatgccaacacacctggctaattttaaaactgctcaagctgcttagtgaaattcaccaaacacctagtttctactactatctcacgggagtaatactcttgcaacatgttcatatttaaaagtagacttagaaaatactcaaagaaaacttagctcaaaagttcaaatttttttattttttatttttagagacacattctcactctgttgcctaggctggtttacagtggtgtgatcatagctcactgcagccttgaactcctgggcccaagcgatcctcctgccttggtctcctgagttgctgggactataggtgcatgccaacacacccggctaatttttttaattttttgtagagatggggtcttgctatattgtccagtctggtcttgaactcaaaactcctgacctcaagcaatcctctcatcttggtctcctaaagcactgggattatgggtgtgagccactttgcctgacctgagctcaaaactttagcacagatttttttaagtgaaagggaataccatttgtgagggtcatggatgattatttctgtcgtattttggtggattgtgttataaaacttcagtgtcaaaacctgtccactcgaaagtatgaagaatcatactgtctgaaattaggataattacaatgcagctgtcaaatgatgttaatggataaacataataatttatctatcaaaagatattttccctgtatttcgtgtgtggaggcattggttctcatgcttccatgagtgaaatgatttctaaacactgtttctaagatgtcagacaatatcctaaaatccgagaaacagtcatcatgagttaagtgcctgaaaggaattgatgctctccaatgtggtaactcaccccttaagatggtggaaagagaatttttaaacgttacttatcatttttcttacttattgacattcacccaacatgtctaggacacatactacgtactaaacattgcactgggtcctagacttactaagttgattagtatatggctcctacctctagagcttttcagagggtggcaactgttggtttctgtctcttagatgaaatgacatgtttataaaaatgcttatcacaagtaggtgcccaccgatagttgagtgctattctcttcacctcctttccttatgctttcctccttttgtcatttacatcttcttttagacttcctgcttctttctcctgacccccaaatttgtgaaatgaaaggacattggtataaagaacaataaggaggtgtcaaaattaataatcactgtagtattttaaattttttccaccttttttttttttttttttttttagagacatggtcttgctctgtcacctaggccgtaatacagtggcgtgatcctagctcacagcagcctccaactcctgggctcaagagatcctcctgcctcagccttctgactagctgggactacaggaatgtgctaccacacccagctaattttttaattttttgcagagatgacatctcactatattgcccaggctggtcttgaacttctagcctcaagcaatcctcccacctcagcctctgaacgtactggaattacaggtatgagccaccatgcctagcattacttttgatttaaaaaaatagattaatttagagcctagcaggaacccttgcaatcatcttgtctctgtcttctattacagatggagcaactgagattcttccccaactagactataagttctctgagggataaggaacatgtctggtttcctcatctctctgtcacagcaccctgtgaatgcctagaagacagtaagaatcaactgaatgtttgtagaaagaataacgatacttacctatagtctaaaggtttagtgatgaaatgaagtccactaacttctctctgcttacttccaccctcaataacatatttcctcaaaccccacagaggaaagacaattcattttttactattgtttaatagagccatgtttgtatgtagcttcctgttccgcttagcccaagacattaagtgggtcaggagtaaactctgccctctgtttttttccattcctttgtcacctgctcaagtggcagcccagagccgcttggcggcttccctgaagatgagcagagtgcagtagattaggcatggcctttctatctatttctactatggagaagctgaaaaagctatatggctggaaaaaaatcaccttggtactaatttgctattttacaatatttgaaaataaagacctgtggtcttccta

SEQ ID NO: 3785 - DNA, 337 bp, Homo sapiens
aatagacttataggccgggcgtggtggctcacgcctgtaatcccagcacttcgggaggccgaggcgggcggatcacgaggtcaggagatcgagaccatcctggctaacacggtgaaaccccgtctctactgaaaatacaaaaaaattagccgggcgtggtggcgggcgcctgtagtcccagctacttgggaggctgaggcaggagaatggcgtgaacccgggaggcggagcttgcagtgagccgagatcgcgccactgcactccagcctgggccacagagcgagactccgtctcaaaaaaaaaaaaaaaaaaaaaaaaaaaaaaagaattaatagac

SEQ ID NO: 3786 - DNA, 479 bp, Homo sapiens
  SITE (405): n equals a,t,g, or c
  SITE (428): n equals a,t,g, or c
  SITE (431): n equals a,t,g, or c
  SITE (440): n equals a,t,g, or c
gtcactgggggaaaagcatacagacatgtaaacaaatatatcatcagcactaaattaaaattcactaatataaattagtggtcaaagaaggagaaggaaatggaggaactgagaagttactgttgccatctctttgaattactgataataaattttatggtgagttttcatgagtttcctgcatgaagggaaaaaaaatgaagattgctgaactatagagggaagacattatagtcatagatattcatttactcattaaagattaaagggtgtgttatttcccaaacattgtactaggcactggggatgagagtaagaagatacagttcagtaggagaaccagagataattactctagagccttgaatctagttgctttgacctcttcaaaggttctgtcatctncttataagtattgagagagactntanaagggacanaatattaggacactactggatctttttaaaaaataaaaa

SEQ ID NO: 3787 - DNA, 480 bp, Homo sapiens
gtcactgggggaaaagcatacagacatgtaaacaaatatatcatcagcactaaattaaaattcactaatataaattagtggtcaaagaaggagaaggaaatggaggaactgagaagttactgttgccatctctttgaattactgataataaattttatggtgagttttcatgagtttcctgcatgaagggaaaaaaaatgaagattgctgaactatagagggaagacattatagtcatagatattcatttactcattaaagattaaaggtgtgttatttcccaaacattgtactaggcactggggatgagagtaagaagatacagttcagtaggagaaccagagataattactctagagccttgaatctagttgctttgacctcttcaaagtttctgtcatctccttataagtattgagagagactttagaagggacaaaatattaggaacactacttgatctttttaaaaaaataaaaa

SEQ ID NO: 3788 - DNA, 613 bp, Homo sapiens
caaggatctccagcccctgcagccacagactggtactggtctatggcctgttaggaactgggccgcacagcaggaggtgagctgtgggctagagctccacttcctgtcacatcagcagcggcactggattctcataggattgcaaaccctattgtgaactgtgcatgcgaggggggttgctcgcttcttatgagagtctaatgataaatgtaatgcacttgaatcatccccaaactatgcccccctcctccacttctccaggtctgtggaaaaattgtcttccacaaaattggtccctgatgccaaaaaggctgaggcactgatacacctttgaacttgacctgaatcctcttggttgcttatgtaactcagtaactatggtatatgtgagttaaagatacttttcttatgtttttagagccatgtgtttttgtatctgtgcattaaaatgctctgatatttttcagactattgtctgattttatgtaagatacatttgtttttctacagaagttttttgtcgttgttttttacttaattgcatttttttaacctttcctgtggtgctgaaaattgcaatattttttgaagttgaaatttaaatttaagaagt

SEQ ID NO: 3789 - DNA, 545 bp, Homo sapiens
gcagcaccaaggaatatagatggagaggaggctgaaaaggtagactgcttctgggtttaggtgaactttatatgctttgcacaagagttttgattttgtaagcaagacatcagaacacttttttaaaaatttgtttacctaattggttctgaagataatttatagaatctctatcactaatccaatagttagtacaatggacaattaagggttttttaaattttattctttttttaaagacagagtcttgctctgtcagccgtacaattataaattatagcccactgcagccttgactcttgggctcaaacagtctttccacctgagcctcctgagtagttaggactataggcatgcaccaccacgtttggctaatttttgaatttttttacagacgggtctcactatgttgcccaggctagtctcaactcctggcctcaagggaccctcctacctttgcctcccaaagtgttaggattactggcatgagccactgtggctggccagctatggtttttgatgtacagtacaatagaacataggat

SEQ ID NO: 3790 - DNA, 11119 bp, Homo sapiens
gcttaggctattgatttgaacccactattttttctaatgtaagtattccatgctataagtgtcctgctaaaccctgtttgtactgcatcctgtaaatatttatacatttcaattttgttcacttcaaaatatatttccccttgagacttttaataccttatttagaaatgtgttaattcccaagtatctgaagatttttttttcagttattgatttctagtttaattatattatggtctaacaatataaatttgttagggtttgttttatggataggatatgacggtctgcctggttgaatgttccagttgcagttgaaaagaacatgtattttcctgtttgggggtgaagtagtctataaatatcagctagatcccattatcttgtgatgttactgatttattttatattcctgctgattttcactctagtagttatatcaattactgagaacagagctttctagttagggagatgtgcgatgccaactctttgctgtttaatgcacagcaggcacggtcaaaagggcaagtgcctctccagtttctgaggccagagtggagggttgctgttgctctgatgtttgctcaatgcaaggtggagaaggttggtagctctctactacggtctctacagtgtctggtggggaggaagacaggtaccacatctgcttgtgttagtgcagggaggaacaggctatatggctctgcttacagttttggtagtctcctggtgggaaggaagggggacacctcagtagtacaggctgggaaaggttgtcagagctctatctcacaatttccctaacacccagtgggatagggtatcaccttgttagtgtgaggacggtcaacagggctctacctgtctccacagtgcttgatgggggaagggtaggtgtgctccctggttagtgtagggtgatgatactcaacaggactgtaccctccctcttcaccccacccttgccacctccccaccgcccccaccatcccccccaccccgccgccccgtttccacagcacctggagagaagtaaggtacagcttctttcatggtgttcacctagggttcagcaggtataaaaagattctgtcctgtagacctgtcctcccccagggctattggttacatagagcatgtttttcatgtttgttttttttttttccagtctgtgcatattgctgtttccagaacgcaggctcttttatggcccaggctggggtaataggaggtactaaagtacatggcgggtggagactcaagggagggtcatttttagaattttcagtgttttgataggtgctttttgtccactctttaattaccagaataaggtgggatgcttactctttcttgtctataactggatgcccctcactttgattttgaaagcttcattgaatatggaatctattctttcagaactttaaaaaggatgtttccatcttcataggtctgtttttttttctgctaagaagttagcagttattcttattggcccatttataatgtatttctttctgtggctttcaagatttgcttgttatttttggttttgtaaggatggctgtcttttgtttattgtgctttgggttcgtagagctgcttttatctgtgggttgatatttgtcttcaaattggaaaggttttgtatgatttcatcaatttgtttcatgccttaatctctcttatttctctgagttccaaatacatgcatgttagaatactttacctttttcataggcagctaaataactatttttttaaatcagtctcctatgttgctgtacctcaggttggctcgtggtgttttggtggggttgttctgttatgttgtgtgttgtttttgcctgacctctagttgattgtcaaatcagctgttaaacctagccaatgaatttttcatgttataccttgtatttttcagttccacaagtatatttctttgtatgttgagattccacctcccccatatctgttcattaattatgttcaactttaattccttgaacatatttatgtagatgttttatagtccttgtttgataattgtaccatctggatcagccctgaatctctgttaattttttctcctggttatgggtcacatttcctgcatctcatttgtagtagttttattgtatactgaacattgtggatgctgtggtctttagactccagattttattgcattcctttaaagagttttgaggttagttctggcagacagttaacttactggtgactaaacctgatcattttataagttctgttcaggcttttttggcctagtctgcagtaaatcttaaattgtggcctttcttaggtctgtgttattttcccttcctgagctttgttttagatccctaagttatttcacatattttgactaattttgttttctattatttatttatgggttttcacagcagaaggggaagtctggtatcagattttcatggccagagtggaagtagtgttgctatttttcatagcttcccagtcgattctgatgtgcattcaaagttaataactattctaatgtagggtttcttgacagctgcactgttgacatttgggagctgagctgttatttgttgtgggggtgctgtcctgtgatgtaggatgtttcgcatcattcctagtacttatctactaggtgtcaatagtatctcctcctagctgtaacaacccaaaatgtctccagaaattgctaaatgtcctctgtggggcaggatcaacccaggctgagaaccaatgctctatcacagtagattattgcattgccttgagccctttgctactcaaagtggggtgtgcagaccagctgtattggcatcatctggagcttctcagaaatacagaatctcaggtcatactcctagaccttttgaatgagatctgcattttaacaagttatgatgatctgtttgctttctaatactcgaagaataatgccgtagagcaggggtcagcaaaccttttcttaaaaggccagaaagaaaatattttcagtttactttccatacagtttttgtcagaactattcaacaatgccattgtagtgcaaaagcccacatagacaatacataaacaaattgatgtggctctgttccaataaaactttattcacaaaacaggcaactagccaagccaaattttggcaactcctgttatagactatcctaatcagaccccctcagtgtactgaagacaacaggtggttaaattctttgatgagtgccttgccatatgatgtcatttgctgatgttcaagagagattaagtgtatagattacacagtagatgattctggaaattatagtagcttgacttctatccttacctaagtggagatatctcccagccttgcacatgtgagctatatgtaaatgctgctcttactatgatttgatagcataattattatttgtattatgctttataggcccactggaataattattcacttattttgactttagttaataaagctgacaaacttatgaaaaactgcattaatgtgacttcgttagctcagaaagagtagtttaaaatgagttatttaactctaaagtgagtcatttaactctcaagtaattttttttcataggaaagctagtagtttttaaaacatcctttgttttatgtaggactcctttctgacacttccaaaactctgtatctagaaaggggagggctgtttgtttgaagggtggcagtttaaaggttgagaaggtagtagctattctgagaatgatggacagtgaacaagcttaaagtattttgctttgttttataaatttcttctcttctaagttagttacttgataaatggtgctgagggggcatgccagatgtcaccaaagcaaagcagaaaaactcgactttcagccagttaagtggtgatcaggaaactgattcctgggactttggccaacaggaatgatgaaaacatagaagtagctcccgaaacttgcataagtaaccagttaatttgttttatattaataccacttaatttgctttatattaatatctattcggtctatactggttcgtctgtatagctttccaagagacataacactatagctacccctgaggcagttttctttggctgtgtacagcctcatcctttgcccactgtacagtggacacttctcagttgccatggaatcagaaggtaaagaaagaatcacattaatgaccaaaatatttctaattatggctatcttacccccttaagattaagcccaattttttggttttgccaagaaaattcagttttcatattctatcctatttatttttagattataaattacttaagagatggcctactgacgtggtttaaaagaaccactcaaattatatccagatttgcttgttggatgtttataaactcttaaaaagtgtaaatctttaagatctttacctaaaaattacttctcaggaaaaataacacgcaaaaacttgatcttgtataacattttatttagcattcttacacactacacaaaataaatacttggataactcacgtctaacaaactaaactatatatgtattttttccataggaaagcacaaggagaagacagaaatatcaagagtctcaagaacctttgaatgaagtaaacagtttcccacaaaaaatcagctatacacaattcccaaactcattttatgagcctcatcaagattttaccagtccagatatattcaagaagtcaagatctccatcttggtataaatacacttccacagtcagcacggggatcacagacttagaaagttcaactggactttggcctacaatttcccagtttactcttagtgaagagacaaacgcagatgtttattattatcgcatcatcatacctgtccttttgatgttagtatttcttgctttattttttctctgaagatgataccaaaattccttttgataattttttaagtttccagctcttcaccgaaatgttgtattcttatttcagtgtttccttccagacatttttaaggtaattggctttaaaaagagaacatattttaacaaagtttgtggacactctaaaaaataaaattgctttgtactagaaatagtgtcatagaatagtgtcatagtacagtttggaaaacacttctgaagtttcagatcacctaggaaatctagaaaaggagtttaatgtttttgatcagagaatttgaaaaatagaaatacagagaatgagtttcaaaagttttagataaactgatatactatatagatctatcttctagaacatattactgaaagctaggcacattttatgagatgtgattaacaatttgcttaccttactacaatatggacattcaccaaatatgatgttaaaactctgtctactagttagtagtcctctcagccactgcaaattttaaaagataaaggagaagcgtcagcatgattacaaattacagatactccaaatgtcattccctttgtttttaagtgcattatgtttttattccagaagacttagcttaattttgttttgcaagagtaagggatgtatttcctgagccaatagcagactattaagatgttgagtaacaagggaaatcaacatggaattgaaggcctaaaccactggtttataaccagattatgggcccctttaagaatctgataagaattacgcattttctttatccccagaatagacatacataaaaataatgcatactaagttcctggcattcatagactttccctaaatccattaatcacaaattaacaactcctgctgttaaagatactacaggctcttgaaaatttccctcttagttctggtctgaatcactaacagtgggttaattttcaacccattgattataagcatgagccagtgaatttttaaaaattaaatgaatattcataattacaaaagaaatcacatgttcccttagagtatttctgtaatttgacctgtatttctgtaatttcatgattttatataaggtaaatagatgcctctgcctaagttctccattggcaaagtacagacggcaccaactgctacctctaatcacaaaagtaaagatgtgatattaaggaagactgaaaccgaaggcaacatacaattgcaaggtgttctgtatatagttacacacagtttatcatgtatcaactaggccctaaggtgaagccaggcactaaagacaggaatgaaagtagacttcacatacagtaagtaaagtggcattgcctgagtgctgtgagactcagatcacaaaaggcattcttctcaacatgaaaagtagtagtattggatatattctattcttaaatgcagcctgaaaagtaatagatactacatagtactaatttcattttcactgtattactgccactttcaaccacctccacctcgggtaaacctatgaagcttacattgtggtaacaaggaatttatagaaagattccaatgtaccatcaatttaatttgttatgtgtcaataagctagtccatgaatatattctggatagattttctcccttggatacttcagaacatttctccactcattagtaactgtgatgaagaaatgaagcacataagcatctggaataaactggtaaaaggagttaatggcaaaagagaggatcactattgactcaacagattttagattctgtgtatttcaaacaggaatacttcctatgttgtgttagcggaaaaaagtcttgacaatatttttattttttacctcatataagcatatttgatggaaaggttgtccacactgggaattatcacacacttgatcaggaatggtaccgtcaagttgataagcataacaaattccacaatccatagtaaaatccttcaaaagaaaaatatttataaaaagcgtatgtgtctcactaacttattcgttgtacatatttgggagggtatgtgtgatattttgatacatgtatacagtgtttaatgatgacatcaggataattaagatattcatcacctcaacatttaccttttatgttgggaacattacaattcttctaactactttagaatacgaaatcatctatgtgtttaaaacacaaggtaagatcaggaagaatgttttataaatatagtttttataaaggtgactatattgctgtattataggaaatataattacattactatttaacacctagcaaagctattgtagggtgtttccttttccactcaaatatacacagctaggctaaaaaaagagattccatttttggctggcaagttgtttgggcatcagtaatattcccatatcatacattgttataatgtccctgatagtatttaaagaaaggaattgatattagctagtgattactaaacagcacaattctgtaactaaaggaaaaagaaactcactaccatttagtagtctacaaccttagcagccttgtcaaaaatcaattctattatttttgcagtatagtggtatctattcaattttgagaaactataactgcttcacaaacacttacatcaagctaatcagtatttgagccatccataaacagactatgtagaaaagccaaacatctcattagctactttggagttctccccttatttttaataaatgtctgtcattaatgacgtcactactgaagaccatgaaaaaagtatatagttgacccttgaacaacatgggtttgaactgcacaggtctacttatacacagattttttttttaaccaaatgcagatcaaaaatacagtactgacaagatgcagaacctgtgtttatgtgaaatctctgtatacagagggccgacttcttctatatatgggtcctgcagggtaactgtggaactttaatgtctgtggatttttgtatccatgggcagccctgaaatcaatccccctgttccaagagacagttgtacttaacaaccaatcaaaggtaaacaagttttttgatgcagatcagaagtctgtgttataatatttttctaattccctcctttttcagcctcatttttcactgagagaagcatttaaacttcattatgcaatactgtctggaatatcaaaacactgataaaacttacagatttttccaggatagcacgagctggaaaatcaatttctaaaacatctttcaaattttgtaacacactattttctggatccctgaaagcatggggaaaaaaattatgctgtgaactttgtaaaatcaccaaaaagtaaaaattatattgccaaggtacctaccacaaatgtatgttcctgctcagcttaattcccaggggttttaccacttcagattaaaaaaaaaaaatttaataattgcatgctctactcttggtttctaaagccacatttgatacagaatgtttcttaactacttgattagaaaatcaaaattatatgtattatgttaaaaaacaaaattatacagttcagaatgctgagacattgtcatttaaaataactatcattattgcggtgaaccgagatcgcgccattacactacatactgggcaacaagagcaaaactccgtctcagacaaaaaataaaaactaccattaatatactaatattgtctaataatttaacaatgctaggcaaggattttatgactctattaaaaaacgtttaaatctcagatgtcataccatggtcagctccaagaaagaagcactcaggaagcatagtaggatgcctggggtctacctctatatttatggaaacattattacctagaatgaaacaagattaaatcttttagaagtagaacagctcatcaaacaacccaataaaaaataaagaggtgttggtctggctacctatttcactgtatacccacggaaagattaaccaaatgttttgtagttttatgtaatggtaaatataattgaaccaaaagaagtaattttgatatgattatcattgaaaggatcttaaatttcagccagtcaacaaattgatatatttaattagattgcaattctggtcaactgtattaaagtttaaataaaaatgttctgtggagtgataaaggtctttaatatcaaaactatcacaagtcacatgtttaagaaataactatctaaattatttttcatggctttcctgaaaaagtttacatttcatagaactatggccaaatgtaaaaagaccaacaatacagtaaatggtaaaaacaaacattaaagattcaagttttataaaaatttataaaaacattttctgtattattttgctgcatgtgaaactttcccttataatttaacaaaagatttcattcacattggcaattgttcattaataaccaaaacaataagtaacctaatttcgcaagacctaagaaaattggcactaggttcttttatacattttaactgtactggactacagcgtaagtttcagaaattttacttctattttttgaaggtacatagtgtaactgcttaagatcaatttggatttcattttcatcgtaaaaatgtcttgataaattccatacactgtagaataagcctttcactaaggctggcatcaacataaatgcagttattgcatatctggcaaaaagaggtcattaacagaaaaaaatgactagccattcaatgagacaaataaaaatacaaaaagttataatctcatttggtaacactttatttactatgaacagaaatttcttattagccctcaacactgtcatctggtaatggctccagacagtactttcacgtaatatgggcatattaactaatttttccaatcacttgttcaaaacttggtcttaagaaagcaaatcatgcctggaggagaaaaaagaagctaaaaggtaaatagggaatgaattaaaaactagactatgtatgctgaatgagaaatatagtaagtatatttaatcataacctgataattactttaatggggccacgaaaataatgatttactacatttctttgaagaaaatattttcattcttagtatctacttgttcacaaatataccataatttggttaattgttccaaattaaacacagttagactttttgaaaccaggaaagtaccaatactatttgtagaactgctgtaaactatactttcttctcgtaataccacgtatgtgacattcttcccccagataatctatattatacctaggtataaagtataaaaattgctcactaacttggatgtgattcacatcagaatttcaaaatacccttgaacaacatatctatttagaaaaaaagaaatgggtatcttaaaactagctatggtatttaatgtgagcttaaatatagtttatctaaaatcttgagaaaggctgaagtcacatgttttgcttgcttataatgaaaatacacagccattttatagtcgagaacatgataacattgcacaggtatttatgattataccatatctcattcataaatttcatatacttgtgaagaaaatacttaaaactataaattctttctctgtgctttctgtttactcttcagtggcatggtctactgcaagttcttttatcttcctctgtatttctaacagaaaatattcccagatctgagcacactaatctgagaagattgtaagcttcacaaatgaagactgcattattctgacttttttcttgttctaagtaatgtaaattttgagttacctgttccacgattcctgtgctaattagcagctaattaaactctacttctgaatgttacctccattggatcatcaccttttataatgaaacacctcagtacttctccttttcacctaaaatatttacatttaaatgtgtagccaaaaaaaagtttatactagaaaattttaatagttgacttcatataaagaagtctgagtccaactgtcactgttagatttttcataatacaaaataaaacacctaaaaacaaacccttaatcctccttgtccctacctaatgcaattctgcgtgctgttgcactccgtggaggtttttctggctcaagtacccaggtcttctcatcgatttcatccataacatcccagaatgcctttagtgattctattgctgccaaaaactgactataaatgcttattaaggagctctgtgaaaaaa

SEQ ID NO: 3791 - DNA, 11121 bp, Homo sapiens
gcttaggctattgatttgaacccactattttttctaatgtaagtattccatgctataagtgtcctgctaaaccctgtttgtactgcatcctgtaaatatttatacatttcaattttgttcacttcaaaatatatttccccttgagacttttaataccttatttagaaatgtgttaattcccaagtatctgaagatttttttttcagttattgatttctagtttaattatattatggtctaacaatataaatttgttagggtttgttttatggataggatatgacggtctgcctggttgaatgttccagttgcagttgaaaagaacatgtattttcctgtttgggggtgaagtagtctataaatatcagctagatcccattatcttgtgatgttactgatttattttatattcctgctgattttcactctagtagttatatcaattactgagaacagagctttctagttagggagatgtgcgatgccaactctttgctgtttaatgcacagcaggcacggtcaaaagggcaagtgcctctccagtttctgaggccagagtggagggttgctgttgctctgatgtttgctcagtgcaaggtggagaaggttggtagctctctactacggtctctacagtgtctggtggggaggaagacaggtaccacatctgcttgtgttagtgcagggaggaacaggctatatggctctgccttacagttttggtagtctcctggtgggaaggaagggggaccacctcagtagtacaggctgggaaaggttgtcagagctctatctcacaatttccctaacacccagtgggatagggtatcaccttgttagtgtgaggacggtcaacagggctctacctgtctccacagtgcttgatgggggaagggtaggtgtgctccctggttagtgtagggtgatgatactcaacaggactgtaccctccctcttcaccccacccttgccacctccccaccgcccccaccatcccccccaccccgccgccccgtttccacagcacctggagagaagtaaggtacagcttctttcatggtgttcacctagggttcagcaggtataaaaagattctgtcctgtagacctgtcctcccccagggctattggttacatagagcatgtttttcatgtttgtttttttttttttccagtctgtgcatattgctgtttccagaacgcaggctcttttatggcccaggctggggtaataggaggtactaaagtacatggcgggtggagactcaagggagggtcatttttagaattttcagtgttttgataggtgctttttgtccactctttaattaccagaataaggtgggatgcttactctttcttgtctataactggatgcccctcactttgattttgaaagcttcattgaatatggaatctattctttcagaactttaaaaaggatgtttccatcttcataggtctgtttttttttctgctaagaagttagcagttattcttattggcccatttataatgtatttctttctgtggctttcaagatttgcttgttatttttggttttgtaaggatggctgtcttttgtttattgtgctttgggttcgtagagctgcttttatctgtgggttgatatttgtcttcaaattggaaaggttttgtatgatttcatcaatttgtttcatgccttaatctctcttatttctctgagttccaaatacatgcatgttagaatactttacctttttcataggcagctaaataactatttttttaaatcagtcttttatgttgctgtacctcaggttgggtggtggtgttttttttgttttgttttgttttgttttgttttgtttttgcctgacctctagttgattgtcaaatcagctgttaaacctagccaatgaatttttcatgttataccctgtatttttcagttccacaagtatatttctttgtatgttgagattccacctcccccatatctgttcattaattatgttcaactttaattccttgaacatatttatgtagatgttttatagtccttgtttgataattgtaccatctggatcagccctgaatctctgttaattttttctcctggttatgggtcacatttcctgcatctcatttgtagtagttttattgtatactgaacattgtggatgctgtggtctttagactccagattttattgcattcctttaaagagttttgaggttagttctggcagacagttaacttactggtgactaaacctgatcattttataagttctgttcaggcttttttggcctagtctgcagtaaatcttaaattgtggcctttcttaggtctgtgttattttcccttcctgagctttgttttagatccctaagttatttcacatattttgactaattttgttttctattatttatttatgggttttcacagcagaaggggaagtctggtatcagattttcatggccagagtggaagtagtgttgctatttttcatagcttcccagtcgattctgatgtgcattcaaagttaataactattctaatgtagggtttcttgacagctgcactgttgacatttgggagctgagctgttatttgttgtgggggtgctgtcctgtgatgtaggatgtttcgcatcattcctagtacttatctactaggtgtcaatagtatctcctcctagctgtaacaacccaaaatgtctccagaaattgctaaatgtcctctgtggggcaggatcaacccaggctgagaaccaatgctctatcacagtagattattgcattgccttgagccctttgctactcaaagtggggtgtgcagaccagctgtattggcatcatctggagcttctcagaaatacagaatctcaggtcatactcctagaccttttgaatgagatctgcattttaacaagttatgatgatctgtttgctttctaatactcgaagaataatgccgtagagcaggggtcagcaaaccttttcttaaaaggccagaaagaaaatattttcagtttactttccatacagtttttgtcagaactattcaacaatgccattgtagtgcaaaagcccacatagacaatacataaacaaattgatgtggctctgttccaataaaactttattcacaaaacaggcaactagccaagccaaattttggcaactcctgttatagactatcctaatcagaccccctcagtgtactgaagacaacaggtggttaaattctttgatgagtgccttgccatatgatgtcatttgctgatgttcaagagagattaagtgtatagattacacagtagatgattctggaaattatagtagcttgacttctatccttacctaagtggagatatctcccagccttgcacatgtgagctatatgtaaatgctgctctatgatttgatagcataattattatttgtattatgctttataggcctactggaataattattcacttattttgactttagttaataaagctgacaaacttatgaaaaactgcattaatgtgacttcgttagctcagaaagagtagtttaaaatgagttatttaactctaaagtgagtcatttaactctcaagtaattttttttcataggaaagctagtagtttttaaaacatcctttgttttatgtaggactcctttctgacacttccaaaactctgtatctagaaaggggagggctgtttgtttgaagggtggcagtttaaaggttgagaaggtagtagctattctgagaatgatggacagtgaacaagcttaaagtattttgctttgttttataaatttcttctcttctaagttagttacttgataaatggtgctgagggggcatgccagatgtcaccaaagcaaagcagaaaaactcgactttcagccagttaagtggtgatcaggaaactgattcctgggactttggccaacaggaatgatgaaaacatagaagtagctcccgaaacttgcataagtaaccagttaatttgttttatattaataccacttaatttgctttatattaatatctattcggtctatactggttcgtctgtatagctttccaagagacataacactatagctacccctgaggcagttttctttggctgtgtacagcctcatcctttgcccactgtacagtggacacttctcagttgccatggaatcagaaggtaaagaaagaatcacattaatgaccaaaatatttctaattatggctatcttacccccttaagattaagcccaattttttggttttgccaagaaaattcagttttcatattctatcctatttatttttagattataaattacttaagagatggcctactgacgtggtttaaaagaaccactcaaattatatccagatttgcttgttggatgtttataaactcttaaaaagtgtaaatctttaagatctttacctaaaaattacttctcaggaaaaataacacgcaaaaacttgatcttgtataacattttatttagcattcttacacactacacaaaataaatacttggataactcacgtctaacaaactaaactatatatgtattttttccataggaaagcacaaggagaagacagaaatatcaagagtctcaagaacctttgaatgaagtaaacagtttcccacaaaaaatcagctatacacaattcccaaactcattttatgagcctcatcaagattttaccagtccagatatattcaagaagtcaagatctccatcttggtataaatacacttccacagtcagcacggggatcacagacttagaaagttcaactggactttggcctacaatttcccagtttactcttagtgaagagacaaacgcagatgtttattattatcgcatcatcatacctgtccttttgatgttagtatttcttgctttattttttctctgaagatgataccaaaattccttttgataattttttaagtttccagctcttcaccgaaatgttgtattcttatttcagtgtttccttccagacatttttaaggtaattggctttaaaaagagaacatattttaacaaagtttgtggacactctaaaaaataaaattgctttgtactagaaatagtgtcatagaatagtgtcatagtacagtttggaaaacacttctgaagtttcagatcacctaggaaatctagaaaaggagtttaatgtttttgatcagagaatttgaaaaatagaaatacagagaatgagtttcaaaagttttagataaactgatatactatatagatctatcttctagaacatattactgaaagctaggcacattttatgagatgtgattaacaatttgcttaccttactacaatatggacattcaccaaatatgatgttaaaactctgtctactagttagtagtcctctcagccactgcaaattttaaaagataaaggagaagcgtcagcatgattacaaattacagatactccaaatgtcattccctttgtttttaagtgcattatgtttttattccagaagacttagcttaattttgttttgcaagagtaagggatgtatttcctgagccaatagcagactattaagatgttgagtaacaagggaaatcaacatggaattgaaggcctaaaccactggtttataaccagattatgggcccctttaagaatctgataagaattacgcattttctttatccccagaatagacatacataaaaataatgcatactaagttcctggcattcatagactttccctaaatccattaatcacaaattaacaactcctgctgttaaagatactacaggctcttgaaaatttccctcttagttctggtctgaatcactaacagtgggttaattttcaacccattgattataagcatgagccagtgaatttttaaaaattaaatgaatattcataattacaaaagaaatcacatgttcccttagagtatttctgtaatttgacctgtatttctgtaatttcatgattttatataaggtaaatagatgcctctgcctaagttctccattggcaaagtacagacggcaccaactgctacctctaatcacaaaagtaaagatgtgatattaaggaagactgaaaccgaaggcaacatacaattgcaaggtgttctgtatatagttacacacagtttatcatgtatcaactaggccctaaggtgaagccaggcactaaagacaggaatgaaagtagacttcacatacagtaagtaaagtggcattgcctgagtgctgtgagactcagatcacaaaaggcattcttctcaacatgaaaagtagtagtattggatatattctattcttaaatgcagcctgaaaagtaatagatactacatagtactaatttcattttcactgtattactgccactttcaaccacctccacctcgggtaaacctatgaagcttacattgtggtaacaaggaatttatagaaagattccaatgtaccatcaatttaatttgttatgtgtcaataagctagtccatgaatatattctggatagattttctcccttggatacttcagaacatttctccactcattagtaactgtgatgaagaaatgaagcacataagcatctggaataaactggtaaaaggagttaatggcaaaagagaggatcactattgactcaacagattttagattctgtgtatttcaaacaggaatacttcctatgttgtgttagcggaaaaaagtcttgacaatatttttattttttacctcatataagcatatttgatggaaaggttgtccacactgagaattatcacacacttgatcaggaatggtaccgtcaagttgataagcataacaaattccacaatccatagtaaaatccttcaaaagaaaaatatttataaaaagcgtatgtgtctcactaacttattcgttgtacatatttgggagggtatgtgtgatattttgatacatgtatacagtgtttaatgatgacatcaggataattaagatattcatcacctcaacatttaccttttatgttgggaacattacaattcttctaactactttagaatacgaaatcatctatgtgtttaaaacacaaggtaagatcaggaagaatgttttataaatatagtttttataaaggtgactatattgctgtattataggaaatataattacattactatttaacacctagcaaagctattgtagggtgtttccttttccactcaaatatacacagctaggctaaaaaaagagattccatttttggctggcaagatgtttgggcatcagtaatattcccatatcatacattgttataatgtccctgatagtatttaaagaaaggaattgatattagctagtgattactaaacagcacaattctgtaactaaaggaaaaagaaactcactaccatttagtagtctacaaccttagcagccttgtcaaaaatcaattctattatttttgcagtatagtggtatctattcaattttgagaaactataactgcttcacaaacacttacatcaagctaatcagtatttgagccatccataaacagactatgtagaaaagccaaacatctcattagctactttggagttctccccttatttttaataaatgtctgtcattaatgacgtcactactgaagaccatgaaaaaagtatatagttgacccttgaacaacatgggtttgaactgcacaggtctacttatacacagattttttttttaaccaaatgcagatcaaaaatacagtactgacaagatgcagaacctgtgtttatgtgaaatctctgtatacagagggccgacttcttctatatatgggtcctgcagggtaactgtggaactttaatgtctgtggatttttgtatccatgggcagccctgaaatcaatccccctgttccaagagacagttgtacttaacaaccaatcaaaggtaaacaagttttttgatgcagatcagaagtctgtgttataatatttttctaattccctcctttttcagcctcatttttcactgagagaagcatttaaacttcattatgcaatactgtctggaatatcaaaacactgataaaacttacagatttttccaggatagcacgagctggaaaatcaatttctaaaacatctttcaaattttgtaacacactattttctggatccctgaaagcatggggaaaaaaattatgctgtgaactttgtaaaatcaccaaaaagtaaaaattatattgccaaggtacctaccacaaatgtatgttcctgctcagcttaattcccaggggttttaccacttcagattaaaaaaaaaaaatttaataattgcatgctctactcttggtttctaaagccacatttgatacagaatgtttcttaactacttgattagaaaatcaaaattatatgtattatgttaaaaaacaaaattatacagttcagaatgctgagacattgtcatttaaaataactatcattattgcggtgaaccgagatcgcgccattacactacatactgggcaacaagagcaaaactccgtctcagacaaaaaataaaaactaccattaatatactaatattgtctaataatttaacaatgctaggcaaggattttatgactctattaaaaaacgtttaaatctcagatgtcataccatggtcagctccaagaaagaagcactcaggaagcatagtaggatgcctggggtctacctctatatttatggaaacattattacctagaatgaaacaagattaaatcttttagaagtagaacagctcatcaaacaacccaataaaaaataaagaggtgttggtctggctacctatttcactgtatacccacggaaagattaaccaaatgttttgtagttttatgtaatggtaaatataattgaaccaaaagaagtaattttgatatgattatcattgaaaggatcttaaatttcagccagtcaacaaattgatatatttaattagattgcaattctggtcaactgtattaaagtttaaataaaaatgttctgtggagtgataaaggtctttaatatcaaaactatcacaagtcacatgtttaagaaataactatctaaattatttttcatggctttcctgaaaaagtttacatttcatagaactatggccaaatgtaaaaagaccaacaatacagtaaatggtaaaaacaaacattaaagattcaagttttataaaaatttataaaaacattttctgtattattttgctgcatgtgaaactttcccttataatttaacaaaagatttcattcacattggcaattgttcattaataaccaaaacaataagtaacctaatttcgcaagacctaagaaaattggcactaggttcttttatacattttaactgtactggactacagcgtaagtttcagaaattttacttctattttttgaaggtacatagtgtaactgcttaagatcaatttggatttcattttcatcgtaaaaatgtcttgataaattccatacactgtagaataagcctttcactaaggctggcatcaacataaatgcagttattgcatatctggcaaaaagaggtcattaacagaaaaaaatgactagccattcaatgagacaaataaaaatacaaaaagttataatctcatttggtaacacattatttactatgaacagaaatttcttattagccctcaacactgtcatctggtaatggctccagacagtactttcacgtaatatgggcatattaactaatttttccaatcacttgttcaaaacttggtcttaagaaagcaaatcatgcctggaggagaaaaaagaagctaaaaggtaaatagggaatgaattaaaaactagactatgtatgctgaatgagaaatatagtaagtatatttaatcataacctgataattactttaatggggccacgaaaataatgatttactacatttctttgaagaaaatattttcattcttagtatctacttgttcacaaatataccataatttggttaattgttccaaattaaacacagttagactttttgaaaccaggaaagtaccaatactatttgtagaactgctgtaaactatactttcttctcgtaataccacgtatgtgacattcttcccccagataatctatattatacctaggtataaagtataaaaattgctcactaacttggatgtgattcacatcagaatttcaaaatacccttgaacaacatatctatttagaaaaaaagaaatgggtatcttaaaactagctatggtatttaatgtgagcttaaatatagtttatctaaaatcttgagaaaggctgaagtcacatgttttgcttgcttataatgaaaatacacagccattttatagtcgagaacatgataacattgcacaggtatttatgattataccatatctcattcataaatttcatatacttgtgaagaaaatacttaaaactataaattctttctctgtgctttctgtttactcttcagtggcatggtctactgcaagttcttttatcttcctctgtatttctaacagaaaatattcccagatctgagcacactaatctgagaagattgtaagcttcacaaatgaagactgcattattctgacttttttcttgttctaagtaatgtaaattttgagttacctgttccacgattcctgtgctaattagcagctaattaaactctacttctgaatgttacctccattggatcatcaccttttataatgaaacacctcagtacttctccttttcacctaaaatatttacatttaaatgtgtagccaaaaaaaagtttatactagaaaattttaatagttgacttcatataaagaagtctgagtccaactgtcattgttagatttattttcataatacaaaataaaacacctaaaaacaaacccttaatcctccttgtccctacctaatgcaattctgcgtgctgttgcactccgtggaggtttttctggctcaagtacccaggtcttctcatcgatttcatccataacatcccagaatgcctttagtgattctattgctgccaaaaactgactataaatgcttattaaggagctctgtgaaaaaa

SEQ ID NO: 3792 - DNA, 274 bp, Homo sapiens
aaaatgtaaagtcacatactacaaacgttttcaatctgaaataactggccacaccaataatttaagaatatgatacaccctaagatgaaaagaaactagctacttccttaaacatgtattttatacctaatacttaaggaaaacccatcccattttgtcacttcagtcaaggtttacacttggatgaattcatgctcagttccactgtgctggattcaactgttctaaccttctacacatatttttttaaaaagtgggccaggtgcagtggctc

SEQ ID NO: 3793 - DNA, 274 bp, Homo sapiens
aaaatgtaaagtcacatactacaaacgttttcaatctgaaataactggccacaccaataatttaagaatatgatacaccctaagatgaaaagaaactagccacttccttaaacatgtattttatacctaatacttaaggaaaacccatcccattttgtcacttcagtcaaggtttacacttggatgaattcatgctcagttccactgtgctggattcaactgttctaaccttctacacatatttttttaaaaagtgggccaggtgcagtggctc

SEQ ID NO: 3794 - DNA, 7045 bp, Homo sapiens
aagtacccgtgtcttcaggtgtttgtgaacctcagccatccaggtcagaaagctctcctacattataatgaagaggctgtccagataaatcccaaggtattgtaaagtttaaagagttcttatgacagcaacccttccctgccagactgtccctagcagggtacataaataacccagggctgtctttagggataaatctatttttttggagtgaacatttttatagtgatcaaatcaggataaatgaagctttcttcttggtggagaaatggggtatatagaaaggagagaaattattccaatttcacaacttggtgtctggaatttataggctgagccaatgagtagtcatttgtggggagtctttcttttggagattccactccgcgccatatgacatatgctacagtgtactcacagtctcccttgaatcaagtaatttttcttatcaaataaatgtaaagattatttttattttagtaagttacacaatgggttcatatgatttaacgaattatagaaatgatccctgaaatagtctttcatatgatttaaaatttatatttatacctaactataaaagttgagttgtgttagattagttgacatgttacattttattgtctttaagcatcaatttcaatccgatgacttttgttttctgtttgggatgcaatgatttttaagatttcaaacagtttttggcctttagcacagtacctcaagtacctaatggatatggtaataaacctcaagcttttttgaaaaaagtcaccagctgacagagctcccttctccactggttctgtctcccaggaaccaaagtccaggtggggctccctctctgtgagtctagagcaaaagcctcaacgtgcttttcttcagggtgatattttgctacaggagatcaagacagagacaacagaggcattactaagcgttgaaagctcatagtgaggcccaatacatttttgttcaatggacaaacggattcatactgtccaagagtccaagaacctgcatgtagggaggagtcatattccttatgaagttggtcactgactctcctgcaatgtcatataactaagaattctcttccacatccttgcttaatgactggaaatggccatttcactgtggccctccaatcaaccctttcccatgagctatgtaatattttaccaccttctaagattgaaactgcccactaataacttcagcctgaagctatttcataattaaaaactgttaagtatttggtattggtgacagtgcctttatctttttccctcttccatattcctagtgcttttacacacctaagtgccaccaagatagaaatgatttgctcaacagtgctctggacataaaagaattcttcgatcacaaaaatggaacccccttttcatgcttctacagtccagccagccaatctgaagatgtcattcttataaaaaagtatgaccaaatggctatcttccactgtttattttggccttcactgactctgctaggtggtgccctgattgttggcatggtgagattaacacaacacctgtccttactgtgtgaaaaatatagcactgtagtcagagatgaggtaggtggaaaagtaccttatatagaacagcatcagttcaaactgtgcattatgaggaggagcaaaggaagagcagagaaatcttaagacggtggccaaattaaagtgctggccttcagatgtctgtgatttctgcaactgaggacctaattatgcctgtctgcaaactaataatgtaaaaggtaataattaaagtatcatattttcatgtgggaaaaaatttaaaagcctcattttgtattctatttatttctataaatacatacaaattcaccatcttttctaatcccaatctctttccaaatgagctaaggaagcactgttttttttcctgtatagcaaaatgagttcaagatattctttgcctaatttcagctctagctagaaccagtcaatatggaaataaacaatgagggtatctaatctactgaacactgaaccatcagcctaactctatgcaatatagtcatactaaaatatttctcataaaaaagttcttaacagtttgttcactatacaaagacaaaaatctggtagaaaacttaagaaaacatggagctaacatatttattatagtttttttttttttcctttttgagatggagttttgctcgtcgcccaggctggagcacagtggcacagtcttggctcactgtgacctctgcctcctgggttcaagcaattctcttgcttcagcttcctaagtagctgggattacaggtgtgcaccaccacgcccagctaatttttgtatttttagtgtagacagggtttcaccatgttggtcaggctggtcttgagctcctgacctcaggtgatttgcccgccttggcctcccaaagtgctgggaatacaggcatgagccactgcgcttggctttagtttgttctttaccagtctagacagcagaggaaagctgctgcctagaaaattcactaagtttagagttactagtatttagccttgtcatgtaccatgtaatttttctttcagtaacatttttctagttaattaagcttttcataagctcatttcactttgtgcactttctggtgggaaaaatgggccagaaatatgaagaagctatactggattttaacattcatctcagatgatccacatcgtattaggctggtgcaaaagtaattccagtttttgctgttaacttttaatggcgaaaaaccgcaattatttttgcatcaacctaatagaaaagaagtcccacatggatagtcaacaattgtctgtactttaattaatgaatcaaccatggttattaaatgatgtcataaggctctcaacaaatgctttccaggttgattaagccgaatctatgagtggaaaagagattttggtctgattttccaaagtgcctcaaagtatctttaaaattttattatactcaaaaatcttaaattatggacagtggaatgagacatttgaagctacttttgtatgtagatgtaatcaaacaaaaaactgattctaagtcagtttaatcccttttagcaattaatttcgacacatattactaaattagctgaatacagcaatattgacttgatgagtaatgaataatcttggtgttttcctttctagtgtgcaatggtggaaagaacatgtgtctcagagtaggatttatttgactttgtaggccataattacaactttgggcaaataagctaacctgtgtaaacctttcttttctcatctataaaatggggataacccgttctttcacgcagttgttattttatggaataagcaaagtagggcaggtgaaactttagcttagcttctagcatctagtagcagtgctcaaaaatgttagatcatttatttaaaaatctgctaggttataacattcagtgagccttggtacttttcactggacagctggtatagaggctagggatagggagctgcagttcattttccatgcccctacctgagttctcttggctaaatgtgatacgcatttaaggcccagaacctgctgtttaaaaggttgtggtaaactattttgtataccaaagacttctctgtaataaagtatgtaagtacacatgaacatttgatgtgcacgcacattttaaatcatctgcacattgagattctacacttttctcaagggcacatctctattccgtttttgtaaatttgacttctacctaacaatatgcagttgctgggatttttttttccctaacaaattcaaaactgctaatttaaaatataaagcgtgtgtttcaattaccacagttttccatttagataggagctacctgattcattccagcaaagagagagattatccctggagaacaaagtcaattcaaaattatttaaaccatttggcaaataaataaaatttaagtaattatttgcttaattgctcagaaatactaagttgttaatgcctatgtgcattaatggtcaaagaaaagcccacacttaccttttgcaatgtttatgagaactgaaagcaaaaccagtttgcttctagcctaacttcatttctaggttctgatcttcaaacgacttggaaaaaagtctacttacctattgcatatacatacatacattcatacatatatgtatatacatatatttcttaaaatacaagcatataattctttatgcttaaaggaagtaaatatttaaacatacattcctttaatattcatcactttactggggtagaaaaattggcttttaaggtataatagtttcagattttcaatcaagtattcttagtcattactgaaaagaactcaaattcagctaaattttgattattagcaacaccggcttgcttttcaaaaggaatggcaaaagagaattatcacagttttttgcttatgtagtacactaaggattgtttggacacaaaaagtaatttttctttttttttttaataaacagcgtgatgttacagactgcagagttaaagaaaagcagacattgacagtttctgatgagcataaacagtaagtgcagtcacaggccaaacttcttgctaggaacagcaagactgggaagaggtcttaaatttagtgatactgttattattctatattctcaatatagtaacacatgcatcttgctgtgtcaaatgctttctgggccatcattaaaaggacattaaaaacgtttttcttctaatgaatgcagtataccacaggacttcaattcactgaatgacaaaatatagagaaataaacttgctacaattaatggggccaaaagggtggttcgaatttcttgataaagcttccaggtgaacatctgacgtgttagtagtcttcttttggtagtgccacattccccaaggtattaaaatgttatgctccaaaagggtatattcttttagattttattcaacccaattaggtctgaggactgaatcacactgaaaccattaacttcatttgaaactcaaaacatttttgaaatcagatgaaggccaagttctccaacctctcttaggaacataagttaaattgaacaagggacttttaaaaatgaaataaaaacaaaattaaataaaaatgaaataaatagataatgattttggaaattcatactagaattaagtttagtctaattatattttaatatgaaacaatgaaggttttctgcctccttgccaacctagaaaaattgacaaaaataagaatacctaaaagtatacatggttcttagcataaccacaaaattattatagtgacagattaaataaggttgcagatagattcatagactttaactggctaaaaaaatacatttaaaaaccttttctgtacttacctacatgaggaatggagtatactgttggtagaaaaatcatttacctaactactgtatacgcacaagggactaatttttttcctccactaaaactcttatatgtagttgtgtacaaattaagtcagaaaatttcctcatggctcacacctgtcactttatgctaactagcaaggctggaatattaacatacctaaaatcaagcagaagaaatggcactgcactaataaaaaggaggtgcaaaaccttaagtggaataggtgcatgaagtttatttaaagactaacatcccaacttgggaaactcctaataaattctaaactcttccgaattttagaaccttgatatttctttacaccttttataaaagatgcctcttgactagggctaagcaagcagtgtgtacacaaacagaattgtgtgcaagtatacacacaccaaatgcactaataatgaagaagagagaacaaaatgaatttcaaatgccgaattcgggaacctcctcaaactattgcctttttcaaatggctggaccaacgattaaacttcagccaagtttttttcttaaggtcttccatatcattaaaaacaaggcatgccaactctgactttataaatctaaaattcagtgatctgcacagtttctgagcttgaagtattgaattgtgactcatctatttttttttcccattttccttctgaggtagagttaccaatccaattttatcaggaccacagatattttgagctaaaccccatgatcttttcatacagtaaaaataatttttatgaaaaaagaaagcaggcttcccaggccatggcacatagatatatttacaatttttaatgtaataattaaaaatggtattgtttatattttaaaaaacagcccagctgtattattctgtcaccaagaattattaattgaggatgctgtcaatgctgaattttatagttcagccttcacaatcccatccatgatgaagagttgattctcttacggtatacaatatactctcacaactttcagccttctcttaaagacatgccccaaatgagcaggatggatataaagaatgtaattcattcaaacaactcctccctgttctgccccctcccctcacattcccctcttctcaaaaacatctgaagtatgaaagttgtctttaaatagtaaaagcaccacaatctattaacaccacatattatctttaaacttaaatattttagtgatgtcttggacatcaaaataatttcttaaggtggactcttgagtatgtgggtccagcccaggtctgcagtttgtgcagacatagaaaaaagaggaactttaaatattcagaaaaagttaacaggctagctttaaaatactgctggaaattaaatttcttcagagttggcaagcatgggctattgatcaaagtatgaattaaacggatttacatcattaagaaaaaacaaatccgtgttattgtgctgtgaaatttccatgatgcctttcaaataggctgctcacaatttttttataattccaaatcactcgatttttgatggaaaaaagaatacagatggactgtgttttacctatgtgaaagtcaccaatccatttaaaataaaatccaagagggcatatacagtc

SEQ ID NO: 3795 - DNA, 258 bp, Homo sapiens
acctctaggaacttaattgatagcaaaaatatggtaagtattctactgagagattccatgtatgatttgcacttgcctctttggaagtagtgggtatgtggaattgtaccttgttgccagaaattgtgtaggctatgttgaccaacggccctgtagttagactccttccaaaggcacattttcatcaggacaagccagtgcatcttgagatgatgagcatgagaggtgatgagattcctgagtgagggtgaatcttgg

SEQ ID NO: 3796 - DNA, 4074 bp, Homo sapiens
  SITE (1934): n equals a,t,g, or c
tttacacaaaatactttatcagcagctgttttcatcaaaaaatcaagtcagtttcacagttgaaaaagttacacattaaaatattttacaattcattatatattcaccaggttcccattttctaatgggcttttaatataaagcagaatagaagggaaaatctcaaagttgattactttgacactaagttttacataggacactaagaaccacaaaaagcttaggttctattgtaaaatagcaaccaaattccattcttcttttaaaaatccaattagaaacatcttttttaaaaaaacaaattccacaataagagtaacagatttcaaattaacagtagtctaaaaatcttcaaaataaatggttttgtatagctgagaatatggtagaaagtgaaagcataattttccaacagtcatttcttactacagtgtgtttaaaattatttttattacttttagactttttctcaaaataattattcaaggaaatatttcttaagtggcccaataaaactgtagagccaatagtcagttacaccatattcaaggacaaggatagtcagctatagataggaactgtctaaaccacgagaactgatctctgatactgaagtacccagaagtggctatattatcactgacttgaaacagatcttagtcacccatgtagcatttaattcaatgtttggttctttgcctcatttctttcttaggtcacaatctatagtctttatagaatttgtctacatttcttctaatagaattaatttggttgtagtaacttttgaaaataaatgtaaatggtgaaatcggccatgtggtttgtgcattttaatggtggagaggtcctgggagaaggaggggagacaactatctggactgatagataaaaatgcaaaagtggtataaattttgtgcaaggaggctcacagcatttttggcactcgggtaaaacacagttctctgttaaatcttcagtttctaccatcaaactttcagatttgtaccattttactgagttttcctataatttaaccctgatattgaaaaggctgggatgttagtatgtatcaactgcctatatctaaacaacacaaaatgttaataagttttaataagttatgaaatcttctacaactgcaaaataatctttctggtttcctgcttaaaacagagtttaaattctgcttaactatcgcaagacagtttgcagaagtaagttcccttaatcttcaaatttacttttcttgttggcaatattatatacatgctttagtgaaatacctaaatttccaataattatgccctttaagggatctaaaatagccagatattaagagtattggtattagagtcccttgttcactactcaagacttcaactataggtaacagatttcataaatgaatatttttaaagtgatgctgttttactagagtatacaatgttcactctttataaagttgttttccaataatatgcctaatctaaaaaactgtcaataattattgcacttttttgatgtggcacctggacatctgctaaagctaatttcctaggacattaatcattcatttcaaatacagagtaaaatatcagattctagaatgacgactagcagtagcctctacatcttgggttaatgtttttcaaaatgtttaagaatgtgtcctgtgctcaaatagtatttaataaagttggagagtgagctctgactacttgggaatgagacatatcttaaaatggtttaatgttctactttggagatatggataaatagtttaaaaaggtaaaaagttcatggtttctattcccccatattttaaagtattattcatgagtatacttcagtaaaggggtttaaggaatcaggaagatagtctaaattgtgttaattctggtaactaatttcatatgattgagacattctcngttatgaaagagaatggaagacgggagattcacataagaaataaaaggaaagaagatgaagtttttatgttttccttaagtagatatacactggttattggtataaatgggatagtgcctgagcctcatctatagatcaagaagaaagctgaccatgctgctatgaacaataaaaaatttggggtgcaaaacaatgcatgactatgggacagatcatgtaaataaagaatatatattaatgatagtttctataatataaatagcctttaataaaaaaaataatctttttaataacattaatacttctattttctggaaaacatgcatgaaaaatgtattcagttcaattgcagaaggagaaaaaaaatcaacttaaggtgaatactgtacaattctggaataagaactattcctgctcattctttttctatgatttttttttttttttactttgtgggagcccagaatttccctgggaaataagaataagatcctttaaatactgtccagaagaaaaaaaaaaataccaccttataacaggtctcatttgtgactgcttccaaaactgcagataaaacctcaaatcatcaaaaggtttgatttattaaaaagaaaaagtctctggtgaaatctcaagagtcccttccaccccaagcattttttttcattaaacaagcagtcaaaaacccacttcaaactataaattgaacagcaatggaaaaataagaaattttcattcttttccaatcaatgtaatttaacataaactccagtttacttacacctaatgcaataacagcctttgttgtgtccacatttcaaaacatagaacatttgcaagacaaaaaaaaccatcactttttccttctccatcatttctatatattttggggatttttgttttgttttgttttttaaaaaaagatacaaacaatcttcaaagtttacctttttggacttaaggcataacatgaaattgcgcattattctaaagcttaattttgaaatgaactagtttaagtgctatcaaaccctgtttgcgtttacattatttaaattatatagtattttatttctgttcttgctgtaaattctaatgctgttcatggattgtgcaattcctatgcaatcggtctttgcctgctgagagttattaacagtgcagtgtggaatccagagtgagctttcattttctcagttatcttttcagttcaatgcatgctgtttaattgtgtggaagatccaatccatttttgttgtccagccaccatgatgtgcatcattcatttgtttcatgaaatactccaaagcctcttgctcagttttatctaaggctagggtctttcgaatgtatgcaatgtcatcaaaagattgtagttctggcattccagagccaagcatcattgagaaaagatttatgaagagattggcatgctgtcgaatagctagataagccttgtaacacatctcctgaaacctataagtaataagaacagtttggtcagtttggagcaaatgatgttaataccttcaggtctttgctcaaatgtcacaaaattagagaggctttcgtagacaaagctataaaaaaatagcattcctctctcacttctcttaccaacatcttttgattccctttaccccactagaatgtaaacttcaagagaataaggactttttaaaaactgctttattaccagcacctacaacaatgcctggcatgtcaggagtttaataagtattaaatgtatgaattggttcatactaaatccttttgtgcttaagctagagtcaggactgtgttgtagacaaagcagaattttatagaagattgtaaaaagtactttaaagtctgatatagtctaatgagataccataaggtggtaaaaaagttatgaataaacaaggtgattatggttgactgactttcctcaaagtgtatgaccaaaaaatgtcgtattaagcactatacattatttgtcaatatagaggtggagtccaactatttaaagctcagtaaataaaaacctttaatgtgttatgaagtttaaggattactttctttttaggccttaattagctcaacaaattaaattgtattccctttccatttccttcacagcatcacacaaataaatac

SEQ ID NO: 3797 - DNA, 15266 bp, Homo sapiens
gcagcaacggggtgcggcagggtggggaacgcgggagcggggccagctcccaggaaagctggtctgcgagcggcccctgcccggctcccaggtccctgcgcgaccccgcccttcccgagaccccagccgggctgccgcccgcgtcccggaaggtgagtgggggaggggagatggagcctggggctgccgagaagcagggagagaggggaaaggtctgcaggcctctgggcgcgggggacctttatcaaagggagcggcgaggggaagggagggaccatacgcaggcggagaagaggtagctggggatcttaaggattttgtagggaaaagccttagcggacccatgggtgtagaagggacgggccgtggcggatgcagactgggagggcctgacgggaaagggaaaggatgggcccctgtggacgccacagcgcgccttccccatccgcaaaggctttccctccctctcctccagctccagcctgaaccatgtttttcacttgtggcccaaatgaggccatggtggtctccggtaagtactgttgttcccttcccagccagtgaccccagaacccctgtgagtctggcctctgccccttctccctctccctaccaacttcccagcaccagacttctgccccttgatggccacgaactgcccagtttgattcccaccattccaaggcccagactgcttcccctccagctcccagattctctcctgtgggttgctgtcccctcacccccgccagttcctcagtcttccacattcaagctctgccaccgttcctcactgccccacaccttgcagggttctgccgaagccccccagtcatggtggctggagggcgtgtctttgtcctgccctgcatccaacagatccagaggtaggcaagaagggaaccagggaagggggacctccgttttctctttttcctcctcttcttactgtctgtcccttctttttcccctaggatctctctcaacacactgaccctcaatgtcaagagtgaaaaggtttacactcgccatggggtccccatctcagtcactggcattgcccaggtgaagctttcagagccttttccccacagtccacttccccatcaccctctctcccagacattaagacatcttctggccacagtcttctcaacccttgcctgcagagaagttcctctgctagtctcatcttttccaggcaccccaaggcacttgcctcctcctcctttctttccctgaaatggaagaagcatttcttagagggctctcccttctctctctgctttttctctgacttcatgagacccccaccacacctttcctacccctactctggctacaggtaaaaatccaggggcagaacaaggagatgttggcggccgcctgtcagatgttcctggggaagacggaggctgagattgcccacattgccctggagacgttagagggccaccagagggccatcatggcccacatgactgtggaggttggcctaggggcagggaaccatctggaaggatgtcaaaatgaggggggcccaaggcccacactagtctgtgagagacagtggatccaagagcatacatcccggccgggcagggtggttcatgcctgtaatcccagcactttgggatgccaaggtgggcagatcacttgaggtcaggagttcgagaccagcctagccaacctggtgaaaccccttctctactacaaatacaaaaattagctgggtatggtgatgggtgtcggtaatcccagctacttgggaggctgaggcaggagaatcacttgaacccaggaggcagaggttgcagtgagcaaaaaaaaaaaaaaaaaaaaaacttacatcccttctccccaccatcctgttatcacaggagatctataaggacaggcagaaattctcagaacaggttttcaaagtggcctcctcagacctggtcaacatgggcatcagtgtggttagctacactctgaaggacattcacgatgaccaggtaaaactaggcaattgatccttccccacttccttgctcccatctcttaagccctccaaaggactaatttctacatctctcccacaggactatttgcactctttggggaaggctcgaacagctcaagtccaaaaagatgcacggattggagaagcagaggccaagagagatgctgggatccgggtgagagagatgggggttgcttagtgggaaaggggatagaagtggcacaactgagaagaagcaggggtgctgggtgagcagggaaaatacatgaggcagaaagagaaccttggtgggaagcaggctgtcaccgtggcctttctccccctgccctgacatttcctacctgatctctgcttggacaggaagctaaagccaagcaggaaaaggtgtctgctcagtacctgagtgagatcgagatggccaaggcacagagagattacgaactgaagaaggccgcctatgacatcgaggtcaacacccgccgagcacaggctgacctggcctatcagcttcaggtcagagccactgccaggccactctctgccccttccccattcctctcaggctgtccatctcaggacaccactacactatttctcatactttaactttggtcttattctggctctccatctctggaccaactcccccatatgaggagagatttaaaagactcagacgttacagctgaaaagctttaaagaaaaggccagccgggtgtggtgactcatgcctgtaatcccagcactttgggaggccaaggcgggctgattgcttgacctcaggagttcaaggccagcctgggcaacatggtgaaaccgtgtctatgcgaaaaatacaaacattagccaggcatggcagctcgggcctgtagtcacagctacttggggtatgaggcaggaggattgcttgagccaggatgcgcaggttgcagtgagtcgagatcacactactgcactccagcctgggtgacagtgaaatcctgtccaaaaaagagaaaaaaaaggccacgcgcggtggctcatgcctgtaatcccagcactttggtaggccaaggcaggtggatcacaaggtcaagagttcgagactagcctggccaacatagtgaaaccctgtttctactaaaaatacaaaaattagccaggtatggtggcacgcacctgtagtcccagctacttgggaggctgaggccggagaattgcttgaacccgggagacagaggttgcagtgagctgagaccacgccattgcactccagcctgggtgacagagtgagactccatctcaaaaaaagaaaaaaaaaaaagagaaggccaagaagggatatgatcaataaggctgatcatatgtttggagcaggctgtgcccgtgcaaaggcatctgactgagaaagtggatccgagctcagatccggcccatgcccctctaatcaagcagtgcattctgacatgggtctgcatctacacagaggaatttctgatttgcacagaggcatgctatgggctagcggcagccctggttaattaaaaaagggtatgaagaaggaaaacatggacttggacattgaatcctgcaaagtgagatatgggcagcccttgatattgccaggaagtatagttgatcttcattcttcattattcgtatctgagaatttgcctattcactaaaatgtattggtaacctcaaaaggttaccaataaagtcgcagcactttcaggatcttttgcagacacgcacagtacccaggtgaggttgatcaaggagatgctctgctgccttgtttcagctctcataccgtaagccgtgttattttcacagtatatttactgccgtgttttttgcatttttgtgctttttattggtgaattcactctttaaaatggcccccaagcatcagtgctgtagtgctgtctagtgtcctttagtgcaagcgggctatgatgtgccttatgggagaaatacatgtgttaggtaagcttcgttcatgcataagttatactgctgttagctgtgagttcagtgttaatgaatcaacaatatattttacataaggtgtctttaaacagaaacacatataaagcaaggctctatgttgatcagttgatgaaaatgttttgaccagaggctcacgggaacctagcctgtatttcttctaggaacaaattaggtattaactaattcagcattcatggctactttatagaacagaactaccaagaacaatgaaaatcaactgtactttgagacctttacccaaaggatagcaatattatgcattttgtttttgccaagagttggtacaggctgaaagcataatgaaggtaaaaacatcttttgttattatgttaaattcctgggtgacttgacaggttgaacatggcatacagctttgcaactcaaactgtgttctacccagcagcagctgcagcatcactgcgaagcttgttagaaatacaaaattgcaggccctggccctgaccagctgaatcagaacctgcattttaacaaaatctcaaggtgaattcctaggtgatttgtatgcacattggagtttgagtttgaaaagggttaccatgatggaaactgctagcttgcagtgaagctatggataaggttcttaaccttctaaacatgaccttacttgtctgcagattaagggattggactggttggactcttttcaacttttatcagtttctcgttatgcaccaggcagtgtgctaggtgttcaggaaagaaggatttattcaacaaatatctgttaagtgccttctatgtgctagacaccattttggaggtgaggctataaatatggaggtgaggcagaaaagattcctgcccttatgcagcttacattatgacacaggaaacagctagtaagcaagtaaatgaccttcccaggctataattcttgtttaggtgctgtgaaggaaataaacagggtgatgtgaaaaactgtgggaggggagttagtatattaggttagcgggtggtagagaaagtttctatgaggaagtggtgtttgagatcagacttggagataagaaggaacaatgtacagttctgagccaagaatattctagcctgtgctttttaagtagtcatacttaaaaagtggctgggcgcggtggttcatgcctgtaatcccaacactttgagaggctgagacaggaagatcacttgaggccgggagtttgagaccagtctggccaacagtgaaaccctgtctctaccaaaaatacaaaaaatattagccgggtgtggtggtttgagcctgcagttccagctacttgggaggctgaggcgtgagaatcgcttgaatccagaaggcacagtgagccgagattgcgccaccgcactccagcctgggcgacagagcgagactccttctaagatagatatatggatggatggatggacggatggacggacggacggacggacggacggacggacggacggacggacaacagacagtcagtcagtcagtcagtcatacgtggcttgtggctaggcaggggaccagtaagtgcaaaggctgtgaggtggagtcagaaaggaggtttctgatctgggggcgctggtgtgctgtgagtgaggaggaaaggcaggcagggccagatcacaaagggtttgtgtggtcacgatggagacacagaagagaactgaaagcacagtggaaagctattggagaacttcaagcagaaaggtgccatggtcttatttatatttgtatagggatcagtctggttgccttgtggagaacgggcaaagagaggaagcaaggccgggtgcggtggttcacacctgtaatcccaacactttgggaggccgaggtgggcagatcacgaggtcaggagatcgagaccatcctggctaacatggtgaaaccccgtctctactaaaaatacaaaaaattagctgggcgtggtggcaggcacctgtagtcccagctactcgggaggctgaggcagaagaatggcataaacccgggaggcggagcttgcagtgagccgagatcgcgccactgcactccagcctggatgacagagtgagactctgtctcaaaaaaaaaagcaaaagatgagttgggctctttttcagagatgatggattaaacaaatgtagctaattttactctctcctaaaacctcactaaagccaaaatgattttttttttttttgagatggagtctcgctctgtcgcccaggctggagtgcagtggcgcgatctaaaatgattttttttaaggtaaagatagaggcttgtccaaaggtagtgagttatctcaattgattgttcagtcagttacagattgaactccttgttctactctttacctacttctcactattgcacttgattagtctttctttcttcctttctttccttctcttctcttctttcttctctcctctcctctttgagaccgggtcttactcggtcccccaggctagagtgcagcggtacaatctcagctcactacagcttcaactgcctgggctcaagcaatactcccacctcagcttcctgagtagcttggtctacaaacatatgccaccacgcctggctaatttttgtatgttttgtagagacggaatttcaccatgttgcccaggctggtctcaaactcctgggctcaaaggatccttcccgcctcagcctcccaaaatgctaggattacaggcgtgagccaccatgcccagctgactaggctttaaaaaaaaaaaagatggagaaaataggaacggaaaccagagcatcattttggaaactggaagtcagtagtaattgactaagcaggtatgacacagctgagcttgaaacctgcaaaagggaaaacaatgaaatgatctgaggctcaggagctggcagcacccagtgcttctccagctgtggtagactggttaaataagaggaacatgtgaaaagcaccttctcagagcccctcactgcctctgggtaatggttcctgccctgctccaacagacatctggaggtttattatcttatttatctattttatttatgttttttttgagacagggtctctcactctgttgtccaggctggagtgcaggtgcagtggcgcagtctcggctcactgcaacctctgcctcctgggttcaaatgattctcgtgcctcaccctcccaagtaatcctcaactgggattacaagtgcccaccaccacgcccaggtaatttttgtatttttttttttttttttagtagagaggggtttcaccatgtcggccaggctggtctcgaactgctagcctcaagtgatccatccacctcagcctcacaatgtgctgggattacaggtgtgagttaccatacctgccattggaagtctattatctgaagagagtagactagaggatgtgatgggggctggcccagcacaggtgaggacctagatagtttaccagtaacaggggcatgaaatgactataactttcatgaatgctaaatactgagagccaaccccaaccccaaccccctcaaccccactcagctcccagaacttccatcttccaaaaaagagatcagaagactgctctggggaacatgaccaatccaaaaagaaataacttaaaatcctgaatcagatgtttctccgtacatggcctatccagatcaccgtagggtgaagctcaaagtcagcaagcctcacccacatactcagagcttcctttcagtgttgagaccttcttccctctgagcagatgacaaaggagtttgaaaccagcctggccaacatggtgaaaccccgtctctactaaaaacacaaaaattagctgaaatggtgactgtaatcccagctactcaggaggctgaggcaggagaatcacttgaatccgggaggcagaggttgcagtgagctgagatcgtgccatttcattccagcctgggcaacagagcaagccatcacagatttgggagcaaccaagaaagccagggacagggtatgcttggtaacctggcaagagctgacaaaggggaaaaataaaaccccacagaaagaagcagggaagtaagggaaagggactaataagagtcaagcagggccaggggtgttggctcatgcctgtaatcccagcactttgggaggccaaggtgggtggctcacgaggtcaggagatcgagaccatcctggctaacacggtgaaaccccaactctataaaaatacaaaaaattagccaggcgtggtggtacgcgcctgcagtcccagctactcgggaggctgaggcaggagaatcacttgaacctgggaggcagaggttgcagtgagatgagatcatgccactgcactccagcctgggtgacagagcgagactccatctccaaaaaaaaaaaaaaaagtcaagcacatgcaaatgtggcatgacttattgggagcagaaacattctgagaaaaattatataaaaatgaggttttagattgaaatggtctactaagtgcccaatgcaatgaatgaaaaatatatacattgaaacataacactgtgaaacttaagaatgctgaggacaaaaaatatgaaagcttctagagagagagagatctcaaagaggcaggcttcaaaatgacttcagattcctttttttttttttttttttttttttcagagacagggtcttgctctgttgtccaatacagtggcataaacaaggctcactgtaacctcaacctcccaggctcaagtgattctcccacctcagcctccccagtagttgggaccacaggggcacaccaccacgcccagctaatttttaaatttttttctagaggtgagatcttgccatattgcacaggctggtcttgaactcctgggttcaagttatcctcccaccttagcctcccaaagtgctgggattataggcatgagccactgcatcaagcccagctttcttttctttttttttttttttgagatggatttttgctcttgtcacccaggctggagtgcaatggcgtgatctcagctactgcaacctctgcctcctgggttcaagcgattctcctacctcagcttcccaagtagctgggactacaggtatgtgccaccattgctggctaatttttgtatttttagtagagacggggtttcaccacgttgaccaggctggtcatgaactcctgacctcaggtgatctgcccacctcagcctcccaaagtgctgggatgacaggcatgagccaccatgactggcccaagcccagatttcttaaaaagctagaaaaccatggaggaatgccttcagaattctgatggaaagttaatcccaacatagcagcctgctttcagcctaactggtattaaaatagaagggtagaggccgggtgcagtggctaacgcctgtaatcccagcactttgggaagccgaagcaggtggatcacctgagataaggagttcaagaccagcctggccaatgtggtggaaccccatctctattaaaaacacaaaaattagctgagcgtggtggcaggcacctataatcccagatacatgggaggctgaggcaggagaattgcttgaacctgggagatggagattgcagtgagccaagactgcgtcactgcactccagcctgggtgccaagagcgaaattccatctcaaaaaaaggtagaataaaaatctcagagaaagcaagacctcagaaaaaatattgtctttatattctttctgaggaagcttctggaggttgagtttcaccaaaaggtgggcatagacaggaaggaaaaagaaacagacaaatggttgcctaagggacacaggagagaggtgatcctgcacaccggtgtagagggcaacgaggccagtttggaacgggtttgaaaatttagggtgaaagacagtacagagtgccgtctccagagctatgcttctctctggagtgaacagatgggcccgggggaaggtaggaggcaggggaagcatcacatgtattgatgagacctacaatgatgatggtgcatggctgagcctgagcaatgggacaacgaaggcatgtgttctggctgggtgtgatggcacatgcctgtaaccccaacactttgggaagccgaggcaggtggatcacgtgagcccaggagtttgagatcagcctgggcaacatagaaaaccctgtctctacaaaaagtacaaaaaatagccgggtgtgctggttcacacctgtagtcccagctactctagagggggaggcgggaggatcatctgagcccaggcaggtcaaggctgcagtgagccatgattacgccattgaacctgggtgacagagtaagatgatgtctcaaaaagaaaaaaaaaatgtgttccttgcctggcacctctcctcactagcatcttgataagagccttctgattccctcacactgcaaggaataagaagatgaaatctaggctgggtgcgatggctcatgcctgtaatcccagcactttgggaaactgaggcgggtggatcacttgagatcaggagtttgagaccagcctggccaacatggtgaaaccccgtctctactaaaaaaaatacaaaaattagccagacatggtagcacatgcctgtagtcccagctacttgagaggctgaggcaagagattagcttgaacctgggaggtgaaggttgcactgagctgatcgtgccactgcactccagcctgggcaatagagcgaaactgcctcaaaaaaaaagaaagaaatctgcctaaataagaggaattctatgaatacacacattcttgtagatgttcagagtatccctggaaggatacacaagaagctggtcttggtggtttctctgggaaagggacccaggtggtttggagaatgaggaagaagcctcgtggttcacttttttttctgttaaatctgcaccatgtgcaaaagacaaaaaagatcacctgtccccacccccacaaaaaataagtcagctattgcagtagcctaggctagcactaaggttatcgcagcaacagtggggggatttgagcaagactggagatagcagaaagccaacatgtgctcagtgccctcaaggtatttatactctagaagggggcacacgtgggaaaaatagattaaacgggggctcatcagagaaacactggactccactggactggccaagcagacaggagggaacccaccttcatgcacctgctcctttttttttttttttttttttggagatggagtcttactctgttgcccagggtggagtgcagtggcgtgatcccagctcactgcaaccttcgcctcccaggttcaagcaattctcctgcctcagcctcccgggtggctgggactacaggcattcgccaccacacctggctaattttttgtattttagtagagacagggtttcaccatgttggccaggctggtctcgagctcctgaactcaggcaatccaccctccttggcctcccaaagcgctaggattacaggcgtgagccaccgcgcccggccaccggctcctatttttatatcccactctggagctctggttcccgggcacttgctcttcacctctgactcagagcgtgaacctgacttcaccctcctacccaggtggccaagactaagcagcagattgaggagcagcgggtgcaggtgcaggtggtggagcgggcccagcaggtggcagtgcaggagcaggagatcgcccggcgggagaaggagctggaggcccgggtgcggaagccagcggaagcggagcgctacaagctggagcgcctagccgaggcagagaagtaaatgtcccctccctgaccctgcctagctcacttgccacctaggcaccccaagatggagtgctgaagccttcaccacctggactcctatggatttcaggtttcaggagcgtctgcctctgcagcactgggcctttctcctgggagtaagggctgctgggctccaccctccacttcccttctgtccacaggtcccaactaattatgcaggcggaggcagaagccgcgtctgtgcgggtgagttaagaggcagttccatgctggcttgtggagagggtgggggttgctgcttgatcggggatttcttgttcttaatgatttccgtcaatctcacaagcatccttaaccctcagatgcgtggggaagctgaggcctttgccataggggcccgagcccgagccgaggctgagcagatggccaagaaggcagaagccttccagctgtaccaagaggctgctcagctggacatgctgctagagaagctgccccaggtctggaggtcatgtgggcaccaagaaaggaggaaatagaaccagggactaaggggtggggtgtagtgaggggcttagggagaaacagcctagggggactctaaattaggggtgggaattattagtgaccaaagtgaggaaggatgatcagtggaacgaggaccttaaaacccagagtaagttgttttatgaggaatgtggtcagatcatgggcactgagtgggtgtctctctcctgccaggtggcagaggagatcagtggtcccttgacttcagccaataagatcacactggtgtccagcggcagtgggaccatgggggcagccaaagtgactggggaagtactggacattctaactcgcctgccagagagtgtggaaagactcacaggcgtgagcatctcccaggtgaggtctcaggttggagctgaggagaattgctaggttcctgtgttgtgtgacacagtatgcctagcatttaaccagcatccaggcctgggagtcattgatgtttattaatcactttctgtgtgccagacacagtgctaagcttctacataaatgagttgttttaaatcaaactaccattagggtatataggattttacaaagtccagaaactcaacatccagcatgttcctactcattctgctagtgcagctggagtgaaatccaggtcgactgtctctgcaacctgtgcttgtggtcaccccactagtatagggaactagttgcagcctattgacagttaattaattctagggcatatcactgcttttctcagcgccccagttaattcacctgtagatcatggtagaagtcagcaaacaggctctggaaccactgttttgttgcgaatcctagctacaatgcctgctagctgtaatcttggacaagtaatcaacctctctatacctgtttcctcatcttaaaattgggttaataattagaaactaccctgttgaattgttgaggggctcgagcaaatatttgcagtgtttagaatagtgcctggtatatagtaagcattatgtgtatgttaaagaaatggggccaggtgcagtggcttacgcctgtaatcccagcactttgggaggctgaggcaggcagatcacctgaggttaggagttggagaccagcctggccaacatggtgaaacaccatctttactaaaaatacaaaaaaaaattagccaggcttggtggtgcatgcctgtaatctcagctactcgggaagctgaggcaggagaattgctggaacccaggagccgaaggttgcagtgagctgagatcacaccactgcactccagcctgggtgacagaataaggctctatctcaaaaaaaaaaaaaaattccaggcgcggtagctcatgcctgtaatcccagcactttgggaggctgaggcgggcggatcacgaggtcaggagattgagaccatcctggctaacacagtgaaaccccgtctctactaaaaatacaaaacagccgggcgtggcggtgtgtgcctgtagtcccagctgctggggaggctgaggcaggagaatggtgtgaacctgggaggcagagcttgcagtgagccgagatagcaccactgcactccatcctaggcaacagagcaagactctgtctcaaaaaaaaaaagagaaagaaatgcatattcgggctgggtgctgtggctcacacttgtaatcccagaactttgggaggccagggtggacgatcagctgaggtcagaagtttgagatcaccctggccaacatggtgataccccatctctaccaaaaatacaaaaattagctgggtatggtggcgcatacctgtaatcccagctactcgggaggctgaggcaggagaatcacttgaactcaggaggcggaggctgcagtaagccaagatcgcaccactgcattctagcctgggtgatagagtgagattccgtctcaaaaaaaaaaagaaaaaaaaaaagcgtatgtaaataaaagcactggatcataccaatgaccttcaagctgggttccttggagcctcctggaggcctgcagtagaatattcagagctaaggagagtgtgcaaacaaggctctgccccctctcctctcttcagtgatttattgtatgtgggtcctgatgtctttgtttggggaaacaggtggtagggcaccagaaagaaccctggccgtgtgtgttctgcctatagcccattcgtctaaactggggcccgggagagtaggggcctcagcctcccgaatgttcccaagtgtcatctactgttgtctttttgccaggtgaatcacaagcctttgagaacagcctgagccttcagccctcacagatgcccagcctcatagctgaagttgcctgaatgatcctcctgttgcatgtaacccactggcctccctgagcatgtccattgacagtgaggtcccacccctcatctctccttgccaaatagtttgtgccttgtcttgaagggggttgctccccttgccaacctcacactgctatgattgccaactccagcggtcccatgtcagccttctgatgatcccactccaccccacctcaacttatttaacttcctaattaaatcagactgtttgagcctgttgtctagaatattttcctgaccaagtctgagggatgggctggaggttttcaactttgctacccaaataaattgctgtaagtaagtactaataaaacagaagcaactggaaattaatgcttggcccggcacagtggctcatgcctgtaatcccagcactttgggaggccaaggcaggcagatcatctgaggtcaggagttcaagaccagcctggccaacatgacgaaaccttgtctctaccaaaaatacaaaaattagccaggcagggtgaaacatgccaagtagtagtcccagctacttgggaggctgaggcaggagaattacttgaacctgggaagcagaggttgcagtgagccaagatcgcaccactgcactctagcctaggtgacagagtgagactgtttcaaaa

SEQ ID NO: 3798 - DNA, 15271 bp, Homo sapiens
gcagcaacggggtgcggcagggtggggaacgcgggagcggggccagctcccaggaaagctggtctgcgagcggcccctgcccggctcccaggtccctgcgcgaccccgcccttcccgagaccccagccgggctgccgcccgcgtcccggaaggtgagtgggggaggggagatggagcctggggctgccgagaagcagggagagaggggaaaggtctgcaggcctctgggcgcgggggacctttatcaaagggagcggcgaggggaagggagggaccatacgcaggcggagaagaggtagctggggatcttaaggattttgtagggaaaagccttagcggacccatgggtgtagaagggacgggccgtggcggatgcagactgggagggcctgacgggaaagggaaaggatgggcccctgtggacgccacagcgcgccttccccatccgcaaaggctttccctccctctcctccagctccagcctgaaccatgtttttcacttgtggcccaaatgaggccatggtggtctccggtaagtactgttgttcccttcccagccagtgaccccagaacccctgtgagtctggcctctgccccttctccctctccctaccaacttcccagcaccagacttctgccccttgatggccacgaactgcccagtttgattcccaccattccaaggcccagactgcttcccctccagctcccagattctctcctgtgggttgctgtcccctcacccccgccagttcctcagtcttccacattcaagctctgccaccgttcctcactgccccacaccttgcagggttctgccgaagccccccagtcatggtggctggagggcgtgtctttgtcctgccctgcatccaacagatccagaggtaggcaagaagggaaccagggaagggggacctccgttttctctttttcctcctcttcttactgtctgtcccttctttttcccctaggatctctctcaacacactgaccctcaatgtcaagagtgaaaaggtttacactcgccatggggtccccatctcagtcactggcattgcccaggtgaagctttcagagccttttccccacagtccacttccccatcaccctctctcccagacattaagacatcttctggccacagtcttctcaacccttgcctgcagagaagttcctctgctagtctcatcttttccaggcaccccaaggcacttgcctcctcctcctttctttccctgaaatggaagaagcatttcttagagggctctcccttctctctctgctttttctctgacttcatgagacccccaccacacctttcctacccctactctggctacaggtaaaaatccaggggcagaacaaggagatgttggcggccgcctgtcagatgttcctggggaagacggaggctgagattgcccacattgccctggagacgttagagggccaccagagggccatcatggcccacatgactgtggaggttggcctaggggcagggaaccatctggaaggatgtcaaaatgaggggggcccaaggcccacactagtctgtgagagacagtggatccaagagcatacatcccggccgggcagggtggttcatgcctgtaatcccagcactttgggatgccaaggtgggcagatcacttgaggtcaggagttcgagaccagcctagccaacctggtgaaaccccttctctactacaaatacaaaaattagctgggtatggtgatgggtgtcggtaatcccagctacttgggaggctgaggcaggagaatcacttgaacccaggaggcagaggttgcagtgagcaaaaaaaaaaaaaaaaaaaaaacttacatcccttctccccaccatcctgttatcacaggagatctataaggacaggcagaaattctcagaacaggttttcaaagtggcctcctcagacctggtcaacatgggcatcagtgtggttagctacactctgaaggacattcacgatgaccaggtaaaactaggcaattgatccttccccacttccttgctcccatctcttaagccctccaaaggactaatttctacatctctcccacaggactatttgcactctttggggaaggctcgaacagctcaagtccaaaaagatgcacggattggagaagcagaggccaagagagatgctgggatccgggtgagagagatgggggttgcttagtgggaaaggggatagaagtggcacaactgagaagaagcaggggtgctgggtgagcagggaaaatacatgaggcagaaagagaaccttggtgggaagcaggctgtcaccgtggcctttctccccctgccctgacatttcctacctgatctctgcttggacaggaagctaaagccaagcaggaaaaggtgtctgctcagtacctgagtgagatcgagatggccaaggcacagagagattacgaactgaagaaggccgcctatgacatcgaggtcaacacccgccgagcacaggctgacctggcctatcagcttcaggtcagagccactgccaggccactctctgccccttccccattcctctcaggctgtccatctcaggacaccactacactatttctcatactttaactttggtcttattctggctctccatctctggaccaactcccccatatgaggagagatttaaaagactcagacgttacagctgaaaagctttaaagaaaaggccagccgggtgtggtgactcatgcctgtaatcccagcactttgggaggccaaggcgggctgattgcttgacctcaggagttcaaggccagcctgggcaacatggtgaaaccgtgtctatgcgaaaaatacaaacattagccaggcatggcagctcgggcctgtagtcacagctacttggggtatgaggcaggaggattgcttgagccaggatgcgcaggttgcagtgagtcgagatcacactactgcactccagcctgggtgacagtgaaatcctgtccaaaaaagagaaaaaaaaggccacgcgcggtggctcatgcctgtaatcccagcactttggtaggccaaggcaggtggatcacaaggtcaagagttcgagactagcctggccaacatagtgaaaccctgtttctactaaaaatacaaaaattagccaggtatggtggcacgcacctgtagtcccagctacttgggaggctgaggccggagaattgcttgaacccgggagacagaggttgcagtgagctgagaccacgccattgcactccagcctgggtgacagagtgagactccatctcaaaaaaagaaaaaaaaaaaagagaaggccaagaagggatatgatcaataaggctgatcatatgtttggagcaggctgtgcccgtgcaaaggcatctgactgagaaagtggatccgagctcagatccggcccatgcccctctaatcaagcagtgcattctgacatgggtctgcatctacacagaggaatttctgatttgcacagaggcatgctatgggctagcggcagccctggttaattaaaaaagggtatgaagaaggaaaacatggacttggacattgaatcctgcaaagtgagatatgggcagcccttgatattgccaggaagtatagttgatcttcattcttcattattcgtatctgagaatttgcctattcactaaaatgtattggtaacctcaaaaggttaccaataaagtcgcagcactttcaggatcttttgcagacacgcacagtacccaggtgaggttgatcaaggagatgctctgctgccttgtttcagctctcataccgtaagccgtgttattttcacagtatatttactgccgtgttttttgcatttttgtgctttttattggtgaattcactctttaaaatggcccccaagcatcagtgctgtagtgctgtctagtgtcctttagtgcaagcgggctatgatgtgccttatgggagaaatacatgtgttaggtaagcttcgttcatgcataagttatactgctgttagctgtgagttcagtgttaatgaatcaacaatatattttacataaggtgtctttaaacagaaacacatataaagcaaggctctatgttgatcagttgatgaaaatgttttgaccagaggctcacgggaacctagcctgtatttcttctaggaacaaattaggtattaactaattcagcattcatggctactttatagaacagaactaccaagaacaatgaaaatcaactgtactttgagacctttacccaaaggatagcaatattatgcattttgtttttgccaagagttggtacaggctgaaagcataatgaaggtaaaaacatcttttgttattatgttaaattcctgggtgacttgacaggttgaacatggcatacagctttgcaactcaaactgtgttctacccagcagcagctgcagcatcactgctaagcttgttagaaatacaaaattgcaggccctggccctgaccagctgaatcagaacctgcattttaacaaaatctcaaggtgaattcctaggtgatttgtatgcacattggagtttgagtttgaaaagggttaccatgatggaaactgctagcttgcagtgaagctatggataaggttcttaaccttctaaacatgaccttacttgtctgcagattaagggattggactggttggactcttttcaacttttatcagtttctcgttatgcaccaggcagtgtgctaggtgttcaggaaagaaggatttattcaacaaatatctgttaagtgccttctatgtgctagacaccattttggaggtgaggctataaatatggaggtgaggcagaaaagattcctgcccttatgcagcttacattatgacacaggaaacagctagtaagcaagtaaatgaccttcccaggctataattcttgtttaggtgctgtgaaggaaataaacagggtgatgtgaaaaactgtgggaggggagttagtatattaggttagcgggtggtagagaaagtttctatgaggaagtggtgtttgagatcagacttggagataagaaggaacaatgtacagttctgagccaagaatattctagcctgtgctttttaagtagtcatacttaaaaagtggctgggcgcggtggttcatgcctgtaatcccaacactttgagaggctgagacaggaagatcacttgaggccgggagtttgagaccagtctggccaacagtgaaaccctgtctctaccaaaaatacaaaaaatattagccgggtgtggtggtttgagcctgcagttccagctacttgggaggctgaggcgtgagaatcgcttgaatccagaaggcacagtgagccgagattgcgccaccgcactccagcctgggcgacagagcgagactccttctaagatagatatatggatggatggatggacggatggacggatggacggacggacgggcggacggacggacggacggacggacgacagacagtcagtcagtcagtcagtcatacgtggcttgtggctaggcaggggaccagtaagtgcaaaggctgtgaggtggagtcagaaaggaggtttctgatctgggggcgctggtgtgctgtgagtgaggaggaaaggcaggcagggccagatcacaaagggtttgtgtggtcacgatggagacacagaagagaactgaaagcacagtggaaagctattggagaacttcaagcagaaaggtgccatggtcttatttatatttgtatagggatcagtctggttgccttgtggagaacgggcaaagagaggaagcaaggccgggtgcggtggttcacacctgtaatcccaacactttgggaggccgaggtgggcagatcacgaggtcaggagatcgagaccatcctggctaacatggtgaaaccccgtctctactaaaaatacaaaaaattagctgggcgtggtggcaggcacctgtagtcccagctactcgggaggctgaggcagaagaatggcataaacccgggaggcggagcttgcagtgagccgagatcgcgccactgcactccagcctggatgacagagtgagactctgtctcaaaaaaaaaagcaaaagatgagttgggctctttttcagagatgatggattaaacaaatgtagctaattttactctctcctaaaacctcactaaagccaaaatgattttttttttttttgagatggagtctcgctctgtcgcccaggctggagtgcagtggcgcgatctaaaatgattttttttaaggtaaagatagaggcttgtccaaaggtagtgagttatctcaattgattgttcagtcagttacagattgaactccttgttctactctttacctacttctcactattgcacttgattagtctttctttcttcctttctttccttctcttctcttctttcttctctcctctcctctttgagaccgggtcttactcggtcccccaggctagagtgcagcggtacaatctcagctcactacagcttcaactgcctgggctcaagcaatactcccacctcagcttcctgagtagcttggtctacaaacatatgccaccacgcctggctaatttttgtatgttttgtagagacggaatttcaccatgttgcccaggctggtctcaaactcctgggctcaaaggatccttcccgcctcagcctcccaaaatgctaggattacaggcgtgagccaccatgcccagctgactaggctttaaaaaaaaaaaagatggagaaaataggaacggaaaccagagcatcattttggaaactggaagtcagtagtaattgactaagcaggtatgacacagctgagcttgaaacctgcaaaagggaaaacaatgaaatgatctgaggctcaggagctggcagcacccagtgcttctccagctgtggtagactggttaaataagaggaacatgtgaaaagcaccttctcagagcccctcactgcctctgggtaatggttcctgccctgctccaacagacatctggaggtttattatcttatttatctattttatttatgttttttttgagacagggtctctcactctgttgtccaggctggagtgcaggtgcagtggcgcagtctcggctcactgcaacctctgcctcctgggttcaaatgattctcgtgcctcaccctcccaagtaatcctcaactgggattacaagtgcccaccaccacgcccaggtaatttttgtatttttttttttttttttagtagagaggggtttcaccatgtcggccaggctggtctcgaactgctagcctcaagtgatccatccacctcagcctcacaatgtgctgggattacaggtgtgagttaccatacctgccattggaagtctattatctgaagagagtagactagaggatgtgatgggggctggcccagcacaggtgaggacctagatagtttaccagtaacaggggcatgaaatgactataactttcatgaatgctaaatactgagagccaaccccaaccccaaccccctcaaccccactcagctcccagaacttccatcttccaaaaaagagatcagaagactgctctggggaacatgaccaatccaaaaagaaataacttaaaatcctgaatcagatgtttctccgtacatggcctatccagatcaccgtagggtgaagctcaaagtcagcaagcctcacccacatactcagagcttcctttcagtgttgagaccttcttccctctgagcagatgacaaaggagtttgaaaccagcctggccaacatggtgaaaccccgtctctactaaaaacacaaaaattagctgaaatggtgactgtaatcccagctactcaggaggctgaggcaggagaatcacttgaatccgggaggcagaggttgcagtgagctgagatcgtgccatttcattccagcctgggcaacagagcaagccatcacagatttgggagcaaccaagaaagccagggacagggtatgcttggtaacctggcaagagctgacaaaggggaaaaataaaaccccacagaaagaagcagggaagtaagggaaagggactaataagagtcaagcagggccaggggtgttggctcatgcctgtaatcccagcactttgggaggccaaggtgggtggctcacgaggtcaggagatcgagaccatcctggctaacacggtgaaaccccaactctataaaaatacaaaaaattagccaggcgtggtggtacgcgcctgcagtcccagctactcgggaggctgaggcaggagaatcacttgaacctgggaggcagaggttgcagtgagatgagatcatgccactgcactccagcctgggtgacagagcgagactccatctccaaaaaaaaaaaaaaaagtcaagcacatgcaaatgtggcatgacttattgggagcagaaacattctgagaaaaattatataaaaatgaggttttagattgaaatggtctactaagtgcccaatgcaatgaatgaaaaatatatacattgaaacataacactgtgaaacttaagaatgctgaggacaaaaaatatgaaagcttctagagagagagagatctcaaagaggcaggcttcaaaatgacttcagattccttttttttttttttttttttttttttcagagacagggtcttgctctgttgtccaatacagtggcataaacaaggctcactgtaacctcaacctcccaggctcaagtgattctcccacctcagcctccccagtagttgggaccacaggggcacaccaccacgcccagctaatttttaaatttttttctagaggtgagatcttgccatattgcacaggctggtcttgaactcctgggttcaagttatcctcccaccttagcctcccaaagtgctgggattataggcatgagccactgcatcaagcccagctttcttttttttttttttttttttgagatggatttttgctcttgtcacccaggctggagtgcaatggcgtgatctcagctactgcaacctctgcctcctgggttcaagcgattctcctacctcagcttcccaagtagctgggactacaggtatgtgccaccattgctggctaatttttgtatttttagtagagacggggtttcaccacgttgaccaggctggtcatgaactcctgacctcaggtgatctgcccacctcagcctcccaaagtgctgggatgacaggcatgagccaccatgactggcccaagcccagatttcttaaaaagctagaaaaccatggaggaatgccttcagaattctgatggaaagttaatcccaacatagcagcctgctttcagcctaactggtattaaaatagaagggtagaggccgggtgcagtggctaacgcctgtaatcccagcactttgggaagccgaagcaggtggatcacctgagataaggagttcaagaccagcctggccaatgtggtggaaccccatctctattaaaaacacaaaaattagctgagcgtggtggcaggcacctataatcccagatacatgggaggctgaggcaggagaattgcttgaacctgggagatggagattgcagtgagccaagactgcgtcactgcactccagcctgggtgccaagagcgaaattccatctcaaaaaaaggtagaataaaaatctcagagaaagcaagacctcagaaaaaatattgtctttatattctttctgaggaagcttctggaggttgagtttcaccaaaaggtgggcatagacaggaaggaaaaagaaacagacaaatggttgcctaagggacacaggagagaggtgatcctgcacaccggtgtagagggcaacgaggccagtttggaacgggtttgaaaatttagggtgaaagacagtacagagtgccgtctccagagctatgcttctctctggagtgaacagatgggcccgggggaaggtaggaggcaggggaagcatcacatgtattgatgagacctacaatgatgatggtgcatggctgagcctgagcaatgggacaacgaaggcatgtgttctggctgggtgtgatggcacatgcctgtaaccccaacactttgggaagccgaggcaggtggatcacgtgagcccaggagtttgagatcagcctgggcaacatagaaaaccctgtctctacaaaaagtacaaaaaatagccgggtgtgctggttcacacctgtagtcccagctactctagagggggaggcgggaggatcatctgagcccaggcaggtcaaggctgcagtgagccatgattacgccattgaacctgggtgacagagtaagatgatgtctcaaaaagaaaaaaaaaatgtgttccttgcctggcacctctcctcactagcatcttgataagagccttctgattccctcacactgcaaggaataagaagatgaaatctaggctgggtgcgatggctcatgcctgtaatcccagcactttgggaaactgaggcggatggatcacttgagatcaggagtttgagaccagcctggccaacatggtgaaaccccgtctctactaaaaaaaatacaaaaattagccagacatggtagcacatgcctgtagtcccagctacttgagaggctgaggcaagagattagcttgaacctgggaggtgaaggttgcactgagctgatcgtgccactgcactccagcctgggcaatagagcgaaactgcctcaaaaaaaaagaaagaaatctgcctaaataagaggaattctatgaatacacacattcttgtagatgttcagagtatccctggaaggatacacaagaagctggtcttggtggtttctctgggaaagggacccaggtggtttggagaatgaggaagaagcctcgtggttcacttttttttctgttaaatctgcaccatgtgcaaaagacaaaaaagatcacctgtccccacccccacaaaaaataagtcagctattgcagtagcctaggctagcactaaggttatcgcagcaacagtggggggatttgagcaagactggagatagcagaaagccaacatgtgctcagtgccctcaaggtatttatactctagaagggggcacacgtgggaaaaatagattaaacgggggctcatcagagaaacactggactccactggactggccaagcagacaggagggaacccaccttcatgcacctgctcctttttttttttttttttttttggagatggagtcttactctgttgcccagggtggagtgcagtggcgtgatcccagctcactgcaaccttcgcctcccaggttcaagcaattctcctgcctcagcctcccgggtggctgggactacaggcattcgccaccacacctggctaattttttgtattttagtagagacagggtttcaccatgttggccaggctggtctcgagctcctgaactcaggcaatccaccctccttggcctcccaaagcgctaggattacaggcgtgagccaccgcgcccggccaccggctcctatttttatatcccactctggagctctggttcccgggcacttgctcttcacctctgactcagagcgtgaacctgacttcaccctcctacccaggtggccaagactaagcagcagattgaggagcagcgggtgcaggtgcaggtggtggagcgggcccagcaggtggcagtgcaggagcaggagatcgcccggcgggagaaggagctggaggcccgggtgcggaagccagcggaagcggagcgctacaagctggagcgcctagccgaggcagagaagtaaatgtcccctccctgaccctgcctagctcacttgccacctaggcaccccaagatggagtgctgaagccttcaccacctggactcctatggatttcaggtttcaggagcgtctgcctctgcagcactgggcctttctcctgggagtaagggctgctgggctccaccctccacttcccttctgtccacaggtcccaactaattatgcaggcggaggcagaagccgcgtctgtgcgggtgagttaagaggcagttccatgctggcttgtggagagggtgggggttgctgcttgatcggggatttcttgttcttaatgatttccgtcaatctcacaagcatccttaaccctcagatgcgtggggaagctgaggcctttgccataggggcccgagcccgagccgaggctgagcagatggccaagaaggcagaagccttccagctgtaccaagaggctgctcagctggacatgctgctagagaagctgccccaggtctggaggtcatgtgggcaccaagaaaggaggaaatagaaccagggactaaggggtggggtgtagtgaggggcttagggagaaacagcctagggggactctaaattaggggtgggaattattagtgaccaaagtgaggaaggatgatcagtggaacgaggaccttaaaacccagagtaagttgttttatgaggaatgtggtcagatcatgggcactgagtgggtgtctctctcctgccaggtggcagaggagatcagtggtcccttgacttcagccaataagatcacactggtgtccagcggcagtgggaccatgggggcagccaaagtgactggggaagtactggacattctaactcgcctgccagagagtgtggaaagactcacaggcgtgagcatctcccaggtgaggtctcaggttggagctgaggagaattgctaggttcctgtgttgtgtgacacagtatgcctagcatttaaccagcatccaggcctgggagtcattgatgtttattaatcactttctgtgtgccagacacagtgctaagcttctacataaatgagttgttttaaatcaaactaccattagggtatataggattttacaaagtccagaaactcaacatccagcatgttcctactcattctgctagtgcagctggagtgaaatccaggtcgactgtctctgcaacctgtgcttgtggtcaccccactagtatagggaactagttgcagcctattgacagttaattaattctagggcatatcactgcttttctcagcgccccagttaattcacctgtagatcatggtagaagtcagcaaacaggctctggaaccactgttttgttgcgaatcctagctacaatgcctgctagctgtaatcttggacaagtaatcaacctctctatacctgtttcctcatcttaaaattgggttaataattagaaactaccctgttgaattgttgaggggctcgagcaaatatttgcagtgtttagaatagtgcctggtatatagtaagcattatgtgtatgttaaagaaatggggccaggtgcagtggcttacgcctgtaatcccagcactttgggaggctgaggcaggcagatcacctgaggttaggagttggagaccagcctggccaacatggtgaaacaccatctttactaaaaatacaaaaaaaaattagccaggcttggtggtgcatgcctgtaatctcagctactcgggaagctgaggcaggagaattgctggaacccaggagccgaaggttgcagtgagctgagatcacaccactgcactccagcctgggtgacagaataagactctatctcaaaaaaaaaaaaaaattccaggcgcggtagctcatgcctgtaatcccagcactttgggaggctgaggcgggcggatcacgaggtcaggagattgagaccatcctggctaacacagtgaaaccccgtctctactaaaaatacaaaacagccgggcgtggcggtgtgtgcctgtagtcccagctgctggggaggctgaggcaggagaatggtgtgaacctgggaggcagagcttgcagtgagccgagatagcaccactgcactccatcctaggcaacagagcaagactctgtctcaaaaaaaaaaagagaaagaaatgcatattcgggctgggtgctgtggctcacacttgtaatcccagaactttgggaggccagggtggacgatcagctgaggtcagaagtttgagatcaccctggccaacatggtgataccccatctctaccaaaaatacaaaaattagctgggtatggtggcgcatacctgtaatcccagctactcgggaggctgaggcaggagaatcacttgaactcaggaggcggaggctgcagtaagccaagatcgcaccactgcattctagcctgggtgatagagtgagattccgtctcaaaaaaaaaaagaaaaaaaaaaagcgtatgtaaataaaagcactggatcataccaatgaccttcaagctgggttccttggagcctcctggaggcctgcagtagaatattcagagctaaggagagtgtgcaaacaaggctctgccccctctcctctcttcagtgatttattgtatgtgggtcctgatgtctttgtttggggaaacaggtggtagggcaccagaaagaaccctggccgtgtgtgttctgcctatagcccattcgtctaaactggggcccgggagagtaggggcctcagcctcccgaatgttcccaagtgtcatctactgttgtctttttgccaggtgaatcacaagcctttgagaacagcctgagccttcagccctcacagatgcccagcctcatagctgaagttgcctgaatgatcctcctgttgcatgtaacccactggcctccctgagcatgtccattgacagtgaggtcccacccctcatctctccttgccaaatagtttgtgccttgtcttgaagggggttgctccccttgccaacctcacactgctatgattgccaactccagcggtcccatgtcagccttctgatgatcccactccaccccacctcaacttatttaacttcctaattaaatcagactgtttgagcctgttgtctagaatattttcctgaccaagactgagggatgggctggaggttttcaactttgctacccaaataaattgctgtaagtaagtactaataaaacagaagcaactggaaattaatgcttggcccggcacagtggctcatgcctgtaatcccagcactttgggaggccaaggcaggcagatcatctgaggtcaggagttcaagaccagcctggccaacatgacgaaaccttgtctctaccaaaaatacaaaaattagccaggcagggtgaaacatgccaagtagtagtcccagctacttgggaggctgaggcaggagaattacttgaacctgggaagcagaggttgcagtgagccaagatcgcaccactgcactctagcctaggtgacagagtgagactgtttcaaaa

SEQ ID NO: 3799 - DNA, 1578 bp, Homo sapiens
cttacactccgctcggctcaccatgtgtcactctcgcagctgccacccgaccatgaccatcctgcaggccccgaccccggccccctccaccatcccgggaccccggcggggctccggtcctgagatcttcaccttcgaccctctcccggagcccgcagcggcccctgccgggcgccccagcgcctctcgcgggcaccgaaagcgcagccgcagggttctctaccctcgagtggtgagtatcgccgaagtgggcattcgcggggtgcgctgccctggagtcactggggaacgacccgactccagaggcctcgacctgacctgtctcctgttttgtctccccttaggtccggcgccagctgccagtcgaggaaccgaacccagccaaaaggcttctctttctgctgctcaccatcgtcttctgccagatcctgatggctgaagagggtgtgccggcgcccctgcctccagaggacgcccctaacgccgcatccctggcgcccacccctgtgtcccccgtcctcgagccctttaatctgacttcggagccctcggactacgctctggacctcagcactttcctccagcaacacccggccgccttctaactgtgactccccgcactccccaaaaagaatccgaaaaaccacaaagaaacaccaggcgtacctggtgcgcgagagcgtatccccaactgggacttccgaggcaacttgaactcagaacactacagcggagacgccacccggtgcttgaggcgggaccgaggcgcacagagaccgaggcgcatagagaccgaggcacagcccagctggggctaggcccggtgggaaggagagcgtcgttaatttatttcttattgctcctaattaatatttatatgtatttatgtacgtcctcctaggtgatggagatgtgtacgtaatatttattttaacttatgcaagggtgtgagatgttccccctgctgtaaatgcaggtctcttggtatttattgagctttgtgggactggtggaagcaggacacctggaactgcggcaaagtaggagaagaaatggggaggactcgggtgggggaggacgtcccggctgggatgaagtctggtggtgggtcgtaagtttaggaggtgactgcatcctccagcatctcaactccgtctgtctactgtgtgagacttcggcggaccattaggaatgagatccgtgagatccttccatcttcttgaagtcgcctttagggtggctgcgaggtagagggttgggggttggtgggctgtcacggagcgactgtcgagatcgcctagtatgttctgtgaacacaaataaaattgatttactgtctgcagtcttgagtgtatctttgcaagcgccgactccccactcctcccggccttcagatggcaaggaccggcgggaggcgccgtggccgagtccccagcccgcgcacctccctgggcccaggagccccttttcctggagtcacagaacccagcatccggttgccggatgtagtctttcattgcccagtctgcggttttcccaggtagttgccccgcggcgaatccgagatgtggcaatcac

SEQ ID NO: 3800 - DNA, 5131 bp, Homo sapiens
cagcttttttcaattcccatttatttttggctcttggggcgatgtcatcttttcaatatgaaaaaaagcagcaagttcaacataaaatagaaatctcaaatgtaggatagaacaaaaccaagtgtgtgaggggggaagcaacagcaaaaggaagaaatgagatgttgcaaaaaagatggaggagggttcccctctcctctggggactgactcaaacactgatgtggcagtatacaccactccagagtcaggggtgttcattcttttttgggagtaagaaaaggtggggattaagaagacgtttctggaggcttagggaccaaggctggtctctttcccccctcccaacccccttgatccctttctctgatcaggggaaaggagctgagtgagggaggtagagttggaaagggaaggattccacttgacagagtgggacagactcctccagagtagagcttggagggagattgaaagtggagataatactgctgacacctcccttgaagctgagatgggaaatggacatacttagaaatttagtgactttaatagcctggatttccctctccaaaacttttagaatggaaaatcccatccccttccttatatagtgacttctacccactaccttctaccattttctactttgggcttaggatgatggccattatctacatgtgttttcagcacctggttggttctaaatgggatctggagacccagcttcttggagatttttaagaggaagtattaactggacaaatggaatgggcaccagaaagaaatacagggtcacccagaatggcagaaacctaggtttcccagagtggaaagagagaggagacattcaacaaacaagtatttattgagcgcctactatgtgccaggcactgttctagaccccccccagaagaaaaaacaaaaaacaagatagaggcagcaaacacaaattctgagggagaggaaaggggcagttgagtaagacggctaagggaactgagaagcctgaggtgatgggggctctgccttaggcctcctcttcggcctcctcaccgaaatcctcctcctcttctgcggtggcatcctggtactgctgatactcagagacgaggtcgttcatgttgctctcagcctcggtgaactccatctcgtccatgccctcgcctgtgtaccagtggaggaaggccttccggcggaacatggcagtgaactgctccgagatgcgcttgaagagctcctggatggctgtgctattgccaatgaaggtgactgccatcttgaggccacgaggtgggatgtcacagacggctgtcttgacattgttggggatccattccacaaagtagctgctgttcttgttctgcacgttaagcatctgctcatcgacctccttcatggacatccgaccacggaagacagcagccacggtgaggtatcggccgtggcgggggtcacaggcagccatcatgttcttggcatcgaagacctgctgggtgagttccggcactgtgagagctcgatactgctggcttccacggctggtgagaggggcaaagccaggcataaagaaatggagacgtgggaaggggaccatgttgactgccaacttgcggaggtcagcattgagctggccagggaaacggaggcaggtggtgacaccactcatggtggctgagacaaggtggttcagatccccgtaggttggtgtggtcagcttcagagtgcggaagcagatatcatagagggcctcgttgtcaatgcaataggtctcatcagtattctctaccaactgatggacggagagggtggcattgtagggctcgaccacggtgtcagacactttgggtgaaggcaccacactgaaggtattcatgatgcgatcagggtattcttctcggatcttgctgataaggagagtgcccattccagagcctgtgcccccgcccagtgagtgggtcagctggaagccctgcaggcagtcacagctctctgcctccttccgtaccacatccaggacagaatcaaccagctcggcgccctctgtgtagtggcctttggcccagttgttacctgccccagactgacctggaatgcagtcaggagaaaagctcaattaacagggtatggaagatacatgatgtttccatctttcaacttttcaaataattccctcggatgtatcttctttctccttcactgtgatatattctccccctactgccccataatttaccagcaatagtaggcactacctctaccctccgttagatttcagaacacatttctgtattagcactccaatacaacaatcatctcctaacttttgctgtgtccttgcacccaaataagttgaacacgatggtatatcatctgctaatatcatctgtataactcaccaaatacaaagttgtctggtctaaagatctggccaaaaggacctgagcgaacagagtccatggtcccaggttctagatccaccaggatggcacgaggaacatatttgccacctacagagaataaagttaagagctgtgaaatctggcagaagggaaggtttatagatatactggaaatgggagacagcagggatcagagacttgtcattccaggtcccgccaccaggtggcagcagacgtctttggccccgacggtggttcacgaaagggacaaaatgacagattcacccaaaggggataaggcgtgcccagaaatggaaagagatcccagataagtgggagacagggaagggaacctgagctgcccgggctcctgcccttacctgtggcttcattgtagtacacagagatgcggtccagctgcaggtcgctgtccccgtggtaggtgccggtggggtcgatgccatgttcatcactgatcacctcccagaactgccgagggggagcaacgagaccacaacaggtcaagtcccagccaactatgtccccaactaccattttatttcatctttttcttaattttttttgagacggagtctcgctctgtcaccaggctggagtgcagtggcgctatctcggctcactgcaacctctgcttcccgggttcaagcgattctcctgcctcagcccccggagtagctgggactataggcgcgcaccaacacgcccagctactttttgtatttttagtagagacgggtttcaccatgttggccaggatggtctagatctcttgacctcgtgatccgcccaccttggcctcccaaagtgctgggattacaagggtgagccaccgcgcccagcttcttctaatttttaagacagggtcttcctgttgcccagcctgcagtgcagtggtgcaatcacggatgactacagcgtggaactcccaggctcaaccgatcctcccatctcagcctctcgagtagctgggaccacagacgcgcgccaccacgcccagctaattttttacttttattttttgtagaaacgtggcatgggggagggtctcgctttgttgcccaggatggtctcgaacccctgacctggagggatcccaattcgcccacctcggccccacatctcccattttaattccacaagcgctcaggccgttgttctagggcatggcatcccgtgggcctgccacacccttcccctagacactcgctcccccgagaaagccacagctttccctgctctggatatgtgcagcgggtcccaagtgctcggtgggcggatggaggtcgaccacacttcgataagcgccgctctccttcccccaagctgggcaccgccccaccgcgcggcgcacaaaaggctgggggtctgaggaaagagctgccgccgcagtcgaccaccccccccgccctccacgtgactgcggcgcacgcgcaggtcgagccgccgacaaaagacttcgcgcgtgggcggggccagggacaaaaattccgcgcgcgaggggcggggcccaaggtagcgcgcccctgccggcgggcaacgccgcattgtccccgcgcgcccacggcgccccggccccgccccgcagggccccgcccttctgctacaacgtagcagccgcacttcctcccgcccctcccccgctacactgtaaccgcgcgcaaaaaaaaaaaatcccccttggcctcggaatttttattccttcgctacatttctaccccttgatttaaaggattctttctctcccattaagtcctgagggactcattaaagaaaaccacacacccccattttctcgacatatctgttcacgccctaaaaaagtctctcttaggggccatgaaagcaagtaaaattaatcccgttcttattctccttccacccaggaacaaatacaggaccggccctctggggtcgcgggcgcgttggggtccctggtcttttgtgaaaggtagcgcccagcgcagcccaccctggcgcatcgccccccacccttgcgctggagctctctgcagccgcccgatggcctcaccccttcccgctccggtttggccctaagtaccccgcaggggggttgggcgggatgcacatgggcaaaacctcgccccgctttgtctgcgaccgtttccgcatctctctccctgcccggttctcggaccgttagaagcccttttaagtaacatcttataagtcctcggtcttcccgcccccaaacccgaagagcccttttactagtttctccaaaatgtgcctgccaagaaaaatgattcccagctttccaaaggcaaatgctagctacaattgttatatatataaatgtaacaaacttgagaggggcaaatcttgattaaggatagcgggtgcaaatgccccacaaccattttttcataacttacctggatttttccttgtaaaaagaaataaaagaggtgtaaaattcttaccttggcaccgatctggttgccacactgaccagcctggatgtgcacgatttccctcatggttaaaatttaatttttttgctcgcctcaaggtatgtatggggcaagaaaataagtaattttttttctccgcaggtcgcaggctggaaggttggaatgcgccccagaggctggagcagcgaggtgcaaacgcgacggcaggaaggttctgagagggagaaaggagaggggagggcgcggagggaaagcaggctgggcggggcgcgtgcgc

SEQ ID NO: 3801 - DNA, 1578 bp, Homo sapiens; identical to SEQ ID NO: 3799

SEQ ID NO: 3802 - DNA, 5139 bp, Homo sapiens
cagcttttttcaattcccatttatttttggctcttggggcgatgtcatcttttcaatatgaaaaaaagcagcaagttcaacataaaatagaaatctcaaatgtaggatagaacaaaaccaagtgtgtgaggggggaagcaacagcaaaaggaagaaatgagatgttgcaaaaaagatggaggagggttcccctctcctctggggactgactcaaacactgatgtggcagtatacaccactccagagtcaggggtgttcattcttttttgggagtaagaaaaggtggggattaagaagacgtttctggaggcttagggaccaaggctggtctctttcccccctcccaacccccttgatccctttctctgatcaggggaaaggagctgagtgagggaggtagagttggaaagggaaggattccacttgacagagtgggacagactcctccagagtagagcttggagggagattgaaagtggagataatactgctgacacctcccttgaagctgagatgggaaatggacatacttagaaatttagtgactttaatagcctggatttccctctccaaaacttttagaatggaaaatcccatccccttccttatatagtgacttctacccactaccttctaccattttctactttgggcttaggatgatggccattatctacatgtgttttcagcacctggttggttctaaatgggatctggagacccagcttcttggagatttttaagaggaagtattaactggacaaatggaatgggcaccagaaagaaatacagggtcacccagaatggcagaaacctaggtttcccagagtggaaagagagaggagacattcaacaaacaagtatttattgagcgcctactatgtgccaggcactgttctagaccccccccagaagaaaaaacaaaaaacaagatagaggcagcaaacacaaattctgagggagaggaaaggggcagttgagtaagacggctaagggaactgagaagcctgaggtgatgggggctctgccttaggcctcctcttcggcctcctcaccgaaatcctcctcctcttctgcggtggcatcctggtactgctgatactcagagacgaggtcgttcatgttgctctcagcctcggtgaactccatctcgtccatgccctcgcctgtgtaccagtggaggaaggccttccggcggaacatggcagtgaactgctccgagatgcgcttgaagagctcctggatggctgtgctattgccaatgaaggtgactgccatcttgaggccacgaggtgggatgtcacagacggctgtcttgacattgttggggatccattccacaaagtagctgctgttcttgttctgcacgttaagcatctgctcatcgacctccttcatggacatccgaccacggaagacagcagccacggtgaggtatcggccgtggcgggggtcacaggcagccatcatgttcttggcatcgaagacctgctgggtgagttccggcactgtgagagctcgatactgctggcttccacggctggtgagaggggcaaagccaggcataaagaaatggagacgtgggaaggggaccatgttgactgccaacttgcggaggtcagcattgagctggccagggaaacggaggcaggtggtgacaccactcatggtggctgagacaaggtggttcagatccccgtaggttggtgtggtcagcttcagagtgcggaagcagatatcatagagggcctcgttgtcaatgcaataggtctcatcagtattctctaccaactgatggacggagagggtggcattgtagggctcgaccacggtgtcagacactttgggtgaaggcaccacactgaaggtattcatgatgcgatcagggtattcttctcggatcttgctgataaggagagtgcccattccagagcctgtgcccccgcccagtgagtgggtcagctggaagccctgcaggcagtcacagctctctgcctccttccgtaccacatccaggacagaatcaaccagctcggcgccctctgtgtagtggcctttggcccagttgttacctgccccagactgacctggaatgcagtcaggagaaaagctcaattaacagggtatggaagatacatgatgtttccatctttcaacttttcaaataattccctcggatgtatcttctttctccttcactgtgatatattctccccctactgccccataatttaccagcaatagtaggcactacctctaccctccgttagatttcagaacacatttctgtattagcactccaatacaacaatcatctcctaacttttgctgtgtccttgcacccaaataagttgaacacgatggtatatcatctgctaatatcatctgtataactcaccaaatacaaagttgtctggtctaaagatctggccaaaaggacctgagcgaacagagtccatggtcccaggttctagatccaccaggatggcacgaggaacatatttgccacctacagagaataaagttaagagctgtgaaatctggcagaagggaaggtttatagatatactggaaatgggagacagcagggatcagagacttgtcattccaggtcccgccaccaggtggcagcagacgtctttggccccgacggtggttcacgaaagggacaaaatgacagattcacccaaaggggataaggcgtgcccagaaatggaaagagatcccagataagtgggagacagggaagggaacctgagctgcccgggctcctgcccttacctgtggcttcattgtagtacacagagatgcggtccagctgcaggtcgctgtccccgtggtaggtgccggtggggtcgatgccatgttcatcactgatcacctcccagaactgccgagggggagcaacgagaccacaacaggtcaagtcccagccaactatgtccccaactaccattttatttcatctttttcttaattttttttgagacggagtctcgctctgtcaccaggctggagtgcagtggcgctatctcggctcactgcaacctctgcttcccgggttcaagcgattctcctgcctcagcccccggagtagctgggactataggcgcgcaccaacacgcccagctactttttgtatttttagtagagacgggtttcaccatgttggccaggatggtctagatctcttgacctcgtgatccgcccaccttggcctcccaaagtgctgggattacaagggtgagccaccgcgcccagcttcttctaatttttaagacagggtcttcctgttgcccagcctgcagtgcagtggtgcaatcacggatgactacagcgtggaactcccaggctcaaccgatcctcccatctcagcctctcgagtagctgggaccacagacgcgcgccaccacgcccagctaattttttacttttattttttgtagaaacgtggcatgggggagggtctcgctttgttgcccaggatggtctcgaacccctgacctggagggatcccaattcgcccacctcggccccacatctcccattttaattccacaagcgctcaggccgttgttctagggcatggcatcccgtgggcctgccacacccttcccctagacactcgctcccccgagaaagccacagctttccctgctctggatatgtgcagcgggtcccaagtgctcggtgggcggatggaggtcgaccacacttcgataagcgccgctctccttcccccaagctgggcaccgccccaccgcgcggcgcacaaaaggctgggggtctgaggaaagagctgccgccgcagtcgaccaccccccccgccctccacgtgactgcggcgcacgcgcaggtcgagccgccgacaaaagacttcgcgcgtgggcggggccagggacaaaaattccgcgcgcgaggggcggggcccaaggtagcgcgcccctgccggcgggcaacgccgcattgtccccgcgcgcccacggcgccccggccccgccccgcagggccccgcccttctgctacaacgtagcagccgcacttcctcccgcccctcccccgctacactgtaaccgcgcgcaaaaaaaaaaaatcccccttggcctcggaatttttattccttcgctacatttctaccccttgatttaaaggattctttctctcccattaagtcctgagggactcattaaagaaaaccacacacccccattttctcgacatatctgttcacgccctaaaaaagtctctcttaggggccatgaaagcaagtaaaattaatcccgttcttattctccttccacccaggaacaaatacaggaccggccctctggggtcgcgggcgcgttggggtccctggtcttttgtgaaaggtagcgcccagcgcagcccaccctggcgcatcgccccccacccttgcgctggagctctctgcagccgcccgatggcctcaccccttcccgctccggtttggccctaagtaccccgcaggggggttgggcgggatgcacatgggcaaaacctcgccccgctttgtctgcgaccgtttccgcatctctctccctgcccggttctcggaccgttagaagcccttttaagtaacatcttataagtcctcggtcttcccgcccccaaacccgaagagcccttttactagtttctccaaaatgtgcctgccaagaaaaatgattcccagctttccaaaggcaaatgctagctacaattgttatatatataaatgtaacaaacttgagaggggcaaatcttgattaaggatagcgggtgcaaatgccccacaaccattttttcataacttacctggatttttccttgtaaaaagaaataaaagaggtgtaaaattcttaccttggcaccgatctggttgccacactgaccagcctggatgtgcacgatttccctcatggttaaaatttaatttttttgctcgcctcaaggtatgtatggggcaagaaaataagtaattttttttctccgcaggtcgcaggctggaaggttggaatgcgccccagaggctggagcagcgaggtgcaaacgcgacggcaggaaggttctgagagggagaaaggagaggggagggcgcggagggaaagcaggctgggcggggcgcgcgtgcgccggggc

SEQ ID NO: 3803 - DNA, 21860 bp, Homo sapiens
ctgtttatgaaacacaacatgctgatctttaaaaagttatgttctaccccgaagtgatttgagcgacttatattgatcatacaagtcattttgtattttcagtattggatggttacggttattacatcattgccttactcacataagtgatctagaaggaatgatggcaagtgcagctgcacctactgctaatctgctgcagacttgtgcggccttattgatgtcaccttactgtggaatgcattcacccaacatcgaggttgtgcttgtaaagataggactgcagtctactagaattggcctgaagctcatagacattctcctgagaaattgtgcagcatcaggcagtgatcctacaggtgataattaactttgatatttaaatgtttacatatctgtaaagtaacagcagttgaactgtgcgatcttcgtgcttaactctgttttgggaattattttttcttttagtttatgtttatctctcctctcttctctgatggagtctcactctgttgcccaggctggagtgcagtggcgcaatcttggctcactacaacctccacctccctagtagctgggattacaggcatctgccaccacacccggctaatttttgtatttttagtagagatggggtttctccatattgatcaggctggttttgaactcctgacctcaggtgatccacccaccttggcctcccagagtgctgggattacacgtgtgaaccactgcacccagcctagtttcattatttttagagtttgttctgtgttgttggaatttatggaagcctcatttttaatgaataacttaattcaattaagtaaatcttcccatggttaacttgcttatttagcaaactttttctttggattctttgttgcaagatttgaatagtcctttactttttggaagactaaatggactctcttctgactctacgatagatattctttaccagcttggaacaactcaggatcctggtacaaaagacaggtacgattttatttttcatttaattaagcacacacatgcacataatcatgctatagtaaatgtttctgacagtttttccttagatgatctcataaaagacaatactgtgatatattgtatgtttaccatatgcctcacacgatgtaacttctgcaagtattcatgaacattagacatacatttgtatgtgtttggacatactttaagcaaatttgaacttaaatagaattctttgttaatactgcttttgaggaatggaataaaacatatatttttaagttggctacgtgtgaaaggaaccttgtaaagtgatggtatcagagtcatactgtcttaggtagtactttatatgtgtatatgaatgtagggatattgtgtctgtagttggtacttcaactgtttttataatggttctgtttatttattattgattatcgtattcatcgaaatcttttcatgactttctgcaccctttcctgctgtttacagaatgaaacaatatcataacatgtaaatgacatttgaacacattggctaaatatttagtgatttttttcttttcttttctttttttttttttttttttttttttttacatttaggtaattttaatgagttgtcctaatgtcattctaccttgatgtcttctacttccaaattgataccaacttgaatttttgtttgttttgttttgagatggagtcttgctctgttgcccaggctggagcgcagtggtgcaatcttggctcactgcaagctccaccttctgggttcatgccattcttctgcctcagcctcctgagtagctgggtctacaggcgaccaccactataactgactaatttttttttttttttttttttttttttgtatttttagtagagacggggctttaccgtgttagtcaggatggtctcaatctcctgacctcatgatccgcccacctcaggcctcccaagtgctgggattacaggcatgagccaccgcacccggccaacttgaagtagttttgaaacatatttttgttgataaatttttgagcaaatatttggcattctctgtttttatgtgtagcatccatattagaaaaacagagagatttcttcctgatttatgttactttttaatattttgattaattatgtttaaaatgaagtcatttgatgttttattaatatctttataaattattaaaattatggattacatttaaacatagattgcaattgtttttgatgaagtgaataacaatttgtgccaaatttgaatcataatcgttagtagtggttaaaatatatttaaaatatcagtgttaaatatttttccagaacaggttgcttgaaatctgttaggattatttaatttttaaatattgttgtggctttttaataagaagaaaattaagcttaattcattttctctgcatagtactttttaaaacatgaatgtttgttatataaaactgacattaatgacaaggttgttagactgagaaaaatgtcttccttgtcttctgaattctctttattccccatcatgtgaaattgaaagtcttatctttcagaattagtattatataccttcctatccctgtttcttttagtgtgaagccaagaatcttatattctgaaatagaaattgaaggaaaataaacaaaatgtaaacacagtgttttaagaacttgagaaatctaaaagtctttcgctcccaggttgtggttcaaaattgggtgtgttttactggttcccaactccaggagattgggattagtggggttagttgacctataatcttgttattaatgttagttctaaatgacagatacctgtatttttaaaagtactatgcagagaaaataaattaagcttaatttccatcttataaaaattatacttaaaaaaaatatgtaagtgttgagagtgtattctgttgtcagaatgaatgagtgtgggtggctattactagtatttaatgctagggtccagggatgtgaaacgtgctgtatttcatgagactttgcacaatgaagaattagtcccagatcactgttctagtatgttatctcaaaccttttgatggttgaaattggtaaggttattggaaaattggaactggaactagtatgtctttgttgccgagagatttcctttttttcctattttagattaaaataatcaaaaacaattagtgcattattctcataaataccctactcaccatgcagagatggtatttatctatatgaaatgccaattgcactatatagttggttatatgaattcgttttcttcgtttaagaattcaggccttgttaaaatgggttagtgattctgcaagagtggctgctatgaagagaagtggcaggatgaactacatgtgtcctaactcctcaacagtagagtatggtcttctgatgccatctccttctcatttgcactgtgtagcagccattctgtggcatagttatgagctgcttgtagaatatgacttaccagcactcctggaccaagagctctttgagtaagtatgatttgtgaaatcttttttatcccccagtactagatcagttagtgttcacttgataaaacaaaatattttacatgtttattaggagaaacataatattttgaaagtagcaaatataatcaagtatacttttgaaatgaattgtcaaatattaatttatctttgtgttttaagaagatatgttagcagtactgccttcttttttttaacctaaaattatgcttaatgtagatgttgctgtggttcatagtgtttattctcagttgcaaattttcccaccagattatctttaatgtacaactctggcaggatagtacagctagacaactttgggggtgggcatggtggctcacacctgtaatcccagcactttggaggccgaggtgggaagatcgcttgagtcaggagttcaagaccagcttgggcaacatgcaaaacgttgtctgtacaaaaatgcagaagtcagaaagctgggcacagtggctcatgcctgtaatcccagcactttgggaggccgaggtgggcagatcacgaggtcaggagttcgagaccagcctggccaacatggtgaaaccccgtctctactaaaaatagaaaaactagcccggcgtggtggcgcgtgtctgtaatcccagttacttgggaggctgaggcaggaggatcacttgaacctgggaggtggaggttgcagtgtgctaagattgcaccattgaactcaagcctgggcgacaagagcaagactctgtctcaaaaaaaaaaagtcagccggacacggtggtatgcacctgtcgttccagctacttgggaggctgaggcgcaagaattgtttgagtctgcagaagttcgccatgctgcctcacgccactgtaccccagcctgggcaacagagcgagactctgtctcaaaaaaaataactttggggagctgagatgggaggatcacttgaaacgaggcgtttaatgccagactggctaaaatagagagaccaaatctctacaaaaaaattaaaaattagccaggcatggtggcatgttcctctatccctaactacttgggacgctgaggtgggaggatcacttgaacccaggagttagagcccacactgacctatgatgatggcaccactggcactgcagccagggcaacagagcaagacgtcatctcaaaaaagaacaaaaatgtaaagctagaaaatttgagacttttctagattgtccttttgacaagtagtttttatttacccacatttcttcaccatatttagctaagtctttgctgaacttactgatagctaactattaagtctgcagcagaatacatttttgaagagttcctgtaacacataaaaagtaggcctattgttctctggtaggtcatcatatttggccttagcgattggcataatccatgacttaattactgagcctcactggtagttttttatttgcaaacatgaatttaagccatttgtcatgtggaatttaacgtaaacatttgtttggcatgatttttttgtttgtttgtttctctacatgaccttttcaggtcacacagaatgatagaaccattttaaaataatttacttgattttctgtactcattgacaagtctaactcaacttgcattgtacctacattcttcaattttaaatatatatatgtgtgtctatatatatatatatgcagtcttaaatcttacaatgttttattattcaatgtcaaataaagtatataatgtcagagtatactttgaactataacagaaatatttgaaatagtttcttctaaaaatatacttgtatcattaatatgatatcttttattttttaggttactttttaattggtccatgtctcttccctgcaatatggttttgaagaaagctgttgacagtctactttgctcaatgtgtcacgtacacccaaactatttttctttgctcatgggctggatgggaattacccctcctccagtgcaatgtcatcatagactgtccatgacagatgatagcaaaaagcaggatcttagttcatctttaacagatgactctaaaaatgcacaagcacctctcgcattaactgaatcacatttggctacccttgcttcctcttctcaatctcctgaagctattaaacaattactagactcaggtttgccttctcttcttgtgaggagtctggctagtttctgctttagccacatttctagctcagaaagcattgcccagtcaatagatatttcccaggacaaactcaggcgccatcatgtcccacaacaatgtaataagatgcctatcacagccgacctagttgctcctattcttaggtttttgacagaagttggcaatagccatattatgaaagattggcttggtggttctgaagtcaatccactatggacagcacttctgtttttattgtgtcactctgggtccacttctggaagccataatttaggtgcacaacagaccagtgcaagatcagcttctctttcttcagctgctacaacaggactgactactcaacagcgcacagcaattgagaatgcaactgttgcgttctttctacagtgcatttcatgccatcctaataatcaaaagctgatggcacaggtaagacaaaaaaataacttacattttagttgttttattacataagaaagggccatgtataaaggccaggtaataataaatttagtgagggttgagtgcctttaaggatctgaatttaagctataaagtactgatatctcctttctccccctcaaaatatgctgtcactggaatcacttattctttatgatgagatgactagcagatgcattgggatgctagctagatcatacaacccttattttcaaaaatttctacaaacaaaaagaaaaagcccaaaaaaacatttcagctgctggaacagtatggacactgatcactgagtactgtatgtgccttgaggcattgtgtttttgtgtaacgagattgccatactgatagtttgcttctctttacatgggcattagattaggtttcagataggagactccacataaatcacatacaaaatgtggaagataggctggttgtggtggctcatgcctgtaatcccagcactttgggaggctgaggcgggcagattgcctgaggtcaggagttcaagaccagtctggccaacatggtgaaaccccatctctcctaaaaatacaaaaaaattagccgagtgtggtggcatgtgcctggaatcccagctactcgggaggctgaggcaggggaattgcttgaatcagagaggtggaggttgcagtgagctgaaatcttactactgcactccagcctgggcgacaaagcgagactctgtctcaaaaaaaaaaaaaaaaaatgtggaagataatttatcatactgcactccagtctgggtgacagagtgagactccatctcaaaaaaaaaaaaagtggaagataatttatcatatattatgattatcataataagctgggtgtggtggattgtcatatattatgataatcataatttattatttatcataataaattaaatcctgaaaggtagaattatttcaagagtaattctagttggctttttgccaaattttgcttttggttacctcacgtgaccttgggcatattggttaatcttataacatggggctagcaatacctgcctcaaggattttttgagacagttaaatattttaatttgtgtaacatacctagcatagagcctatatgagatatggtagacactagtaaataacttttctccttgttatttaatagtgctcattcaagtcaaactttagtagtacctagaaaaatagataatataatttttataaaatattgaaggagttagttttattaagaagaagggcaggtcgggtgctgtggcttatacctataatcccagctctttgggaagccaaggcgggtggaacacttgagcttagaagtttgaggccagttttgacaacatggcaaaacctcctgtctaccaaaaaaagaaatcataaccaaaattagccgggcatggtgatacgtgcctttggtctcagctactcaggaggcttgaggtgggaggatcacttgagcctaggaggttgaggctgtagtgagctgagatcacaccactgccctccatcctgggcgacagagcgagaccctgtctcaacaaaaacctaaacaaaacagaggaagaagagaaagatatttaactgcctgtagtaattaattactgggaaaatatctctgctaaatatgcattaaaaggaaatgcttaaattaccaacttcacccgagggcatgattctaggtatttgaaaatttggtttgtgcttctgggtagcatgaactctttgtgtcccattgatttctctcttggtttcttagtaaggctttatatacattttgggggtgaggtggggcaggatctctctctgttgcccaggcctgtagtgcagttgcacaatcagtgagccgtggctcactgaaactttcgggctcaagaagtcctgcctcagcctcccaagtagctgggactactggcacatgccaccatgcccagcttatttttttttggttgggggagtgggtagagacaggtttcaccacgttgcctaggctggtctggaattcctgggctcaaatgatctcttctcttagtttcccaaagttctgagattatcagcatgaccttggccttgttatatatttttaatatgctttttctcataatttttattttaagataaccacaccaatattgactaaagttaacgggagttcgttatgctaggtattcattatgtgcaaaccgtttagtactaattttttctaaccctggacacgtttcttacacttttatctcctttggtattcatatattttaagataaaatcatttctttcctccttaaaaaaaaaaaacttaactactagacccccagagacatttgttctttagctactgatttgatatgttaaaataaacttattcatattttctgtttcctttttatctttcaaaataaaaagctgcatataaatcttgcatttaactttttaaatattttgtcttgccaggttctttgtgaactatttcagacatctcctcaaagagggaaccttccaacatctgggaacatttcagggtttatacgaagattatttttacagttgatgctggaagatgagaaagtgacaatgtttcttcagtctccatgtccagtgagtatttaacacttaatcattggctgtgtatacatgtattttacaattttgtatcagagcctgcagttacctcctatgttctaacttcgagtatagcaaagtgaaactagcacagcctttatacctaatgacagaacttgacaatttcaggatagcgctctccctcatgcctaggaataacataattttaccttagcctgagaagtatagtttgatttgtggaaaaaaatgaaaaaaggtacagagtgataatgcaaaagttgaccaacaaatcatggcaactatgccatatctaaattaattatatcttgtaggatttattgagtattttattcttagatgcttttgagattattttataacaatatgtattccaaaaagttacttcctgatttctttgatttcttgattttcagctgtacaaaggtagaattaatgctactagccacgtcatccagcatccaatgtatggagcaggccacaaattccgtactcttcatttgccagtctcaacaacattatcagatgttcttgacagagtgtcaggcaagtcagatttaagtattagtttttgtttaactttatgtttgatgtatatggaggtttattgtttttataactttattttctgcatccactttgcaaccattgatgactaggaaagttcaagacatctttatagtttgaagcataagaagccagtcaagtggacaaaatgtaaaatacttttaggcacccctaattttttggtttattgtgtcacagtgagaaatgggcagctagaaatacagacaaataattgatggcatgttctcacaataaaccatctggtcattttatactagattaattgcaggatatttggttgaatagcaagattctaattaatacacatttactaaattgaaggtggtgatcagtgatcaagacataaatggagtaggtagaattgactggtcacctcattgtttatcgtagtcagtgaagaaagcagacagaacattttcccctaggttcttgcctgtattttataggatgatacctttaaacaacatatgggatagttttttaaaaagcagtttttgatggcaaaggcatatcaactttttattttatttatttatttaattttgagaggggggtctcactctgtcacccaggctgaagtgcagtggaacgatcttggctcaccacaacctgtgcctcccatgttcaagcaattctcctgcctcagcctcctgagtagctggcattacaggcatgtgccaccatgcccagctaattttttcatttgtttagtagagactgattttcaccatgttggccaggctggtctcgaactcctgacctcaagtgatccgcccacctcggcctcccaaattgctgggattacaggtgtgagctaccgcgcctggcccatatcaactttagatagttggagtgtattgccactgtgaaattctggttaatcagtgagtgaacttgctgagcatctgcaaagtgcaatcactataatttgtcctaagattataaacatgagcaagacacacattccacctcacaagatagttgtgatcttatgtctgttgtcaacttctaaaataaactagaaatgtctgtttgcattataacatgaatataagtagatatatttctatctgtatacataagaagggacctaagtttttaatggaagctgtgaactgaagcaagaataggagtatctaagaaaaaagttggaaatgtctatcagttaaaaatacaaatctaaagcccagagtaaaagagagagttaaagagatttgggagttgttaccacacatagatggtaagtgaaaccatgtgaatggatataatcattataggtaggaaagattgttttctgcttcacaatcgctgtgtctaatatgcatgtgcataaaatcgtaattctttcctaccgttttacaacttatacaataggttgttagcatactgttataaatattaaaaaaaatttatttgaaaatgactgccttatctgttacagagaaacttttttgaaaatttgatgttagacagtattttctatcagtttcctgaaattgtccattctacatgatgaagaaaaatgaaaattaaaaagtaaataaatgggccaggcttgttggctcacacctgtaatcccagcactttgcgaggccaaggcaggtggatcacctcaggtcaggagtttcagaccagccctgccaagatggggaaacacatgtctactaaaaatacaaaaattagttgggtatgatagcgtgcacctgtagtcccacctatctgggggactgaggtaggaaaatcacttgaaccctagaggtggaggttacggtgagccgagattgcgccactgcactccagcctggacgacagagcgagactctctcaaaacacatacaaacaaaattaaataaatgaagaaagtggggaggagcactgaagctcagttattgatattgatatttcatatgtttaacttgaagtgcaaaagtagacattctaatacaaaataactgaaaattgaacattttaattagtctttactgtggaagaatgctattctaaaacattctagcattcaaaatattttacaaaatagttttctgtattgcataaaaataaaagctaatcgctttggaagtacacgacctcaaaagttatatgtgctgaatgtaacctacttagcgattttttttggttctttaaagtggatttatactctttagccatattttctgatatatttacttgtacgtttatattagatcaacatgtataagaataagtaattcagaagtattgcctcagtaaatttacctgctatctgtagcttttgacagtatactttctttttttttgtttgagatggagtctttctctgcattacttgagcccatgagttccagaccacctgggcaacatagcaagacctcatctcaaaaaaaaaaaaaaaaaaaaaaaaaaaagcaaagacaacaagagaatattaaaactggccaaaaaggaagtgacctattattttttctctctctctgttttttttgttttttgttttttgttttgagacggagtctcactctgtcccccaggctgtgcagtggcgcgatctcggctcactgcaacctctgcctcccaggttcaagcaattctcctgcctcagtctgcagagtagctgggattataggcacgcgccaccacactcggctaatttttgtattttttttttttttttagtagagatggggttttgtcatattggccatgctgatgtcgaactcctgacctcaagtgatctgccttcctcggcctcccaaagtgctgagataacaggcatgagccaccacatcaggccgacaatattactttcaaataataacctttatgtgtcagtctgtttgcttttacaaatttctgtcactggttttaagcagtatgatgattgtgtgccttacaattttttcttcacatttcttatgattagagtttgtcgagtttcttgaatctgtgtgttttagatttcactaaatttcgaaatattttggcaattatttcttcaataattgcctcccctttttttataattacagttacttattaggctgtatgaagttgtttgacaccccaaatctgtgtttcctcttttcccccccatcattttttttctctatttttaaattttggataatttcctgtgtctgatctgttagacgttttatatctccttgtccttacttaaagtgtataggttttcttcagctttcttgaacatagtagtctgtttgtactatttttctcttccttatggattgtatgttctcgcttctttatttgcctggagaattttcttggatgccagacaatgtaaattttactttttggggtgctgaatattttgtattctaatatatatattttattttttcatgaaatataatgatattatttgaaaacagtttgttgcttttagacttgcttttaatctttgtaagtaggatcagagcagcttttaatctaaggcaagacttactgtaattattggtaatttttataaaccaatgttgtctagtttggtaactgttaagcacatgaaatgagactaagaaactaaatttttagattgaatttttaattttaatgaattttacctttaaatatgtacctcattagaatagaattaaggtaccaggtttgaaaatgcagttctaaatcccatttgaccccactattaaggctctgtccttatgagtactctgttaggaattcactagatgtctaagagcacaaagcattttattccctgaaaccctggggttgcttgccctgctacttttcgatagtacctttcctggccttcagtggtttgctcacataggttcgtcagtacatgttgaagtcttgaagaccctgtatagatctctggagatccagggatctccagatctctagatgcaaatctgcatagatgcaaatattttcttcctggatttccggctcttacatcctcagtctagggtgacaactaggttgtgctgagctgtggcctaggaattcttttccagacagctcacacaatcctaggggtcacctcattggtttccacttacccaggcatcactgccctgccctgcctgatactcagtgtctgaaaagtattgttaatatatatttctagttaaggttatttcacgtgggagatgaacctgatccttataattccagaagtggaattctaaaacagagcagctttttgcatacgttcaagtacagagaaaaaaataaaacagaaatttgtattaaaaaataaaaaagtaaattaatattagaaaccagagcatttttaaaaggaagttgagaaatttttttttagtgtttgaatggcatttattctttatatttacttttgaaataagggtaataaatgaaaattggctaaacttctaattgcactaagtaaattattacctaatattctttgtgtgcttttcttacctgattatgctatgaattaattttgtgaatttcttattatttaaatgtttcactctgacctgtgtcagtatgtttgccatttttagttgcttggttgtttttgttagaaagtaaaatgtattgttgcaccatgcatttgttatgtgtataaaattttttacttcacaaaactgtctataggcaattagcaattagtattaagaagttgtataaattgaaatcactttcatatactaaaaactgtaaaatgagagttattacaaaagatgttgtttattgttttattgtctcaacctttttaacataaaagaccgggtcataattgtgctaaattagggaagtaaaaagagaattgagctagatgcagtggctcatgcctggaatcctagcactttagtaggctgaggcaggcagatggcttgagcccaggattttgacaacagtctgcacaacatggcgaaacctcgtctctcctaaaaatacagaaattcatggcatgtgcctgtggtctcagttacttgtgaggctgaggtgagatgatcacttgagcctgggatgttgaggctgcagtgaaccgcgattacaccactgcactccagcctgggcaacacagcgagaccttatcttaaaaaaaaaaaaaagagaattggagacttgataacagttatatagtgaaaaaaattaaaatttcaaatcaattcattcagcctttaaatttcttaataactaaatcacattatatgatcacccatttattttataatttttagtggtgtgctgtatgccacagtaatgaaaggaatattcagagtaataactatctatgagagcccttaatactcattttttaaagtaaaacacattaaattttaaaacatattactttgttgtctaagattcctgtttttgtcctaaataaaaattaacagaacaggaaatctgttacagaaatttgttcttttatactttcatttgtaatataagcagaagtctagtttaatgctatagactgaatcttgagcttgagtcccatatttgccatatacagattatatcagtagcctttctaaggctgtttcttcattttgaaaataacattcatttctatgttgcgaggactgaattagatgcagttgccaagcacattgaactatggctaaaataaagcaagttttcatgctactggtttttcattgtttctggaggtggtaccattaaaatactgtatataatactttacagagattagatcttaaatattctggcttaagtacagtggtgagtcttcctcatcaatgtcagtaaagattgggtatcaggcctttacctcatgccatttctcctaaattcctttatattgccttagtattaaggataatattatcttgcataatctccctctgaaacatatattacttctcttcttaatgatttggaaaagcagtgtattttagataatatcttcttacagatactccaagtatcacagctaaattaattagtgaacaaaaagatgacaaagaaaagaaaaaccatgaagagaaagaaaaagttaaagcggaaaatggatttcaagacaattacagtgttgttgttgcctctggtatgctttctattttttataatcttgattttgtttgggtttctataaaatattagaattttagttacaggaaatttatgtaatacattgtactaatataaaaagctgactcgtaatgatgttttaatactagatttttatctttttatttttattttttttcactttccactaaataggttgtcatctgtatttcagagattatagcagctagctacagtttttactttttaggaaaatagttacagatgcaatgccaaaattatttatttgttgtcatgaaggacgaatagaattgggagattagatattggattagaaggaacatttctgttttctgacattagctaggaatgcatgccttattaaaatattttaggaacactgttttccttcatattagtgtgttgactatgtagaatcttactgatccttttcttttagggctgaagtctcaatctaaacgtgctgtgtcagctacaccacctcgcccaccatccaggagggggaggacaatacctgataaaataggaagtacttcaggagcagaggctgccaacaaaataattactgtcccagtgtttcacctgtttcacaaactcttggcaggtaatattcctcaatgaataaacgtcaaagaaattttagtagccttaaaactatgtaaatcagaggcacagtcaccaaaatcattttaatcaggtgccattgatgagatcagtgagttagtgagacttcttccatacagttcctccgaagagaagtgagagcaaaggaggagtaatctattacgtatcctttttaacactatcaagttatttatttctactttactggttttctaagtttttctgtcagtgtgccatgaaatgattgatgaaatagacatttagagagttcatgacaagttatttaggaaacaccgtggggcaaatttgtaggactagttcaagcagtagaactcttagaccactggtagttaagccatatgttcttcccagataaaacacatttattgagcaccatcctgtctgttgttcaaggtgataacaggttgagcatccctaatccaaaaattcagtatctgatactttttgagtgctggcatgacacaagtggaaaattccacatccgacctcatatgacggttacagtctaaacacaggcacacaacacagttttttcagtgtccacaagaggaaaaagatcttccagcccccttcagatattttttgagcatgcccgattcctccctacatatccacagtgggtaacaaaactgcaaatgtgcatgccagacgtgccaacagcaggtttcccacgatgccccacatgatgccaagatgtgtgtgcattactgtgtttttttgctctgtggtgttggaaatttaaaaaaggccccagatacccttatgggtaacaatgataaaaagaggaagtatttatgtttatctgtagcacagaaaaacaagctgttggagaaactggacagcaatgtaagtgtgaaatgtctttcaagagagtatggtgttggagtgaccaccatacatgacctgaacaaacagaaagataaaccattgatgttctgtgctgcaagtggtgaatagaggttaatgaaaaatagaaaaagcactccatgaagctaaaaatgaagatattgattgtgtattgaaacagtgaatccatcagtgttggcagtgaacacgtgcctcttaatggtatgctgatcatgaaacaagtaacgatctatcatgatgaactgaatgttgaaaggagctgtgaatattcaacacactggttgcagaagtttaagagaagatacgacattacatttttaaagatttgtggtgataaagcatctgatgatcaggaagcaatggagaagttcattgataaatttgccaaagtcatggctgatgaaaatctgccagaacagtttataatgctgatgaaatatatccctgttctggtgttattgtctcaaaaagacactgggctacagttgatgggacagcccctccaggaattaaggataccaaggacagaataactgtcctgggatgtgctaatgcaactggcatacataagtacaaacatgctctgataggcaaaacctttcacacttgttgttttcaaggagtgaatttcttaccagtccatggttactctgacacaaaagtatggatcaccacagacatcttttctgattggtttcataaacactttgtaccagtggcttgtatgtactgcccataagctagactggatgatgtaggagtttgttattccttgatatcacccaattcatcctccagctaaaattctcaaaactaatgtttatgccatgtactttccctcagatgtgacttcattaattcagccatgtgaccagggtatctttagatcaatgaacagaaaatataaatccactttcttgaacagcatgctggcagcagtgaacagaggcatgggtgcagaaaattttcaaaaggagtttagtataaagaatgccatatatgttgttgccaatacttggaacacagtgacaaagacacagttgtgcatgtctggcacaacctctggcctgcaactgtgtttagtgataatgatgaactgtgtgtgtgtgactttgaaggattctgtatgtcaagtgaaaaaaaatgatgtctgacctccttacatatgtaaaaaatataccttcagagttcagcagtaagctggaagaagtagatgtcaaagaagttttgaactttgataataatgcttcagttattcattcattgactggtggtaaaatagtcgaaatggttttgaatcagggttatgatagtgatgaagaaggtcaagataacaccacagaaaaggtgcttatagaagaagacatggtgaaaatgtatggtgggcatattgaaggattacggcagcgtgcattaacaacagaatgaaaaaccatgtcagtttttaaaattgaagagagacttctgagctaaaaaccatgttaatgaggcagatgactccacaagaaccatttttaaaagccttccagcagaatgtctcttcatcccccgtaggatccacttcctggtccctcagctgcttctgatgtttcttcttaactaaaaaacacagtttatagtaacctttgaataaaaacacagcatcataggtgaagactgaaagcctgctgttgtttgtagctgctttttcctttttttttttttgagacgtagtttcactcttgttgcccaggctggagtgcaatggcgtgatctcggctcactgcaacctccgcctcctgggttcaagcagttctcctgcctcagcctcccgagtagctgggattacaggcgaccaccaccacgcctggctaatttttgtatatttgatagagacggggtttcaccatgttgaccaggctggtcttgatcttctggccttaggtgatccacttgccttggcctcccaaagtgctgggattgcaggcatgagccactacccccggctctgtggttggttttgtttaatagctgaaacaggtatcctggtgatgctactatgctgcttagttgtcctgacacattattttttcagtgttaatggtatgtcatatttttactgttaagtacttaatgtatgaataaatgtaagaaaacaattgcctattgttagcatgtagattaagagtcaggaatgatgactcttgttgacatgggtggctgagatagtgacacctttgctttctgatggttcagggtacacaaactttattacaggcacaaaattatcaaaaatacggtataaaattaccttaaggctatgtatataagggatgtgtgtatgtgtgtatacacacaaaaataaattttgtgtttccacttggatcccctccctaagataactcattgtgtacatgcaaatattagaaaatgcaaaaaaaagaaaaaaaaagaaatctgaaacagttctagtctcaagcattttggatgagggatacccatcctctattttatcaccattttcatgctgtattaaaatgaaattgccaactcagttcaaaggaatttttcttcttagctttacattgttgattcatggtggaggcgaacaaactatcgactggtgggttggataccttggtccagagaggtccttgtgacatatctcatggcccattacctaggtgatgtgagtcttgccttctgcctgcaataaagttttgttggaatgcagctatgcccatttactagtgtattgtccatagctgcttctctgctacaatgtagattagcagttgtaacagagactatatggcccccccaggttaaagtatttattagctgtccttttatagaaaaaaatgtcccacatcagatttatggaaatgtctgttcctttgtttacgttttgcccatgactttttaacactttcacagacattattgttcattattatatgtcagaaataaactcactttttgtaaactttccaatggctgttgaattttttaattgttttgaaattggtttcagaatcaaactcttgcctgtaatttagtaaaagcagataataattaaaccaagtaaatgtttctttctcggtttccagatttaacttagttatatcattttaggccagccattgccagctgaaatgacacttgcccagcttttaactctcctatatgaccgaaaacttcctcagggttaccgctcaatagatctgactgttaaattgggatcaagagttataacagaccccagtctatcaaaaacagattcttataaaagactacaccctgaaaaaggtatgtgcataatactactttaaaaattacagactgtcatacaaagaggcagagatttctatagctaatgacttaattgacttgtgtttttattatatcaacataagatataatttttttatgactgaatttttgtaaatataaaaaatggccattatttcatttggaaactaagttgcattatttcttataacatcatttgttttatgagcgcatgtactttaatttctgatatttctgtgagagctatgtgaattgtcattttataataaaagtgagaaactcaacttacaactttgttataatttatattgagtggcatttcttgcatataaacatgttttctcatataattgggatcacatatttttgttttttacttatatattccattaattttttttgagacagagtctttttctgtctcccaggtcggagtgcagaggcacgatcttagttcactgcaacctccgcctcccgagttcaagtgattttcctgcctcagcctcccgagaagctgggattactggcacccaccaccatgcctggctaatttttgtattttttgtagagagaaggtttcaccatgttggccaagctactctgtaactcctgacctcaacttatctgcccgcttcggcctcacaaagtgctgggatataggcatgagccaccgcacccggcccttatattccattaaatatttttgaatatccatttttgaattggctattttttcataaaaatgtaagaaaatttatttgttccccaatcatcgaaacattgtggttgtttccaatttttactcctataaatgctatataagtagttttcatagtgtgagtatgatatgaacttacttaaactttccatctttctcatgactaaaattcagtctttagttattggtcttttgtattcttcagcaaattttggtacattgtctttgcccagtttttcagcacgattatttctctcttttgttttaatgtttaaagggtctggttacgtgaccttttggttttctttggtgagtaattcagagttaaactaatatggtataattttttgttttaagtaagggaagtctttgtcattaatttttcttaataggatactttagagcatattatttgctatgagaactttgagaacttatttattttaacataggatatacgttaaagtatgccctaaaggacagtgcttctcaaacttcagtatgcttacaaatgaccagcatcatactgttaaaatggagattcttcatttcaaactagcttgcaggtgatgccaatactactagtccatgaaccattcttccaataacaagactaaagaaggcagtatcagaagtcatttaaaggtcattgtaccgtctagccataatacagctatatctaaataaatgatgttttgtgctcttttttgagtagcaagaaagcagtaatacctgcttttgtaaatgaaagaatattataaaaatataccctttcttacctattcagttatttgtaatttattgtctagatcatggagacttacttgctagctgtccagaagatgaggctctcactccaggtgatgaatgcatggatgggatactggatgaatctttgcttgaaacctgtccaattcagtcaccattacaagtttttgcaggaatgggtg

SEQ ID NO: 3804 - DNA, 428 bp, Homo sapiens
atctagtagtaatagaataattggtagataaacaagttttattacatttttccccaaattatttaaaatagtaaaccatagcatattaatcaaaggtagttttgtattatttgtgataattttgagtaaaatagaaatgatgacataattacctatttggctggttttattcatagggagcatcaggtacatgtgcatcacacatctttggttcctctttttttaggtgaatattagactgtttaagtataatttttattgtagatcaaatattttgtgttgaaaaatagctccaacattaattatggtgaaagtcattgtcaaactatattttgttgtataagttttccttttacaagttcatgatgaatacaactgtgaaagctgctattttactgggattttaataaactgttcaatctagtata

SEQ ID NO: 3805 - DNA, 1592 bp, Homo sapiens
tgtggttcactatattgattagtaactggaaatggggtcctggtaatacatacctaagaatgtgaaagtgactttagaattgggtacttggcagagtatggaataattttgagtagcatgatttaaaaaaaaaatctagattaccttgaatagattgttagataaaatgtggatgataaagcttctgccagtgagggcccagaaggaagtaaggatcataggggagaaaacctacagtgtcttagagaatatctgaattgtcataagcagacttggtagacatacaggtgtttaaagtgctgacaaggtggtttagaaggaaatgaggaacatgttaccggaacctgaaggaaaagggatctttgtcatatagaagcagaactattaactcatttgtgtcctaaatatagaaagcagcacttctgctgtaatgaacttggatgtaatgaacttacatgtaatgaacatgtaatgaacttggatgtttagctgagatttccacacaaagtggtgaaagtacaacctgtctttttcttgctgcttatagtgaaatgtgcgaggaaagatataaattgagagaagaactgttgaaaaacaagcaatcagtgcttgtcaatttgtgaaattacctatccagatcacagaaggtgctaaaatttagatatttgctatcagaaaagcatgctccaaagtataagccaagagtgaggctggacaaccttttgctagtgccttagaaacatcaaaagtcagagtattcagtcacatagagggctctttgaagagattaggcatgtaactcatggatctcctcagccgtctaagcataagcgaggaatagaggatatgatgtgatgatggaagcatccaagagccatggaacgtaagttgcctctggaagctggaaaaggtgaggaactgttatttcctaagagcctccagaagcaatgcatcctttgattttagtcccataagacctgttttggatttctgacctctggaattttaaaataataaattgtgctgttctgagccactgagtttgtggcaatgtgttatagcagcagtagaaaactaatacagagtttggtctgtagttgtaatgcctttgtctggttttggtgtcaggatactactagctatatgggatgggttgagaatttctaatatatcaaattaaggatactgttaggtgtgtttaataagagacactgtctgggcatggtgtaatcctagcctgtaatcctgtaatcacacttgtaatcccagcactttgggaggccaaggcaggagggtcacctgaggtcagcagttcgagatcagcctggccaacatggtgaaaccccgtctctactaaaaatacaaaaattagcccggtgtggtagtgggtgcctgttatcccagccgttcaggaggctgaggcaagagaattgcttgaacccgggaggtggaggttgcagtgagccgagatggcttcattgcactcaagcttgggtgacaagagtgaaattccatctcaaaaaaaaaaaaaaaaagagacactgcagattgcaacagtagtgaactggaagatgtatcaaaagaaatcattc

SEQ ID NO: 3806 - DNA, 18878 bp, Homo sapiens
gagactttcagattaaaccagttgaattaccagaaaacaggtaaggtggttgctaaattatcttgcttagtagaacactgtcatttcccagttttgaaaatgtttccttcagttgataccaatatattcaaacgtatttttccttttgtacattattgctaaaaaatattcctgaacaaggaacaacctaaaaatcaaataaaagctctaaaaatcttttgtgaaagtctgcctactcagtaggatctagctgcctcatcttgtgttttcattgccttgtttcattcacttctttgaaactatcacactgcactatagtcgttggtttcatcgcaaaggcgaagactgtgggttattctctgtgtccctagtgcctggcacttaaccatttttttattgaatcaaaaactctattggttgtaaggtgcaccttttaaaaatgtactgtcataagaaagaggaaacactgcccattataattataaaaatgccattgattttaagaaagatccaagtttctgagagattaaaatattggggaggggggagtttgttttagaatcaaggaaatatgcgtgcaagtgcctttctgtcagcagctcaccaaagtcaggattctggatggtgcctgagagtctcttagcctgtcctcatggttgcaggatgaatgctgcagctccaagcatcccataatacatcagccttcctggcaagagcaaaaagtttgggaggactagggctctccttttgttggagaggaacatcttcccctggagtcatgaaacagacatctgctaatattttgttaatcagaatttagtcacatgctacccttgctataactgaacctggagagcttaagttggctaaaagggaatgaactgctgtgatgggcttattagattagtcatgatttattgtcacaggcagagtatattgttgccctgaaaaacactgggattctgttaacaaaaggaggaggaatggctgctgtgctggcaagtgtctcccacaggaagcttctaaatatgacttcacagagatttcttatatctgcaaagatggtacttttttgcatttaatagtgaagaattgcttgttttgtgctcaagacagaaagacatttttattgttgttgttgttgttttttgagatggagtgtcgctctgtcgcccaagctggagtacagtggcatgatcttggctcactgcaacctctgcttcccaggttcaagcgattctcttgacttagcctcctgagtagctgggattataggcgtgcgccaccatgcccagctaatttttgtatttgtagtagagacagggtttcaccttgttggtcaggctggtctcaaactcctgaccttgttatctatctgcctcagcctcccaaagtgctgggactacaggtgtgagccactgcgccagccattgttgttttttgagacggaatcttgctcagttgcctaggctggagtgcagtggtgcaatctcagctcactgcggcctccatctcctaggttcaagcaattctcctgcctcagcctcctaagtagctgggactataaagcatgggccaccacacccagctaatttttgtatttttagtagagatagtatttcaccatgttggccaggctggtcttgaactcctgacctcaggtgatcttcccgccttggcctcccaaaatgctgggattacaggcatgagccaccacacctgaccaatactggttttaatgaaatgttatgttgtatatataagttgttacagtttggtacctagttaagcagttgtcccatgtatcacatggaaatatgatatttttaggaaataaagtccttcaacctactacatactgaattgttatcttattattattattttatttttttgagacagagtctcgctctgttgtccaggctggagtgtagtggcactatctcggctcactgcaacctctggccaggctgatctcgaactcctcacctcaggtgaactgcctgcctcggcctccaatagtgctgggattacaggcgtaagtcacaacgcccagcctaaattgttatcttagactacctaattataaacatcttaggaaacttactagtaacagggaactaaaattaacagctttgaactttccaatattcttattatatggcactgtcatatgctgtttcttggattaatgttggctatccagttagttgagagcgattctttccaatgagatgcttattgcaaaaaatcactaacttttaaaataaagtatgccctcagttgaagtatgcctgggaaatctttccttggtccaaatcactgggattgatcttaccctaaacccatagtatttgtgcttttgaaagtgatttgaaactcaaatattttggtttttgcccccctcctttcttttttcactgccccagcttgaagaagagagtaaaggagattgtacataaagcgttttgggattgcttgagtgtgcagctaagtgaagatcccccagcatatgaccatgctatcaaacttgtaggagaaatcaaagaggtgaggcaaagagtgaattgtgatgcttttctggtgtgttaggagtgtttattcaacttcttgtgtcaccaccagaagactttaaagaaattgaaggatcaagaagttaaagtacttgccagaaggtggatcaagagtgtttttggcttaatgcccttttttaaaaaaaagttttaagcaaaccatgataacctgaaggcatttaagacaacaaagttatttcacaaaatctagtttatttataaattttaataggtgtggacacattccatttataatggccaaaaagtgactcagcctttgggacagagaaagctttaggtggagggactgtttttgcagcgcctttagcagtagcatcaaagaagaaatgtatgcatggaaattgtcatcagctatggttggctcacaggctcacattaataaacatgcttttcttttttcaccattaacagttttttcttctatccatttaattgctacctagggcttaaatggaagcttaagtagctattgtaaatgatttgtaaacatgtttttctgtaggtttgttgaataagaagtaaaatatgtgcaatattacgtagcaattgagaagcccttatttggatagttataaattacatataattagaaatgatgtctaaagaattttgattaaacttagctgtgttctcttgtagactctcttatctttcttgctgcctggtcatactagactgagaaaccagataacagaagtcttggatctggatctgataaagcaggaagcagagaatggggcgctagacatttccaagctggcagaattcattattggcatgatggggacactgtgtgcacctgctcgagatgaggaagttaagaaactaaaggacattaaggaaatagtgccccttttcaggtatggaaatatgttaatcatactccgtgcaactacaattcagaggcattttcttttttttctttttttttttttttgagacagagtctcactctgttgcaaaggctggagtgcaatggcgtgatcttggttcactgcaacctccacctcctggattcaagcaattctcgtgcctcagcctcctgagtagctgggattataggcacgcaccaccgtgcccagctaatttttgtatttttagtaaagatggtgtttcactacgttggccaggctggtctcgaactcctgacctcaggtgattggctgccttggcttcccaaagtgctgggattacaggcgtgagccactgtgcccagaccagaactattttcgatttaaacttcctgaagtcttggtactcatggatttaaaaaaaaaaaaaaaaaatttgtaaaatgcagaaaagtaaaaggaagacatttactcataattttacctctcagaggcataatcactcttatcattttgatacatagatatattttttatacattaatttccttcaacattttcttttgaaaaattccaaacctacagaaaagttacaaaaacagtacaatcaacactcacaagcccttcatgtggatccatcagtttttatcatgttgtcacatttgctatgctgcccaggctggtctggaactcctgggctcaagcagtcctcccgccttggcctcccaaagtgttgggattacaggtgtgagccacgcgtctggtcctcttttcctttaatgctatgtttactttacaaatgcttgcttctaaatccttttctctttcagagaaattttttctgtgttggacctaatgaaagtggacatggccaactttgctatcagtagcatcaggcctcatctcatgcagcagtcagttgaatacgaaaggaagaagtttcaagagattttggagaggcaaccaagtatgttgaatattttgtggtactttttttgttgtctgtggtttttcattttagctgccatagcttgttgcataatattattttcagaacaaaactaaaatttagtaggagaatagtctaatttgaagaaggaaaagcacaaaatgttgggactacatctagagttgttaagcattgaaaagaaaacttaattgacaagcaaaaggaatgtgagtaggctatgagaatagaaattaaaaacaatgaattcctaaattataaatggttttttgatgaaaacaccagtttgaagtaaaatacattcttggtcttgatttttgaaaacatgacagacatcctgtgaatgttaattcacttttcttctccctgtgtggcacagcaggaaatttaactttgcttttgttctggatgcataaatcttcttgtttcatacccaggaagagtctcatttttatgaacctctccgatgactgcagaaaacagacgactctcagaatctaaaactacgttgtatttctagggtgctttttatggtctctgcattgctaactgacattctgggtaaatttcagtcttcagattcaatgtatgatgaattccatttggcctctaactttgctgacgaggagatgaaaacagcagtctctgggttggttgggttgcctgaccagattagttaagtgaatgccccatgcagttgattcatccagccccaggcagaggagtctgaggtggtgctggggccggggcaggttgagaaaggacagggtagaggtagaagtagaagaagtttggtaatgtttactaagtgccaggcttgtgccaagggctggatgtacatgatcatatgtaatcctcacacagtaagctgatgagccaggcaccttttttttaatcccattttacagatgttggaaacaggttttgggagatttttgaccagaatggattgaccacaagctcacactctcaccagtgttgtgagagtactgggaagagttttttcttgttgttgttgttgttttctttgagatagagtctcctcactctgtcacccaggctggagtgcagtggcacgatctctgctcactgcaacctccgctaggcagagttttgtagcctgaagagccgtaatattaaggcctggacctggaagctggggcatagtggaggactcactggtagggtggaagcagctacagtgcctgcatctagcacttaactcacaacatgaaagcctgggtttcccaaagctggggggttacggagaatattatcagcagaagagagggtgaagccagatggcccaggagtcatgaccgagagctcagggtgaactggagctgcatccccctgccccagtgaagagcaaaccacagctgtgaccttggccgcccacttggttttaaggaagcaggaagcctccactaacagagctgcaacacctgctgggacctgacaggtgcagtttttatcagatgatgtgtgagatcctccagctctctctctgtatccctcagagtgccccctgcattaccaagcttagaaaagtaggggtgcaggagggctgctgaaagccagatggggcttccctgacagagttcactttcccccaggttgaaaggaagccagattgatacaaggttaagatctaaacaaggaaaagcctcatcatcagtgtagaggatactttacacagggaaactctagctggtgtctcatcctatctgtctctagagctggagttgccagggctttggggtccatctcatgcagtggtcaggatgggagagaagggaaggaaggtttgttaaataccaggtgggtggcaaggcctggctaggtgtcatgtatttgttactattattattattattttagacagggtctagctctgtcccccaggctggagtacagtggtgtgatcaccactcactgcaactttaacctccaggactcaagtgattctcctgcctcagcctcccagctagctggggctacaggcatgtgccaccatgcccagctaatttttgtatcttttgtagagacagagccttgccgcattgcccaggctggtctcgaactcctgggctcaagcagtcttcccacctcagcctcctaaagtgctgggattacaggcatgagccaccatgcctggcttattcattatcttgtttaatcctcacaacagcctgtgaggtgggtgttgtaaatttgcctatatcaggcatctgaaactcagacacattatgacttgcctgagatccctcagttagtcattggcactactatgatttgatccaagttttatttgattccaaagttcatactttatactttatcactccaccaggacatcgattgtcccttaagtaattccgagaagcatcccttcttggtgtcaaggtaatgtgtgcagctttgtttttcacagattccctggactttgtcacccagtggctggaagaagcctcagaggaccttatgactcagaagtataaacacgccctgccagtggggggaatggctgctggctctggggacatgcccaggctgagccctgttgctgtccagaattacgcttacctgaagcttctgaagtgggaccacctccagaggccgttccccgaagtaggtctcctgagccatctcactactcatatttgtttttgtgctgctgaactttttaaaaagaatagctttggccaggcacggtggctcactcctgtaatcccagcactttgggaggcagaggcaggcagattgcttgaggtcaggagttcaagacttgcctgggcaacatggcaaaacaccctctgtactaaaaatacaaaaaattagctgggcgtggtagcaggggcctgtagccccagctacttgggaggctgaggcagagaattgcttgaacctgggaggcggagcttgcagtgagccaagattgcaccactgcactccagcctgggggacagagcgagactctgtctcaaaaaataaaaataaataagtaaataaataaaataaaaaataaaaagaatagctttattctgatataattcatgtaccagaagattctcccttttaaagtgtacaactcagtgttttctagtatagtcacagagttacgcatccattgccactgtttaattgagaacattttcatcacctccaatagaaacgctgcatccatcagcggtcactgccctccccccctccctccaacgcctgaagccacagatctgctttctgtctctatggatttgcctatcctggacattttatttaaatgaaatcatacactaccagccttttgtgcctggcttctttcaccaatgttttttcacgttgtagcacatatagcagtagtttagtcctcttttccactgtgttttttttgttgttgtggtaaaatacacataacataaagtttaccattttaaccatttctagttgtccagttcagtggcattaagtgcatccacattgttgtgcaaccattgccaccagccacctccaaaacattttcatttttccttctgtgaaactgtcttcccaccaaacacaccaaacagtaattcccattgcccccgccctctggcccctggcggccaccattctactttgagtctctgtgaattggactaatccgggtacttaatatgagtggaattatacaatctttgtccttttgggtctggcttattttacttagcataatgtcttcaaggttcatttatgttgtagtatgtgtcagtgttccctttctgggttttttaaaatttttttaaattttagagacagggtctcattgaattgctcaggctaggtggtacgacagctcactgtaactttgaacttcagggcccaagtgatcctcctgcctcagcctcctgggtagctaggactacaagagtgtaccaccacacccagctaatttttaagtgtgttttttgtggagacaggggtctcgctatgttactcaggctgatcttaaactcctggcctcaagtggtcctccctccttggcctcccagtgttgggattacaggcatgagctaccatgcccagccctcctttcttttttaggctgaataatatattttactgtatggatgtaccacattttgtttattcattcatcagttgacaaacatttgggttgttattataaattatgcttctgtgaatattccagtacaagtttttgcatggacatatgtttttacctctcttggtaacgtacctaggattagaattgctgggttacatggtgactctaaagtttaacattttgaggaactgccaaactgatttccaaagcagctgcatcattttaccatcccaccagcaatgtatgaggctccagtctgtgctgctgaatttttctcctgtttttactcatcttgatggaaaccacaacagaggtgtggttgttcacagctttatctaaagaaacttcttccccttccatgctgaacaatatttttttctttttatgtttttcacaatacatacttctaactgcaagacctctttaagaagatgactaagaagggattcccccagtgtttctctaaatagctgttttgttatgtagactccccctctctttttggggggtacgtgagcttcttatcactagcctcagatccagatacttctctaaatatctttcttataagttccttatttttcctttcaagaagttgtgagcttaaggtttcacctcttgcctctgagttccccgttttgtgctggaggaagctctaaagagaatgtcaaattggagatgggaaaatgttccctttgaactgtggcatgttctcttctggagggaagttctcagcctgacatgtctatttaaaaatagctgtgggagaccatccaatacctcccttttccccaccgctgatcatcttccccaggccttagatacccctgcttcttcatcccataaatatccctaagccctctctatggagagggggatgtgagacctgttctccagcctcctcacttggcagtcttatgaataaaccctctcgtaaaaaaaataaataaaaaagaaaagaaaagaaacgctgtggggaagatggtgatggtccctggggacagctgtctactccaggaattgatccttggcaatctgcatcctaaactcacgtcctgctgttgggaagccacaaagccatgtgaagtcagaaaacaggccgacgatgagtccttgggattgtatttgtatcagcagaggattctcaatcctcagggtttttacttcttggctgtgacccacattgttcatgtcttgacttggcaaatctcagtttctgacagcaagaaaggtccttagagtccattcgatgagcctgtaaactctcagatcagattcccatctgtgcagcctttcccttctccttccctcagccacacgggtgggggtgctggcatggtaggacccaggactgtctttaacatgggggaggcagtcatgggaatgtgcttgctttccgggaggctttagattgttctctgtcacttctactctctgtgcttcctgtttctttctcttcctctttatttactcgccagttcttacaagcttcctttgtgctgggtgctgagcggataccaagatgaataaacgtaggctctgcctgcaaggcagtcctcccttccattgctctgggattttttttgttgttgttttaagatggagtctcactatgttgtccaagctgcagtgtagtggctattcacaggcataatcgtagtgcactgcagcctcgaaattccggcctcagtgatcttcctgcctgagcctcccagtagctgggactgcaggcacccaccatcgcacctggccttccattgctctgtacagggtgactggctgtcctagtttgctagggactgagtgagggttcacaggacttgggaatttccatttgaaaactgggacagtcccagacaaactgggaggagttggtgaccctaggtctgtgcctcattatacttttcttcctaacaataagtataacttttatttatcgagtgctggctctgccagccactttatatgtagcatctttcttcagctttaaaacagccctgtgatgtgggagtccccattctgcagaggcccgacaaagttggggatgcatgcatgaggtcatgctatttttttttttgagaaggagtttcactcttgttgcccaggctgaagtacaaaggtgcaatctcagctcactgcaacctctgcttcctgggttcaagagattctcctgcctcatcctcccgagtagctggtattataggcatgcaccaccacacccggctagttttgtatttttagtagagatggggttttaccatgttggtcaggctggtcttgaactcctgacctcaggtgatctgcccacctcggcctcccaaagcgctgggattacaggcgtgagccaccacggccagccggggaggtcatggtattaagcacggagcctggctttacacccaggcctgtctgtgttcttagtgagggcgctatactgcatccttgctcaggaggaacggctctgagatagaggggttatttcacaccagactccctcaaagctctgacacactagcgcaaaccctgagggaagctgcagaggcaggtgtgggggctgtggcgctcccgccctctgctggccaacctggacctgcagctcagcgatggcctcttctattcattacagacagttttaatggaccagtctcgcttccacgagctccagttgcagctggaacaactgaccatcctgggggctgtgttgctggtcaccttcagcatggcagcgccaggaatttccagccaggccgactttgctgagaaactcaagatgattgtgaagattttgctaacagatatgcacctgccgtaagtggaactttgatgcgtggatgggacgcagtggatgtcagagagccgactggagtctcccagaggggtctcccactgtaaggcagagcccagggccactctctaggaactgagaagaaaccttgctgtctcagttggttcacttggcgaagaccccagcagagtttatttagggtcatagggtcaaagttagaatctgctgcagggttagcagagctctaggatagtggcttcaaaatgtgtgtgactagccgagtagcctgtcgggccttagaggccacaccaaggagttgggttattgtcctaagagcagtagggagccattgaaggatttgaagcaagagggggaacgtaattagatttatgcccttaagtttaaattttggcatggggcacatagtagatgtgaggcagcatttaggaggcgagagaagaagtggctcgggctggggggtaagccatgggcagggtggggagcgctggtaccaatggttgcttgccttgaggaattggagatcccgggcttagaggtcccgcggccctccattccctgttagcatgctcctcccggggcctggctcggtgttgagtgccatcaactcatttgttctccctacgcagggagcaggatgctgtctgaccccttccttctttaatggggttgtctttgtctcctgacctccaaggttcttgtgtttgtttgttgagtgctttattcctctcccaaagccattcaaatgtattaaactcttactggagcttatgaagaaactggaacccagagacattaattgggacaaaaatgtttgtgactaggacctgcagtaagaaattcattttccattgtgacctagtacacacttaacacacgtgtaacagaaacgaaaacttctcaaactggaactgaccctaactgtgtttaatgcagcctgattgtttctactctattcttattccattaaaaaaaaaattggttgctacccactgaattgctttcataaccaactaacagtgaaaagcagagctctagaggaaggtcatgagagaaaccagctatattcctgcagagctgcatgtatgtggttgaagtgttctgcccttgcttgttccctgtaggcgttctgtgctcagtgtaatgcatcattttcttacccagcacgagtccgcatctgcacgcgtgcaggcttcagtgaccgctcctaccatggagtcatgttgggtgacttctatggtttccagcctatagaatatctttgagtggttctaagtaaatgctctatctaacaaggtccaattcagagacttcttcaagggaagtaccccctaaacattctcatccttacaaaatggaggaattttactgctgaattttcacaaagcatggctgtgttcagtgcagtgtggggcgtgtccgtaagttgtgactagggcctcaacagttttgacagtcaaactagtttgctgagaggccaggaaacttgtttgctcagctgagggcctagcctgaggcctttgcacaggtacagctctgggctgtcacctaggtcccctgcctggagaactactctgtcaaagctcccgctgagggtgggatccaggtcagtgctttcttgggagcccagccttgcactcccatatcctccctggtcctccaggggtgggcacagagctggtgccaatggtgagtgccagggcttgctcccatgccccccagtaattctacatacaaaggatctagacccacaacagaggcagttaccttctcacagcatgcctgccagcatgggggctccccacaggcaccctgggagagcctgggggacccagggtatccaggtactctttttttttaactttaggatttcacttttcgttattcttttattttttaaaaattttttaatttttatatatttttttatttttttgtgatggagtttcactcttgttgcccaggctggagtgcaatgacgtgatctcggcgtccacttcctggattcaagtgattctcctaccacagtctcctgagtagctgggattacaggcacttatcaccatgcccagctaatctttttgtatttttagtagagatggggtttcaccatgttggccaggctggtcttgaactcctgacctagaactcctgatccatctgccttggcctcccaaagttctgggattataggcgtgagccactgagcccggcctctttattcttttaaaattagttaatacatgtgtatgtttcaaaaatcaaaaggtacaaaagggcatccaatgaagagtttctctctccctcttgtcccacagctaccaaatgcctgctttcttgtgtattcctccagaggtatatcaagatattctgaggtcattccaggctgattttatcacacagaggctagcaggaagttgtgctttgggtcgttggtcctggtatactctgagcccctgcccttcccactgtcctttctagcagagggagagaaagaaagtccccctggtcaggtatgcacagcctgagaggtaaggtggcagggaaaagagtctcaaattgtcccttgaacacacaaatccagttattggtgccgtcattctcacccgggtgtgggcggttggagctggttagaggtgtattttacttataggccctttctcccctcctctgccccagctccttccatctgaaggacgtcctcactaccatcggggagaaggtgtgcctggaggtgagcagctgcctctccctgtgtgggtcctctcccttcaccacggacaaggagaccgtgctcaagggccagatccaggccgtggccagtcccgatgaccccattcgcaggatcatgggtacgtttggggaaggcaggcagcagggatgtgccctctgaggggctggagcacgagtccatctgaagaaacctgagggctcagctggagttaaggtgctgatgggtgaggagatggtgtaatgaagcaccacagagagaccagggccacccaacagatgggcacaggaccaggcagccatcattgttctaagggctgcaaccttggaatcactctcctgggttcacaagcagtgtcccagggcagcttgggcgtgtaacttgacactcgagtttcctcatctctaaagcaggaataagggcagcaaccttacaaggtcgctgcaggaactccctgggatgagaaggtgaagcgctttccgtagtgcctggcagcacatagtaagtgctcagtaaataggagctgttacgaaaagagctgaatagtaaaatgaagatgttatttaaaaatactattaaaatattattaaatattagtatgtaatactattaacatatcaaatataataacttaaaatggtaatattaagatattgctatttaaaatttataataaacttgaagtattaaaatattttaatgcatattctataaaatatttaaaatattctataatattagctattagttatcacagcaatggctttatgaaaaattctgttaattagctcgacttaatcattttgtagtatatacatacatttaaaacatcatgctgtatgctgtgaatacatagttttgtttgtttgtttttgagacagggtctcactctgtcttccagactggagtgcagtgatgcgatctcggctcactgcactccacctctgtgctccacctcccaggctcaagcagtcctcccacttcagactcccaagtagctgggactacaggcatgcaccaccacacccagctaattttttgtatatcttctaaagatggggttttgccttgttggccaggctggtctcaaattcctggactcaagtgatccgcctgcctcagcctcccaaagtgctggggttaacaggcacgaaccactgcatccagccaagatttatactcacaaccttcatagggaggcaggaaagtgcctgtaagtagacctgtggccagcaagttgctactcatcctgctgcctgggttgttttgtaatagccagttatcgacagattgaaaaccagcccttaaggggaggatcacttaaaaccaggagttcgagactatctgggcagcatagtgagaccccatctctacaaaaaattaaaaaaaaaaaattagccaggttagtgacatgcatctgtagtccttgctactcgggaggctgaggcaggaggatcacttgagcccaggagtttgaggctgcagtgagctacaatttcaccactgcactccagcctgggtgacagagcaagaccctgtttctaaaagaaagaaagaaagaaaagaaaaaccagtctttgggtaggaacaatacaaagatttctacttcagtgaggctgccagccctgggaaccttagagaaccaaactaacttaagaataagggtgctgagcacagtggctcatgcctataatcccaacattttgggaggccgagccaggcagttcacctgagattggaagttcgagaccaggctgaccaacatgtagaaactccgcctttactaaaaatgcgaaattagccaggcatggtggtgcatgcctgtgatgctagctacttgggaggctgaggcaggagaatcgcttgaacctgaaaggtggagattgtggtgagccgagattgtgccattgcactccagcctgggcaataagagcgaaagtctgtctcaaaaaaaaaaaaaaaaaaagaataagggtgatagggccaggtgtgatgactcatgcctgtaatcccagcatttgggaggccaaggtgggcagattacctgaggtcaggagtttgagaccagcctggccaacatggtgaaaccccgtctctacaaaaaatacaaaaatttcctgggcatggtggcgtgtgcctgtaatcccaggtactcggaaggctgaggcaggagagtcacttgaacccaggaggcgggggttgcagtgagccgagatcgcgccactgcactccagcctgggagacgagggaaactccatctcaaaaaagaaaaaaaaaagaagaagggtgatagggctgggtgcagtggctcactcctgtagttccagcactttgggaggcgggggcagacggatcacttgaggtcaggagttcaagaccagcccgggcaacatggtgaaaccccgcctctactaataatacaaaaattagctgggcatggtggcatgtgcctgtaatcccagctactcgggaggcagagtggggagaatcgcttgaactcgggaggcggaggtgtagtgagctgagattgtgccactgcactgcagcctgggcgacagagtgaaactgtgtctcgagaaaaaaaaagagtaagggtgttaggccctgtcctgtcagcagtttctgtctgtgttgtgaggctcaggagggtataagttatttgcacctgagaggattccccaggcaggaggcaaggcatgtagtttgaaaaagtctattccatataaatgtctctgttgtttttgtgataaaatctgcaagaagtgtggcttgatcaaatcttttttcatgaggatacacaagagtacaaaagcattgtgaaggggaatggactagaaaagcatcaacctaaattattcctccaagtaggacaagtttacaaatgcccatgacttccatgcaggcatcagagaaggaagcacgagctgctttcatggaggcttagtaggaaaaaagtcttttttgaacctgtaattcctgctttaatcttccacctttttatgtgatcgtcagcgatggctaacaatggtctcaggatgtgttgctcctcggagagcagagcatgtctccagtcttcctttactcactcatgcattcattcattttttttgttttgttttgtttggggacagagtctggctctgtcgcccaggctggagtgcaatggcatgatctcagctcactgtaacctccacctcctgggttcaagtgattcttgtgcctcaggctcccgagtagctgggacaacaggtgtgcgccaccacacctggctactttttgtatttttagtagagacggggcttcaccacaatggccaggctggtcgaactcttgacctcaggtgacccgcccaccttagcctcccaaagtgctgggattacaggcgtgagccaccgcgcctggccactcatgcattcattcttgcattccaagtgtgtttgagcttctcctgggagctgggtctcatgccagtcactgtgctgagtgctgaggagacatgatgaacaagatgagcatggctcctaccttcatgaaactaaccatctagaggggagagaaaacattataaatgggatgaatatgcagaagtgcaaggtgctgtgggtatctggtctgggagtattgatcggggacaacttcccctaagaggtgatggttaagctaagaactgaagcacagtaaggtttgtaaggtgaaggacaagaaacaactgaccactttcttttttgtcacagaatctcgaatcctgaccttcttagaaacctaccttgcctcgggtcatcagaagccattgcccacagtccctgggggactcagtccagttcagagagagctggaggaagttgctattaaatttgctcgcctggtcaactataacaagatggtcttctgtccctactacgatgcaatcctgagtaagatcctcgtccgatcctaacgtgtatgcaccctacagcagcagtattactcactagccacagaatacctgttctgtactctaatgttgcattggaaaatggctatatagtacatgtctatttaacagcaccgattccaaagggaagaatattgtgtatcactgttgaaaagacttgttgagaaatccactgaattctattttgagagattgtatttatgagtgcaagtttacaaatcaaagaagcattttgttctcgagttttacaggtaacactcagctgttgtctccactcctcccccatcatgtccttccaaggaggctgggacctctctcttctgcaatctgggtagttctttcagatgcctcatgctgagctgacggccatccaagcgcaaaagagaccaagccatggcctcacctcctgccctccctcagacagccttgtccctcacccctcccttctggtatttttgttagaagggctatataacgtcttattgccattttctccccctatttattgcttcctccctgcctggcctagccagggctcccaagcccttttttctagaggagagttatttgtctctctctctttttttttttactttcttttttgtatttaaacattcttttaaccttcccccaaagatacagttattggactttaaaaagcttgttcttttatacaaaattactcctgcatctggttgagagcagttatgacttatgagatctagtgaaaggaaagtctttgactttcaagccttgaaagtcaaggaggaaatgtattgaaaaatagtttactgtaatgtgaacgaagagaaatgtctggaattcttactgaaaaattgaccctgagacaatacacagatgtgatgattgaattaaattctggaattaga

SEQ ID NO: 3807 - DNA, 176 bp, Homo sapiens
tttttaaagtgtacacatgtatgtctgcattttagacagggatgttatattagaagcagagccatgaagttggaatgaccaactgccacaacagcaaggggtaagactatattactgtatgagtaatgcagtaatatcggcacctgaagccttctgtacaggaagctaagagaaac

SEQ ID NO: 3808 - DNA, 551 bp, Homo sapiens
cagaagtaaaatctacaggacttggataacagagcaggggaaagagagaaatcagagatgactctttttcaaagtttttgattcactggatcagcattctagaaaattcttgtgtcacacatcttttgatctgtccattgaccactgcagagctatcatattctgtcacagtatcctgtacaagatagtggttttagcattgtttaaacagcaccatcggcaccctaaaggacttgatggtattttaattttttacaactttttatttttatttttttgagacagagtcttgctctgttacccaggcttgagtgcagtgacatgatcatagctcactgcaggttcaagcgatcctccagcctcaacctcctgagtagctgggactacaggcatgcaccaccatgcccggttagtttttacatttttctgtagagacaagatctcactatggtgcccaggctggtctccaacccctggcctcaaatgatctctcgcctcggcctcccaaagtgctagcattacaggtgtgaaccactgtgcctagccttgat

SEQ ID NO: 3809 - DNA, 924 bp, Homo sapiens
cgacgcggccctgcaggcggttgcgttccccgtcgttaccctctttctcttcccgacgcgtgagttaggccgtaatgccttggctgctctcagcccccaagctggttcccgctgtagcaaacgtccgcggcctctcaggttagactcttctcccacggtctcctcccatggtgtcccctggagggacccaagttggtctcaggcgatccctggttcggctgacccttctcctggtggggcctccgctccccaaccctctgtgctccgcggatttcttctataccggctgctcctggaaaggggtgggcccagtgtgttctctaccgttgaggtattttgtgaagccgaaatgactgcagagagaaaagtgtgccatcccccagaggggctgtcttccaagttactcggactccgaagttgtggcaattatcacacttaagtgacaaagtgtctcacatcaagtagctcttgtttctgttaggcgtgagagcttgctccagaatatacacgaagcatgtttagtaacaaattctttcagcagctcctcttaggagaggtaactgtttcgaaatacttctggggcgttctgtgtctgaaagtcctgtttgcaaagacaagacgaaggataaggagaataattttttgtagggtgtcctctattgcgagcaattaatctgatgaacataaagcttaatcagtgaaaactgaatcaccttccttgcaggcggatctgccattggatcgtatttcagttttttgggtcaatatatgaacaatgtgtgaaccagaacgtatggtatttgacatcaaagctatgtcttggcatatgtttatgttgatatacttgaattcatttaaaatggaatgttaattacatcgacttcttactataaaaaataaaaagttattgtccagtgcacagaa

SEQ ID NO: 3810 - DNA, 31730 bp, Homo sapiens
ttgagttgaaaattaagaatgtatattatggaatttaaaaatctaaaagcacaggacacattttcagaagaggaattttacttttacccacttatggtaatatttgcaatattagaatataattaggttaaataaatcaaataaggaatccagaagaaactgttcttgagttaagccaagtacacactggcaatttcgagaaaggagaactctacacattaacaaaagaacacacaagctcaaatgcaagtttatatggtgagtgtttttaaaggatttaaaaagcatgctccatcagcataatagctttttctcatttatgtaacagatgcatttctgtctgcttgtgtacagcaaagggttagaacctgaataaacttatttatgatttcagaaatgtggtattttagaaatgtactccatagaatttacttcactgctcctaccactgattcttcaaataagcaaagtacagaaggccttatcccttgaaaatgtttttaaacactagcactttaaattgaaacactggtagaaacgtagcaatgtcaggtacaatgcctatacttagtcttatttaaaataagaattgaatgcacaacagaaaatttatcattttctttatcattggaggggagggaaagaaagcaagcagaggtggggatatagttacactatttaagagctgaatacaaagacaatgagtctttcatagtctcaacaactccacaatgaataactgtggattatctcatttataattcacattggataaaaaaaatcggttcccctctgtgtgtatcaatttaattcaaaccttatcttcagaatacaaagatgaatactacaagataaactaactgcaataggtttttctaagtagaagaccaaacaccaaagggaatccctctttccaatgtcttctgataaggcaagattttgccagaatggaagtctaacacttaaataagcattctcttggccaagtaagaaactacagttgttgtgggtattaccctacaattaccatatgtattacatattaaattaaactcagcattaaatatgcttgtataattacgctgttaatgatgatagcagtgatgatgccggtggaaaaagcctgtctttagctcaagaaaagtaagggagacaaatgtagcaagcagaaagcaaacacagatttgggcaatttttgactaggaaagagaattttaagcatagaaatataaaaagaaaagtactaccttatttcccttacgtggaaataatatgaaaaacacttattagatatactggacaacaagagaactaagtactccaactctactgcagcattacaaaaaaaacatcccttcaccacagtgtaagatttaagggcaacctgcccaaggatgcatgttatatcaaacacagcaagattgctgctgccctgccaagtacttccaatccctacccaggtcctactgaaatacgggtggtcccaattagttttattgaaataaatctttaaagaaaaagataaagcatttaaaaagacaagtcaaaatgcatcaggaaccacatatccaacacaaactttatcctcaaatgagttatgtttgcctcgcactaataacttttatttcactcagagcagtaatcttccatacataagtatattccctgccaataattcaaagaaaaaaatccaaaatgattagtaaagaaaaatataagaattaacaggccctttaaatttgttttaaatattttgaagatttaaaaagtgtttaaagtttgtaattcctagtaggaaaacattatctgaatgaataccctaatggcaaaccactgtaaaatgcttcagctgcatttgggggagaggggtagggattatcttcaaagcaccccagctctcttgatgagaaggtcagaggtacactggtttgtattattgcgacatccataaggtgatctaggttgcttttccttcagcaagggctttatttatcagaaggacattacgcttgacctccaaatttggctgacaatttactgatgagattcataacctttgggttgctctggtattttgacatatttgctgggttctgagccacatcctggaaagccaccataacttctggatcctgaaaagaaagggttcattagtatttaaaaagtgtcctactgggtcagtaagtttattatcctaaattccatctcttatttagacctgtaatttggtgatagttaagttaaatggggtttagatgagtgcttgaagtatcaaaatcaagctgaattaagtcatttgaactgtatgatgaaaaaagcacaattttgatacaaagaaaaggacaactggatataattgccgattgctaagtatttcctagttttaaaaatttaagttactcactctgcataaagaaaataaatgtcactcttgcataattagctatttggtaactgtgataaataaaaaatagctatgagagtaacctttgtctccacacagaattatgaaagaattgccttaatgatacaaagtccaaagtttttcttccaagtcttacctgcatggctgcaagaacctctggatcactaagaatttcattgagtccaggcattccagccattccaggcatgccccctcccattccaggcattcctccgggaaaattaccaggcattcccccaggaaagccacctgtaataaaaaatgaatagacactaatcatactcccaaatattctgacacagtatttcatccacaaaaagtacaggttcaaagaatatgggtgccactaagcacaaagtagtctgaagagtctgaaaattctaaccagactgcaacaagacataagttatagcttctaattatctctttaaaaacaaggctgtaaatcagactttgctacctcctggattaacttttttctagtaataacactgttttttatttttgtttgttttgagacggagtcttgctctgtcgcccaggctagaatgcagtggtgccatcttggctgactgccacctctgcctcccgggtttaagcaattctcctgcctcagccttctgagtagttgagactacaggcacgcaccactatgcctaatttttatatttttataaatatattttttatttttataaatatgttttatatttttatatcaagttggccgggccgctcttgaactcctgaccccaggtgacctgcctgcctccctcaacctcccaaagtgctgggattaccggtgtgagccaccatgctcagcaacttttttctagtaataacactgttaaaaaagactaatctcgccttaaaagcaaagagtcatctaacagttccttagataattataaattgtataattatcttagattataaagctagtcattttgatcatctttcaactctccattcttgaatatttgtctgtttcaatttaaaattaattcatacgagtttagtttaggtttttgtttcaactatactcttctagcatagatcttccttcagttaaggacgaccttaaaaggcttatctgttgatttttcatttccatttcaaataaaataaaaattctctgaaagtgaaactggaaacctggatttttaacaagaattcctggtgcttctttacagagaataatgctctagcaaaaaggattttattctctcagtataatttgttcgattataaacccaaataatctactctgttcttcaatatcataaacctgtatgtctactggagatattctaaaattacaattaataatatagagaaagatggctgggcgtggtggctcaagcctataatcccagcactttgggaggccgaggcgggcagatcacgaggtcaggagatcgagaccatcctggctaacacggtgaaaccccgtctctactaaaaatacaaaaaaaaaaaaaaattagccgggcgtggtggcaggcgcctgtagtcccagctactcgggaggctgaggcaggagaatggcgtgaacccggcaggcggagcttgcagtgagccaagatcacgccactgcactccagcctgggcgacagagcgaggctctgtctcaataataaaaaaaaaaataatatagagaaagacaacattaatgtattctacaaagggtcactgtaagtaaagccgttttaaagaaggaaacacatgataaagtcatttttacctgcttccacagttaattaaaatatggccattaataactaacaatcagagatgaagaaatctaaggggaccataaaacaacttctagtttctcttgctgcccctacttatcccaaagctttgaaaaattagtgcctacccgtaacgaaattactgacccaaagcttgtcaaatctaaataaaatgtacataacagaaaattctctctagtactagcccaacattagcagtcactttctaaaacaaagatatctgacaataagattatttatattttacataggaagtaaactatgagctaaatttaatttcttgctttttcttcaaacagcaggtcatcctcaatatttgttctaggtttgttttctgttgctgtgcacatactctttcagaataaaggctagattttctagcatcggatcatgcaactaagttctaaccagtgacatataagcatacgtagcctctaaaaactttccttaagagaaagctagttaccattaaacaactggagacagttgtttaaaaaacaaaaaattaagtcttgtcctggtctttatataaattccacactgtcgtaatcaggaagtactcaataaatcttctgcgtgccttttccgtctcttctatctctgtgttagtcctgtcctctggtattcaaagatttgcctcactagcaatttctgatcacatttgaaagaaaaatacgctatttttacactgtacaaaaaacatcatttttatgcctaataattccatcatttcttttacctaggttcttcatgaatatcactgtataagagaacaaaatcagaatatcactttataataaatattaagtattatattaaaatatcactgtataatagaacaaaacagttttaacttttctttaaatatacctggaaaagagccatactgagctcctgactgtcgtctggcttcttcctcctttgatacaaaaggaaataaattatataatagaagaagaaataagtgctgtccatgcaacctgtccatgcaagaccatgaaaaaattgtaaaataacctagtagatggcaatactgaactgaaggatatacttcatacccccttcaaacattttttccaaactggattctcagtgggcattattcttggtagtaatttcaagtaaagtgttttacttctactctggaaacaagtaaacctggaaaacaatttatagtactaatatgaaaactctaaattcatcctggctttaaaacacccatagggaaggacatggctagattaccaagactaccatgacttttgtttcctaggtacatcttttccgttattctccctacataatacaaatgtagatttattgatttgtttttgctgctttttaaaagagaaaatgaacaaaaaataaatatccctcatatgtagttttaaaattattgaggagatatattgcttttaaatatcaaggagataaattacttttaaagattataaactataaccttaaaatcaagtatgatgcttaatattaaatggacaaaaaattagaatgtaacatattatataatacagccttaggttctttcatgttctttcattcaataatgttagaaataagtaggtgaattattgtagcatcacactatgttgcccaggctagtctcgaactcctgggctcaagtgaacctcccaccacagcctcccaagagctgggactataggcacttgccaccttgccctgctagaatcatttttaaatagcaacacatccactgttggaagagaggaggaatcataaatttaattaatctggcgaagcatcctcaaaagatcaaacaataatactgtcacatttcaattacttgacctggaaaaacaactgattttataaaaacacaaacaagaatataaaatggtgaaataaaagctcactgaataatttaagactaaaaatgtcccccaaattagatacagtgaaaggagactccccataagtaatatcattactctatagaactgtagccagcattaaataaaagagccaggaattaaaattttagtgtcctaatgcctctacataatttgccgtattttcctttcatggcttagctataggaaatttaccctctgggctctctcatgctcttctcgagccttcttaactcgttctattctttctttgatctctcgctcttcacgttttcgctcatactttctccgatgttctgcaattttctgtgcctagaaaaaagagccatagcaaaataagcttgctccaaaagctgaataacatcaacacaaatattctttgtagagagatgtttaattcaacatgcagttcagaaaaatgacagatttgtcttgtacaaaaagacctaacacaagctaagcctttaagaaaaccaacctcaactgcatgaggcactgtaaaacagagtaaaggggcctgggatttgaagttagaaatgttataatctcaaacaattaagctcaaagattaacaaacaggtttctaagtgcatgacaattcttgcctgctagtttctatcagatacacagtgtttaggtttcagacggacagctgaattcagtaggaagagtattattacggatgtctgccgtgggaaggcagagactgggaactcataccccaagtatatgccacagtatatttaagtttctgtatccataaaatgggagaggaagaaatatttaatattatcaaattgctatagggattaagagggaaaaatgtaaatatgtataccagacactagtatcaaataaatgctctggatgttatttcctcagagaataaaatacatttaagagattcatattcaactgtcactttagcttgtttacactttgctgacaaagttacaactttgccctattttaagaagaaaacagaaaaccaaatgaactctctggcagtaaataattaaattcaatacaattcccactatcttaaaatctctgagagtaaattcttgacagctgaacttcccacaaaatgaaggatttaccatgtaaacacattaaaattattttaaccaacaattttagataaaaatcatccttaaaagctggaatgttctacttttgggattcaatattattatttttaaaagattgaaacttctttgttttattaagacagcctcgctctgtcacccaggctggagtgctgtggcgtgatcttggctcactgcaaccttccacctcccaggttcaagtgattctcctgcctcagcctcccgagtagctgggactacgtaggcgcatgccaccacacctggctaactttttgtacttttagtagagacagggtttcactacgttggccaggctggtcttgaactcctgacctcatgatccacctgcctcggcctcccaaagtgctgggattacaggcatgagccaccgcgcctggccggaaagcctgaaacttcttaacttccacaaggtcttcttgctttataaagtggttgtacacacctatgataaataaggacacatcagattcaatcctgggtaatgctaattatagattttctatttgtttccttgttgtaaacctgatacccccttttctaattttctggttataattccactgcaggcttccaaacaaagtaacagagtttgctctaataatgcatgagaaatgaaagcatgaaaacctaatgagatctccagagtcgagcacaaacttcagcaattacagattatatcttccaatggtttgtttctttgcctgtttttcagatgaattacagctgtcgggggctaagcactacagcgatggagtatttaactaatgactttccctttctctactttgacataccctaggttgaacttctttcagcattgcactagcatcttcatcataatccaatttacaggcaagggcaagatcatgggctgcttcttcccagtggcctagaagtctgaaacagatttacactcattttaggagccttttatacatattcacctatgtggcatgatatctttcttccttacaaaaaaggattgttctaaaacaggcttaagttaaatattaactataaactttcactaaccaattcaattactatatcccattttagttaactctataaaaacctgaaaacatttaaatttcctctatttaaagctgcttttctactaaaagctaaaaaacaaacaaaatctttcttaattcagaatatcgtaattttctaagtatgtagaccagtaactttcaactcgcccaaaccaggactaacataatgtgttagcttttagctaccttctatgtaagacagaagagaaaataatacatgtgtacaggctttacgaaaaactcagaacaagtaaaccagaaactaaaggttggtgacagtaggtgagaatggggcagaggagacagcaacgaaaactgagaattcactgggtataccttttaactcaggtgtaactcttcgaacatttaaatgctttacatactcaaaaaataaaatcagaaaaatggaaataaagcaaatcctaaacctgaatacaaacagaaataagaagctgtgtggctgggcgcggtggctcacgtctgtaatcccagcactttgggaggccgaggcgggcagaacgcgaggtcaggagatcaagaccatcctggctaacccggtgaaaccccatctctactaaaaatacaaaaaaccaggcgcggtggcaggcgcctgtagtcccagctactcaggaggctgaggcaggagaatggcatgaacccaggaggcagagcttgcagtgagccaagatcgcgccactgcactctagcctgggtgacagaggaagactccatctcaaaaaaaaaaaaaaaaagaaataaggtgtggctaggcgcgatggctcatgcctattatcctagcactttgggaggctgaggctggtggatcacctgaggtcaggagttcaagaccagcctggccaatgtggcaaaaccccatctctaatataaaaaatttgccacacatggtagcgcacacctgtaatcccagctacttgggaggctgaggcaggagaaccgcttgagcccggggcgggtgcagtgagccaagattgcaccacttcactccagcctgggtgaaggagcaaaatgcctcaaaacaaaacaaaacaaaacaaaacactgtgtattgcattaacaacataagctacacagaaaaaaatgaattcaagtaacttttcatagttatcttgactgtatatttcaagtgggatatatattctaagaataagaacatccttgggtcacacctgtaatcccaatgctttgggaggggaaggagggcagatcacttgaggccaggagtttgagaatagcctggctaataggcgaaaccccctctctaccaaaaatacaaaacattagctgggcatggtggggcgcgactgtaagtaatcccagctactcagaaggctgactgaggcaggataatcacttgaacctgggaggtgaaggttgcagtgagcctagatcgcaccactgcactccagcctgggcaacagagtgagactctgtgtagaaacaaaagacaaagcaaaacaaaaacttcccaaaaaaccttcaaactttacttagagtgtatactgtttttaaggtattgtaattctgaaacagttttatgtatatcacagcattgtagtaagtaaatgtaaaactaggacaaaaatttttaccacacaagtgtcaaaaatacaaactaaaaggtaaaacaaaacatttaatgttacattttaatagaaaatatcagtataaactcacaatttcaagaattttttccctaaattcatgatttttaaaatgtttttttctagctgttcattgaaacgacagtacataccagaagcaatgaacagacacagtgatcaaatcttagtttccgctataatgaaccacgatttcccacagaaatagcttattttcagtctgagacaagcaaagcacaagatgagccaacgctgtcttgtattagaaggcaaagaaatacttggactaatgggatttcaaaaggatcaacagcaatgcatgggcttttcctgtgctgacacagcattaataaattttatttcaacttttaatgtttatctttaacatgtgtcataaaatccactagagctactctgagtcagctaatacagttgtcctaaaaacatatccatctttatctccatccacatttgagccctttcaacccaggtaacatgtgaaagtcactgaacacttcattcccaagatacaaatattcctaagttttgctgcaaggtataattactaatctgggttaaattcacctctttatgcccccccgccttctcctaatttttcaggtggcctagcagtgactgaagtagtttcaggctggcatactccttcttctataatacactggtagttcaatgctaacttacagagtctgaaagtaagagaaaatttgtaaggacactgataaaagatcattctttcttttcctggaattaattttaagtaaaaatcctttccttatatttggccatatgtagtcaaaaactggtaagagtagctttatttgaatgaaaaaaatgaaaatactttttatttcttccttcctatattctcacttcttcttttaaatttcttttttttttcttttaccttttaagcagctgtctacaagctatctcacttcttgatactaagtacacactaatttgaaaattaagtcattaggaacttttgtgtttttgtttaaacaaagcatcttaaaacatcagatttaaatgtaaagagttctgaaaataattaaattcaattatttacctgtgtgctttcccccgccacttgtaaggctgagctgaatcaggatttatttcaatggctctgtcacagtctcggatggcagcatttggcttctgtaatttgacgaagacactgaaaaataagtgtgttattaaaaagtattcatttcagtaaaagttttgggatcaacacagaagcaactctatttaaacaaatgtgcagaaattatttgccaggggatgcttttctgtttagagttctcacctggccctcttggcatacaaaatggccaagcgaggattcagcttgatggcatctgtgaataagtcaatggctttctggagttcacctaaagtgaaacaaaagttatcgagaaatattcagaggataaaaatattaataaaaagttttgatctgttatccagttaagtcttttacatttttcttttaatcaagtaaaaataaaaaagacaactaagttatactaaaactggctcttgaaagcaaatcttaccacacctatactgtaactcacgaggtaagacaatttctgagtacgtaagcccctaactaacaatagaatagcacattcttagtatgacccatattgatcttgtttaaggaaaaagtagacgggcacggtggctcacgcctgtaatcccagcactttgggaggccaaggcaggcaaatcatgaggtcaggagatcgagaccatcctggctaacacggtgaaactccatctctactaaaaaatacaaaaaattagctgggcgtgggggcggagccctgtagtcccagccacttgggaggctgaggagtggcgcgaacccgggaggcggagcttccagtgaggcgagatcaccactgcactccagcctgggtgacacagcacgactccgtctcaaaaaaataaaaataaaaataaaagaaaaaagtaaaaagataaaatcaatttaaaggataagataaattaattttattccattgattttcttttatccattaaattaaaaagaaaaaattaagcttagaaaggaaaagtaacccatgttaacttcacagggctgattttaaaagaaaacaacaatatgcttattatttgaattcaaagaaatggtacaaaaattcaagaaaactagaattcataaaagaccataacctatactttaattcattttgtcctattctcatagttagcttctttactaatcccttatgtcattcaacaaataaaacaccctatagaatcagaagagttctttgcacaaagtctaaatcttggggaggcaagacaaatacagaattttttttaagagacagggtctaactctcacataggctagagtacagtggcatgatcatagctcacaggctgaagtgatcatcccacctcagcttcctgagtagctgggaatacaagcccacaacactaaacctggctaattaaaaaaaattttttagagactgggcctcactgtgtcacctaggctgctctcgaactcctgggctccagtaatccccccaactcagccttctgagtagctgggattaccactgtgccaggccgaacacagaaatttttaaataaatgtcacaattcactgtgaaagatacttagccagttagcgaatgagtaaaggacttgaaaagaactcacaaaaacaacacagaaaaatgctcagtcttattaattactactacaggtatctattataggtaattacacttaaatgtctaataaacaactcagacctaccatgttcaaaacctaaattttttttatgacagggtcttggctgggcacagtggctcacgcctgtaatctcagcactttgggaggccgaggcaggtggatcacctgaggtcgggagttcaagaccagcctgaccaacatggagaaataccaagaccagcctgaccaacgtggagaaaccccgtctctactaaaaatataaaattagccgcatatggtggcgcatgcctgtaatcccagctactcaggaatctgaggcaggagaatcgcttgaacccgggaggcggaggttgcggtgagccaagatcgtgccattgcactccagtctgggcaacaagactgaaactccatctcaaaaaaaaaaggtcttgctctgtcacccaggttggagtgcagtgacacaatcacagctcactgcaccctcaacttcctgggctcaaaggatcctcccagcctcaagggaacctcccatctcagcctctcaagtagctcatattacagaaacgtgctaccacatccagctaattttttgtgtttaagagatggagtctcactgtgttgaccaggctgatcttggactcttggactcaagagatcctttcgcttcggcccctcaaagtgctgggattgttaagtgtgaaccaccacgcccactcaaaaccgaaaaactgaattcccatttcctagcccatttccaaatctattcccaatctgtatcttcccaactaaacaaatggctcctccatacatttagttcaggagttggtaaacgttttctggaaagggccaaataagaattattttaatctctgcagaccatacaatctgtcataactactcaatgatgctgttgtagtgggaaagcagccacagttaagtgccagacgtgggattcaaaccataccactctggctccatactccaggttttaattacattctccaaacaaaactgccttcaccaaccttggtggagcttggattcacaacccctgctttagaatactaatcttttatcctttagaatacactatacaattgcataaattctaaaatcagaactagattaaatttacaaaggcacatgaacagagagttcagaaaaaagtgagaaaacaaaaacatgattaggtgatagcctcattttccttttgttacatattgccgagacagtaaattttaaaatgggctgggcacagtgcctcacacctgtaatcctagcactttcagatgctgagcttgggaggcctgcttgagggcaggagttcaagacgagcctgggcaacaggatgaaaccctatctctaccaaaaaaaaaaaaaagagataataattagccaggcatggtggcaggcacctgtattgccagctactcaggaagattgcttgagcctacaaaacttgaggctgcagtgagccatgaccatgccactgcactccaaactgagtggcagagtaagactctgtctcttaaaatttaggtggtagggaaattagcaaaagtttcgtgcgatgaaaaggaatggtacagaagagcaatggctgggaacaactgataggtatgaattaaaagttgaaatatgtgaagaaaagctttccagagaaacagtatagcataaataaaaaaaaaaaaaaaattctagaacagtaaagtctgactggagaaaacaagattggagaagtaaaatacaggatcttagtctggcaggtctataatcctctgatgaagatcttaaatatatatgcaaaagttaatcacaggttacaagcaagagtagaataaaaaacagctctaagaataacctagggaaagtaaacagaaagcaataaaggaataaatttttcaggaaggtaaactattaaggcaactgcagtataaaacagtataaacatgttttaaggagctaaattaatcaggtggtagaatcacaaaatgtttaaaatatatactaactcggaacatcaatactgaactcattctaaaaataacttcaatcatcttctaaatctaataatgaagtccaaatgcacatgagcactatacaatagcatctagtcaactatggcattgtgacacactatcactgttataaagagtgaaatattactcaagcagccacagtacccaagtttatacatgatttgttcttacaaattataaccgatcaaacattacacttaatactaccatgggccgggcgcagtggttcgcgtctgcaatcccagcactttgggaggcagaggcgggcacatcactcgaggtcaggaatttgagaccagcctggccaacatagtgaaaccccgtctctactaaaaatacaaaaattagctggagatggtagcacacgcctgtaatcccagctactagggaggctgaggcaggagaattgctcgacttggggtggaggttgcagagagccgagatcacgccactgcattccagcctggacgacaaagcacgactctgtctcaaaaataaaaaataaaataaaatacaactgaaaaacagaaaaaagaaaaaaataataacctattgttaccttggagagttaaaaaaataaatatatataaaaaaagaggctgggcgcagtggttcatgcctgttatcccagcactttgggaggctgaggcgggcagatcacgaggtcaggagttcaagaccagactggccagcatggtgaaaccccttctctaataaaaatacaaaaaattagctgggcatggtggtacgcgcttgtaatcccagctactcgggaggctgaggcaggaggactgcttgaacccgggaggcggaggttgtagtgagccgagatcgcatcactgcactccagcctgggcaacagagtgagaatccgtctcaaaaaaaccaaccaaacaaacaaacaaaaaacaaaaccgaatactatcaccactttctcactctgaggggatttactcaagagaatctaacatgctctgactaggacgaagattggtatgcctatgaacatcatctgtcaagggtattagtatgtaaaaagttaagggtcactgttctactactactttttttttttttttttaaagcctttcacctctttaaagcctcttctcagcagaaaaacaccacgatagggtcaggaaatcagagacactgaatcaaataaggatctgtccttgcagagagaagtgatttcagcctcttttatcaatgaggaaggggtgactggataataggacactatcttctccagtataggacaggtacatgtaacttctcttctactttaccactatttaagttactgcaataaatattctgactaccatagaaatgtagcaaaaagattactcaccatcatttagggcttcaatagcagccacttttttatcatttgcctgatccatcatctcctccgttatctaggaagaaaataaaaatcatcttagaattagtagagagagagagaaggaagcaattcatactttcttagggatgaggcgcagtcacaatacccattttcattcattcttctgtagtctccagagaacaaagagacaattatgataactcattagtgagaaattacatacgagttttaaccttttatactaaacaaatttcactcctacactctgcccgagacataacctttgcttaaccttccgtcccaaccaaagcataccagctcctacctagctatccataaatattaaacccaatctcctcacaaaaagataactagctccttttaggtttaaatcctcagaagagaaaggtctcattcctttgttcccacaaacaactattgagcacctatgctatatagatagaccaaacactgtacaagatgctgacagtataaagattagttaagaacaaaaacatgtgcatctgggcaacagagggcgatcccatctctccaaaaaaaagaaaaaaaaaaaaaaaaacaagctgggcatggtggcacatgcatctggtcccagctactcaggaggctgagttaggaggctcgcttgagctcaggaagtcaaggctgtagtgagtcttgattgtgtcactgtactctagcctgggtgacacagagcaagaccatgtctcaccctacccctgcaaaaaaagaacaaagagttatagcaaacatcctcctaaaatggaaagctctggagatctttaaccacaggaaaaaaatatacaactcatgcctataatctcagcactttgggaggctgaggcaggtagatcccttgagcccaggagttcaagaccaacctgggcaatatggcgaaacttcgtctctacaaaaaataaaaagaaaaaataaatattaaatataaaaataatgttttatttaaagacagggtctacctctgtcacccaagctccggtgcagtggtgcaatcacggttcactgcaacctccatctcctgggctcagcctcccctcaagtgtagctggaactacatgctcgcaacctactaaatgttttgcttttttttttttatagagacgggttttcatcatgctgcccaggctggtctagaactcttggactcaagtgagttgcctgcctcactctcccaaagttctgggattagaagcataagccgccactcctggctgcaattttattttgaaggtaatgcaggacacaggatacaaagtctatattcagaggaagagaatgtatgtggtctaaccagacaccttccaaaataaatctgcaactccaaatgctaataccggcaagcataatggtataaacctgtcctacagaaacggacagttgagtagtgagattaaaagaacttcccctgaaaattcagagccacagccagcctttcatctggaattctgtattaccaaagtaattggaacaaacaaaaaaacaccatgctgagactttcaaggggtccttgagttggtagcaccaattcagagacttcatggaagcaatcaccttcttacctaggcctcaaaatttttctacaggtgaagttccaaagaacacattttcaaaatatcacacacaacacacaaacacatcataaagtaaacaaggtaccttaatgagcaagagccatgaaaaataagagtaagaccagcgaagagttcaacaaggaatttaatgtgtttaataaaagtaaattctgaaaatgagtaaagagcaaaagacttacaaataaccaagtagacttcaaaaagatttgaagtaccaaaatgaaaaacacaagcattccaattcaaacatcaatggaacagacaaagcatagactgcttttcagcagagagtgataaagaaatgaaacttaataacaaaagtctaacattaccagggatccagaattagagcataaagtaaacaagaaggaggcaatatttaataacagctgaaaatattctagagctaaagaaagttaaccctagaatttgatgctcactgaatcccaagcaggataaataaaaaattataaacctagacacatcataaaagaagtaataccatcaataaacataacatttaacctttaaagtttcctttgacaaatggtgacagaaagtacttacatttgttcttaacaaaaatgcacaagacttacgtcaggtgcagtgactcatacctgtaatcccagcactctggaaggccaggagtttgagattttgtctctactaagaatttttaaaaataaaaataaaaaactagctggacatggtggtgcatgactatagtcccagctggtcaggaggctgaggtgggaggatcacttgagcccagggcgtcaagggcgcagtgagctatgattgtaccactacactccagcctggatggaagagtgagacactgtctcaaaaaaacaaagcacaagacttatggggaacacgttagtaagttattaaaatattttaaaaacacctaaaaattgggcagataacattatttatggatagtttatctcaatggtgaggagatatatcttttcccgaacttgatttagatttaacacaattctaacaaaggggaaaaaaaccaatggaagcggggagacttgatcaacctatttctaaaatttacttggaaaaacaaaaagccaagaacagccaaaagactaaaaagttttgggggtccttgttctacaaaataacaagacttagtatcagacgatgtggcattagtgaacagaaaaaaaatagacaagcagaacaataaactcctgaaacagacccacaatattcagaaacagtgtattttagttttggtgggaccggtagattaaaggtgaaaggtgagtgtataaaatgttcagaagagaaaaagcaatgcactacagcaattataacctcaaagtaataaagcagaaaatatctgcattaaaagatactatttttgaaacaacatgaagaaagatgagtgaagatgagtcacaaactagcagaaaatatatgcagcactagcaacaaattattagcatccagaatattgaaatgaaatacaaagcagtaagaaaaagatccagcaaaaagtggaaaaagtttaaacaggagttcgcaaatgccagtgaacagccaataaacatttaaatatgctcagcctcattaggaatcaggaaaatgcatttttttttttttttttaaatagagttttgctctgtcgctcaggctggagtgcaggggtgcgatctcacctcactgcaacctctgcctcctgggttcaagtgattctcctgcctcagcctcccaagtagctgggattacaggcgtgcaccatcatgcctggcttatttttgtattattagtagagacggggtttcaccatgttggccaggctggtctcaaactcctgaccttagatgatccacccacctcggcctcccaaagtgctgggattacaggcgtgagccaccctgtctggccaggaaaatgcaaattaaaagccacaaaaagataccatttcccacaatacttggcaaagatgaaatctgataatatcaagttttgaggataaaaaccaatcttttaaaactgctattactatattagagtgtttctcaaatttttatcagacactaaggagcctttttagacatcttttcctcatttccatatccccaattttaataccacagatacactacatattaatattctatgagtctttggaggaccactaaccattgtaatatatagaattttttttaagccctcctcccaagaaccaattttcactcccttgagggcctgttatgacaaaccattctgtaatacaatttggcattagatattccatcaagagcaactccactaataggtatgtattttaagtgaattctgcgttacagtgcaagcagtcacaccagatgcaaacttaaaaaacagataaaacagaaagtaacagtatttattttcattagtattttaagtagtaaaatacaatgcttgcctaaaacgcctgaagtcagagaaagatttactatgcgcttttcctggaagaatcgtgtcataaaatcattgcaacagcaggacctttcacatttcttagaacaagcaggaaatcaagtcaccgaacttacctccgcattttcatctcccatttcttgaggagcatcagtgtctggttcaatcacaccttctttatcaatttctgccaaagtcgagaaaatgacaataagacctgcaccgtacaatatagtagccactcccaagattattaaaaactgacatactatgactactacaattaattattttaagtattgatgcattttaaaatatgttcccattaaacatttcgttactttggtaagactacactttacgttaactgtcacatcatgtaagatatttattatcaggttgtagtggggttgttgacatgtgcagtttctagtattacacataaatacaccactgatttagtcattgtatataaatacaccattgtcaacaaactgatttagttcaaataatttttttctacacactgatgtactatgtttttcaaaaatatgcaggtaagctacagtgatacttcaacgtaaatcaaaatattttaatataattacattcattactttccttttttaaaattaaaataattttggggggggcacaggatcttactatgttgtccaagaaatcctcccacctcggcctcccaaagcactaggattccaagcatgagccactgcacctggtccctaattattttcatttttaaaagtagcatggacaagttttaattttaaaataaaggcttactactgatgcagaatcaagtaccaaggctagatttaaaaataaatttagtttccatatgtacagtagtgaccaaagctagtacttacaaccaaaacagtaaagaatgaaaagcagtatcttgcttttcaaattgtcatttaacagttgtcagttaaatgacaactgtaatttgttgcaagtggaaaacgagttttatatatatatacacacacacacgcacgtatcatttaaaaagaacacatttgcaaatagttaatttgataagaagtttccttagtcaaaaaaaaaaaatttaaaatcacccacctaaaatcagaattactgtccagcaacaacaaaacttgacgcatgactgacaaactatatatatacatatatgtatatggtgtacaatgcgatgttttaacatacaggcatatcgttttttgagacggagtttcgcttttgttgccgaggttggagtgcagtggcgcaatcttggctcaccgtaacctctgcctcccaggttcaagcaattgtcctgcgtcagtctcccaggtagctgggattacaggcatgtgtcaccacacctggctaattttgtatttttagtagagatggggtttctccatgttagtcaggctggtctccaactcccgacctcaggtggtccacccgcctcagcctcccaaagtgctgggattaaaggtgtgagtcaccgtgcctgacctcaggcatacctcattttattgtgtttcactttactgcacctcacataatgaaatgattctcacccatcatattaataactatccatctcacatatttatttgtttttggtgagaacactgaagatccagtctcttaacaaatttcaagtatacagtattatagtcatgctgtatactggatctctggaatttattcagattatagctcaaagtttatgccctttaacacggtaaaaaaattttaatccattttttaacagcaactaagcttgtctatcaaagtttgatttgtatacaaaaaagaaaacacttttaggtggagagttggttaaaaaatttattgtagttttagaaactggtagaaagtaagactaaagaggcattttataaaaagtaaaagatcttcaatttagcactcaaacaactgccagtagaatgtaagacctctaatgatatcaaagataatttgattcaggccaggcgtggtggctcacacctgtaatcccagaactctgggaggccaagacgggcagatcacccgaggtcaggagtttgagaccagcctggccaacatggtgaaactctgtctctcctgaaaatacaaaaaaattagccaggcatggtggcatacgcctgtagtcccagctactcaggaggctgaggcaggagactcgcttgaacccaggagggagaggttgcagtgagccgaaactgtgccaccacactccagcctgggtggcagagcgaaactcaagtcttccaaaaaaaccccaaaaaaacaacaaaaaaaaactgattcaaaatttaaaacatttcaagtacttttcttcaggttctgtgatataagagacttccaaattcatgaagaaatttagtcaatttgtggccaaaaaaccaaccaaactcatagcacagataactactcttctaaatatgaaccagttttatcaacatggttgtaagaactaaacaaatactattttttggcactcaattcagttatgggaaaacttttggctgggcatggtggctcacatctgtaatcccaaacactttggaggccaaggcaggtggatcacctgagatcaggagttcaagaccagcctgaccaacatggcaacatggcaaaaccctgtctctacaaaaaaaaaaaaatacaaaaattagccgtgcctggtggcacacgcctgtagtcccagctactagggaggctgaggcatgagaattgattgaacctgggaggtggaggctgcagtgagctgagatcacactgctgcactccagcctgggcgacacagtgagactccgtctcaaaaaaagaaaaaaaaaaaaaaaaagaaaactttttaagtatgcttagaacaactttaatatgtaacccaactttttctaatacaaacattatgaagtctgatttattatcaatgaaaatgtaaaacctgaattgaggggtgccacatgtgtaaaataccctttggagtttgaatgctattaaaaaaagaagcaaaataaattattaacaaatattgaggccaggtgcagtggctcacgcctgtaatctcagcactttgggaggccaaggtgggtggatcacgaggtcaggagttcgaggccagccttgccaacatggtgaaagcccgtctttactaaaattataaaaattagccgagtgtggtggcaggttcctctaatcccagttactcgggaggctcaggcaggagaatggcttaaacctgggaggtggaggttgcagtgagccgagattgtgccagtgcactccagtctgggtgacaagagcacgactccatctcaaaaagaacaaaaaaacaaaaaaaaatattgattacacatgtcaatatttcaaccaatatgccattaatatctgaatttatttcatgtttccttttactttctaaaatgtgactactagaacattctaagtttcatatgtgccattatatttctattacacagtgctgatttaagtcactttaataaaaatcaacaaagtatcacatcataggttttcaaatacaaactaactaccgtctcctcacctagatcactttcctcacttgatggttcgtctgcctttaagtcttcctccaccttcttactatcaggtttttcttcctagcaaagggaagacaaacagtactatcagtatttaataacataccgaatatttatactaatttctacaaatctatgtataaactgtcaaatatggccaggcatggcggctcatgcctggaattccagcactttgggaggctggggtgggtggatcatttgaggttaggagttcaagactagcctggccaacacggtgaaaccatctctactaaaaatacaaattagccggacgtggtggtgcccgcttgtaatcccagccacttgggaggctgaggcaggacaatcacttgaacctgggaggcggaggtggcagtgagctgagatcatgccactgcactccagcctgggcgacagagcaagactgtgtctcaaaaataaaaaaacaactgttcaaaataaagtttgaacattgacaataaacagtttagagattataaatagcctcatgtccactcacattatattttattgccaaatttagtaaaaatctttacaagggtttttgagttttggaactgcaaataagaacctgtggaattacaataataaacaatgaaaattcaaagaatttaaaagtgcacgacatatagaaagcaacactttcttcccatcctataaataaccagtgtggtttcttgtatatcccattgcaggatagtctctctatatatgaaacaactctatcctttgccttttgcatttaacaacgctgtgtatcttgtaaattatataccattatcagcctaccttcatctattcactcaaccatatattgttaaccatttttaggttgcttccctgttacttaaaaaattagaaccaaggcagggcgcagtggctcatgcctgtaattccagcactttgggagtccgaggtgggtggatcacgaggtcaggagattgagaccatcctggctaacatggtgaaaccccttctccactaaaaacacaaaaaaattagccggacgtggtggtgggcacctgtagtcccagctactcaggaagctgaggcaggagaagggcgtgaacctgggaggcagagcttgcaatgagccaagagatcgcaccactgcactccagcctgggcaacagagtgagactctgtctcaaaaaaaaaaaaaaaaaaaaaaaaattagaaccaaaaacctaccttgtcacaaaatatttgttgagtccctataaaatgtgcaaagtctaggtattctagaatatattgaaaagaaaagacaagccataattctagtttagaatgtttttcttacaaaaaattttcagctgacacataggttaaatataattttgccttcatacacatttgccaaatagcaaaatatctagggctcagaaaataccactctgataaatggtccttttaaaaaaaaggtaactactttttgggcttttgcttaccttttcgcattctccttcttaatagacataacttccactttaagatccaaatagataacaatgtttaagtttctaaataataaaacagctattttcttgtcgatttaagacagctaatcagaaaatttgcaaaaaaaaaaaaagccttttagatatgaaggcagaagagagaaataaaaaattatgaagaaagcattctgggccaggcatggtggctcacgccttagtcccagcaccttgggaggctgagagatcagttgaggtcaggagttcgagacccacctggccaacatggcgaaaccccatttctactaaaaatagaaaaattagccaggcatggtgggatgcacctgtaatcccagatactcgggagactgaaacaggagaatcgcttgaagccagtaggctgaggttgcagtgagccgagattgtaccagtgcactcagacctgggtgacacagtgagactttgtctcaggaaagaaaaaacaaacaaataaaagaaaacattcttaaacatgtatgttccccttcatctgtctctcaacttcagctactggtaaccttctcctaatcttacacgtcctttaagcaaatatgctaacccaacaccatgattcacactcacaaatatcactcaggtagtagagcaaaaaaattaaattactgacctgggatacttcatttactctgcaaataataaataaagtacctacaatgcatatgacacactgtaaggcaatgatgaagactacggatgcacaccatcacggagcttaccacttacaggccatacatgtaacttttattgtcatgtattctaaaacagtgaacatccaaccctaaattctcagttctaaatcagaatccagagaattcgggtctacaaagttataaagataaagaggtcttaaaaggtcttatttccaagtgatcttggggaaatcaggagtgataactggagagcagcagtttaaaaacaacccctaagaaatcttatagtactttatcacaaaacatacaaatgaaattaaaacttaccttggtattttcttctgatttagctttctgagtagcaggtggtactttaccacccatgcttgaagaagatgagaaaaaagatatttgtttagaaaattaaaattcactgtcacgcaacgtatttacacctaaaaaataacgttagacatttagatgactaccttttcaaaatttaaaagtaaactctcaattaatctgaatgctgtggtattattatggttaaattttttccagcttaaaatttattttaaggctactggctaatgaacccctttctttgcctcaatgagtcaaataaacataatgtatagcttctctgtgcctcttcccagaggaaaagaggcagatatgtcaacatgcaatgacaaaatcatttgcacaagctgttaacttagaattcaactcagtaggtatatctgaatcctaaatttgaaacttgaaataagagttcaattaaattcaaatatgcagtttatgaagtaactataccgtcatgatataattcaaaatgtttgtgtcctgtgactgagacctatgagaatttttcttgcttatatttgcatgcccatcacattatagattttctccttatacacccctcccaacctcatccattaatacttcctcctgaccctacaaactcttctttcccaaatagttcagggcaacacaattcattataagcaaataactagaagagaaaaattacaaagaattagcgttacatgctccatttggtgcagaccctatagtatatgggctacctgcaacaatccagtgactaaaatggttgatagacttaagagcactccacaacagttggaagcaacgtagacattattaaaatttgccttaaaaacaaacaacaaaagccattaactatgtaaaacaaggggatatattaactttgaaaacagaaagggttctttttttttttttttgagatggagtcttgctctgtcacccaggctggagtgcagtggcacaatcttggctcactgcaacctccacctcctgggttcaagcgattctcctgcctcagcctcccaagtagctgggactacagggtgcatgccatcacacccagctgattttttgttttagtagagacagggtttcaccatgttagccagaacggtctcgatctcctgacctcgtaatccgccagccttggcctcccaaagtgctggatttacaggcatgaaccactgcgcccggcctgattctttgtaactagagttgtcatatccacacttacattcatttcagttgggtggaatttgtggtcataagggtatgtgcaggctgaatttaaatgggcatcagttttctgaagttcttttatcaatttacacttttatcagcaatgtatgagaattccaattgtttcacgccttggccaatgcttagctattgtccatcttaaagattttttagccattctgataggtgcctactggcatctcattgcagttgagtcccttttcatatatttactggtcatttaaaaagacttttttgtacagttcaactctcatccagctttctaatagattgtccttctttatttgaaggtgttgtctgtattctgcatatgaaccctttgtcagctttatgtgttgcaaatattttctcccaccctgtaggttgccttttcactcccttagtatcatctgagaatcccaatatgaagcaaaagtataaatgcaaagtagcagatggaatgaaaagaaacagaatttggaatttcttataagcaccattcaaacgaagaaaatgtgcctactttttccattatgtttaatatgatagaagaaaatgttacacagtacccttaatatggaatagctcccatgtcaaacataaagattatatgatccaaaacatcctaatctgcaattcagcaaagtaaaatgatttaatgataaggaacaggcatatagacaccacaaaattcttttctatggaaacactactttgcaaaagagcacagtaatcaccagtcctttgtagttaaattttaatgaagacacagggtttcttacactgtgttcttcctaagtttcaaaatgcagcgtcaggaatgtatttagagtgacatccagacatagtataacttacagtacactaactttgggaagtgatattcctgccaagaaatgtattaagctaaatccaatcctaagggaaggccagacaaacccaaattgaaagtctataaaataacttgccaataacattcaaactgttaagatcatgaaagtcaaggaaagactgaggaactgtttcagaatggagactacgtgacatggcaactaaatgcaacacataaatctgaggattagatagcataaatgcatcagcattagtttcctaagtttagtatttgcattgtaaagactttgtaggaagtacacactcactggtgttggggtataatgttggcagcttactctcaactagttcagaaaaaattcctttgtaccatacctgcaatttttctgagctagaaattgttgcaaaaaaaataaaaactttaaaaaaaaaagaggatttactcataagctagatttagtttctcccatcccaaattctagttaactaatggaagaaaacaccaactcataggtacgaaatttcaattaatgcttccaaggcttagaacaagctactttctggccaaaaactgccacttagactttggcactacaggcttttttatgttacacaatcaagtaggaccagtgtagagacttttctcacataggaccacataaaacttcattcacatttctcttaatttgataaccttctaatctgctttgtgctatggttatttgtacacatgtacaaaaaattggttgctacactctaaattctatattgagggtagaaatgcattctgttcatttcctttacaacatttaggaaaagccatgtgccacgtactgtactagggagtagaaaacaaagacactctcttcgatcttaattaccatcaagtaaagccatgaaaccacatacaagatactaaattgttaaacgggagaaaatagagtgggagaatgcttctgtctctaaaaagggaaaaacaaaaatatctcaaaacacagttcttgaaaagaacagtctcctggatcctcactgacaactagttcagaaagacttttagtatttctctttgtgcaatttaaaaggttaaactaataaatccttatatcaaataaaactaagctataaacaatgctagcaattatagcaaataggcagatgtactgttcttcaacagctaagcctgtgagaaacacatgttttcaacttgagtaaccctaacagtagcatcaggcctaggaagacgtctggacctagaagtctccacattcagccccatctgccacaatctcgaactgcagactgatgaaggcagagagagaaactgacacaaacgcaaaggcctcagagtttataaaaatcttagtttaaatacagaaataaagagaaaaagcttctatattaaatatctcaatttaagttcagaataaagtccctacatatgccatgatgcttcaccccatacttcagccaactcaggatggctaaagaatgtaagtggaatcagaaagaaaaactggaattacctatgttaaaataaggtatatgactatttcttgtttttgtttgggagatagtagtgcctgacaaatattttgcaaaccttaaagtggaattctctacataggcacaatcactccagcacaagtcaggaggacactgttcttacacatgcttttaatttgttcttctgtgtctcctcttcctcactagtaagaatgaaacaaaaacattgtatccacttaatgtaaagtggagccagctcttggagccggctattttcttcctgtgatacttgtctacgttacctggaattttagaaagaatttattaactgcaggttctttcctataattaggataaaagcatacaaatatcttaaggcttttggatcatcaagctgttcaatagagaaaacgactaaaacctagccctcaattcctaatcctgacatttcccggttgaggagtttgcaaaatagacttcttaccaatattcataaagttactattaacatagtaatattaaatggtctcagaatttcacatataagtaagtcttccagtagttagacaattggtggggagctaaaaattgaaaaacttcttagaggaaaaaaatacaacatacaacgctgacagattgtaacgagttttttccttagaaccagattgttgttaagaaatattctttgagctatttggtaatcatgagctcatcttcccacacaaaaatatcacgctgggtgaagtggctcacgcctgtaataccaccactttgggaggcgggggagtcccttgaggccaggagttcaagacaagcctgggcaacttaatgggacccccatctctacaaaaaaattaaattagccaagtatggtggctcgatcccgcactgctagccacctgggagactgatgcaggaggatcgcttgtgcccaggaattggaggctgcagtgatcccgccactgtatgcggcctggacaatacagccaaaccctgtctctaaaagacaaaagtcactaaacacataacgttcacagcagcacctcttaggagtcgcaatggtctgcatagttgctatttatccctgtttagtgcaatttgtatgtcatcttttcagttccccattagtaataattttttaaaaagtcatcttagggaagacttccctgtcactttttctcttcggtgctccttcaacacataaaatgctaattactattatatagtaaatatcaaaacgaacttttctatttattcgtctaaatagacagtacttatactgtttcctagcaccaggcacaatgccttgtcaattaactccttgcacgtagcgaagtactctacagttaaagacaacaagattatatcctggaaacatgccaggccttaagaaattatttttctcagacgtgtttggagtgataacactgccaagtaacggaggtataataagtgattctcaagataattaatcctacgcagctacaaacgctgtaaggtaaaaacaatcatttttacagttatcatttttattcttactagttttgtaacttttaacttactagtgttatattattataacacgacgtaaaggaatagtgcgtaaaggaactgctatgtaccaatgagacctgagcagggcacacaagactgaaagaaaaacaaccccacgcaaaatctaagtcttgcagttttcactcctcgcgtctccagtgtccacgcatccgcagtcctgtttttgtatttcgcccaagatacacccctgggcaacctcagggtgcgaggaacccagctctgcctcctgctccccgcggctcctgtact

SEQ ID NO: 3811 - DNA, 507 bp, Homo sapiens
tgttctcaaacaaaatagtaggcattacacgaaaatgattctgtgatcaaatacttttggggaatgctgcctttcataatgtacataatagtttaattctttttttggagatggggtcttgccatgttgcccaaagtaaacttgaactctcacctcagcttctcaaagtgttgcgattataagtgtgagccactgcacccagcccttaatagtctaggtttctgagagatgtgttccgcagtaatttgcaaaatgtgtaaaaatgtatttgaccatggaccccttttctgtgatgaatcttgaactggtatccctggaacagattttgggagaagttgggctagagcataagatgagtacaaggagctgataggaaatcaagttgggaaaaaagctggtggctggctcgtggagggccttgtatattatgttaagcaaacaattagctttttcctttagatggtgggaaaactttgaggaattttaagctattgagtaagatgatta

SEQ ID NO: 3812 - DNA, 2516 bp, Homo sapiens
aagggtcgggattactgttcggaagaagaggatatcacatagcaccaattttaccactcaaaccaggagctactactgtgtaaataggttacaccccagttgaaatctttgcaaaggtcggttctattcagcgaacagcactatagcaaaagaagatcgttccatattgtacgccccattaaattacagtgtttcttaatgaacttgcaaaggaatattgctaaaaacaaacaaaaaaaactgttatcgaactttctttgttgctgctagttaaaacttgttgcaacttttcacttctcttgtgtccaggtatgcagcaaaattctgcaatttcaccttaaagatactgttggttttacagatgctctccaacctattttctataagatgaggtagtggtgaactcagataacaaacttctcttctaaactggttctgcttctaagacaagcatctcctgccctctctccttcctccccatctctcgcacgcagtctagagatggactgagccttgcttctcactggcagtgttgagctttggagatgggatggttgctatgccaagccttgtttctctgctcagaagaagtagagaagctattatcaattaaaagcatgctgtgatgtgactcctggaagtgacgtaggagtgagtggcaggttgtttgatttaataggtatcttaatcaagaattaagcttgcaacattggctttgctcagatgcagatggaagtgtgatcacaatcattttgaatccctcttcctcacttttttttctaagaaaataaacattttactgtttttatggatccttgtcttctcccattcatccagctcagtgttttaagatgatcctgggtgcagaagttgagccctcctttgcattgacactgataattagcctatagggctccctacccttccattaagaatctaccaagcattagcaaggctgaaagtggtctaagaggtgaggggacatcctatgactttttaggaaggcctgaaaccaccttgttacctttcattttgttagcaaataaaccatcctattttgtaactctcccccttcaaaatgctacatgagccttgccacttcctttttctcttacttccagcacactagacatagcaaaagtgtttgcctactcaaaaacataatacttttatgctgatgatggtatttggagatgtgaaagccaaaagcccctggcagtggtggggaatgttgactgagtgttcagcagagtttatttttccatactatatgaagagaatgatctcttctcaaagacagaagtgatatttttaacaaatattgtcacaagtaaatagcaatcaaaaggagaaaataacttttgtatttttttaatgtgtttgatagctttgacgagggttctctttgttactttcaggggagggcatcctattaaatgccacgccagcagtccgggtctgggtttgtcccacaaaatcacaggagcactgtatgttcctctcttttggagttgtgactttgaagggcctcaatattagccacactgccgcctgcagaaggtggagagttaagatgttctatgtcaatttgctcttgccgaaaagatgagcctcgattttaaaatctatccacatccaactgatggcaccattgatgtgcaaataatgagattccctatctccttttagacctgggacggcaaaagggaagggaaggaaacttagcagagtgctattgactatagattcacatattagcaacaaaatcccgtaattcttttggccaacagcagctattttggggagcagctgtggctgttacataaatagagatgcagccaaaattttaggccttttatcctgcttctagcagaaaaatgcagggagagtcaagtagtctagggtttcaggttgcctcccctcatatggtttttggccaagtgactaaaacagttttccacaactgtaaacaaactgctaagccccacctcaaacttgttcactggggactttgcttaccgttctgtgggtgaccttttccgggatttcttgttcttatcaagcaagaattaagcacatgctaaacgtcttccatttgacttctctactcggtgtctcagacagtgtcttcccagaaaaccaccaccctctacccaaagatgaaacatgctcatgtcatttttctcatggtcacatttaacagttttgacatgttatacttgcgcatagatccaagcgtttcttgggaacctgacttttgagtgtttaataaagccggaagtggtgttgccctgaaccagcagattttcacctgggttctggctccggtgtttaacactggatacatctttgatgtgcgaaagtgagttcatcttcagacacatttggtacatccagaaatagatccaagaaatggggtggttgagtgggtccgcacgaaatgcttgattatgtcagcaacacccaacactgtctgttttccatttgttggttttaatcataaaattgtcaagtga

SEQ ID NO: 3813 - DNA, 984 bp, Homo sapiens
tgtttgttattggcagagaaccttaaaaaaggcctttacctcagcgatgcttcctagccccaggcttgcagagaacacagagtggtgttgtggtctatttagggacaaagaaggtataaagtccagagatgagaaaactgggtcagccctcagaaactgcagcagccacgcacacagaagcctgctggaagacaggtctctctccgtccacagtgcccatcatctgagcctgggctgggatgactcaacttagcaaagacggacccaggaggagtgctggttcttcagtctttgtactggccccatcctctcctcactgtaatgtgaggaagcacctctgtgtcagggctcacctgggcatccaaagcggccacgcccacaatccgacagcccccaggagcaggtccagggatgatgcagcccccttcttggtcccatgtgatgtcatcctgctttgttatcttcttataactttatcctgctataactttatcctcttcccagcctcatccctgtttttctgttagggcaagactcttccataagcctgctaaaaaacagagatgatacctcttacaaactttacctcatagcctgtgaagcaggttggcatgtggattacaagtcctgctttgacactgggcaagaatttaagattgttctatctctactagtcatagaaaagaaacattgttaaacatgttgagttttaaaggaagaaatattttcaaattcttaatccaagaaaatactgagttggaatcttagacttcgggactctgacacgttctttatgaaaggcaaaataattggtatctaaagttctctccttcctgcctcccctaaagaaaaaggatattagattgcacactataattttacataagatctgccttccacacttccctgctggaaggcattctcagagctttatgtcttcgtacctctcagagattggactttttcttgtttaaaaccccaacc

SEQ ID NO: 3814 - DNA, 293 bp, Homo sapiens
gtttgttgttttttgtaatccgttttagagtgaattaaactcagacatccctggattgtatgctgtctgtagaatgttgattttcaggcacggggatgtagctgtagaatgtggcttgttcattcttcctgataagaaattgatctcctgaatggattggccatttggtaatttcttagtgaaaggctgactcttgaatatggctgttataatataaattcttaccaacataaagtaagggcttatttggggcttggtaaaactgtcatgccttgaagtatatatagcttata

SEQ ID NO: 3815 - DNA, 7105 bp, Homo sapiens
aaaaaatacatggcaagagtttcacaggcattttccctgaagttcgcttatgcctcaaaaattatctcttattatttttggcatatttgcccaagtacttcagttctcagataatgtttaatgttaattcttattaaacaggatactcctaacttataaagtacattatgaaaaatgaatgtaaactagacagggatactttttaaaatatgaaaatgaaaaagtttatcatttattaagcatgtataaaaaacaatttggactataatttgaccattctttattttttagtggaataccagcaatggtggattttgctgctatgagggaggcagtgaaaactcttggaggtgatcctgagaaagtccatcctgcttgtccgacagatcttacagttgaccattctttacaaattgacttcagtaaatggtacttcaatgcagatatttatagacagccatgcaagttaattggctggaaatgtgtcatgtagaggaaaaggaatagagataatttatggcagagaaaagtatgctaaatttagtattggctagtatataaaagctaaaactggtgaaaagtttatggagtggtggggtttttttcatgttcttgtatttctgctgccgtttttgatagaaatgaataagcctaggacctgctttttggagtgaacctctgtattcagtctttgtttccttttttgttttttaacctacttgtctttcagaaagaatcgaaagatgtgagtcatgaatgtttttaattatttggtgattaaaaacattgaactcactaaagctctattttccttcctctgaaataagtttcttgtatttataaggcccctttgaccaagaccaaactagagaagacatatttctgttgccataaagtaactttttaaaaacgttccctggagtagtagaataagactgcaatttattatagcccatgagagaggttttgccctcgagataaactgtagctctaaatttcttttaagttgttagggggaaaaaatctatttcagtacttgctaaaagttatttaaattagtagagtatttgaaagtgattttactggacgcttagaattctgttttcatttctgtaaatttaaatgacctgtttctttttttatatatatataatctgagatttgcctttgaaacctgagttaaatgatacattagcctttaaacatcattcagttacttccagatagcgttgctaatgtgcgtttttttttaagagctaaatttgtgtcccttttaaatggctttattttgttttctttttggaatgacagtgcaatacagaatgcaccaaatcctggaggtggtgacctgcagaaagcaggaaagctctctccagttaaagtgcagcctaagaagcttccctgcagaggccagactacctgccgaggatcttgtgattctggagaactaggccgaaactcaggaacattttcttcgcagattgagaatacacccatcctgtgtccttttcatttgcaaccagtgcctgagtatgagattgtttttcttaaagtttattaataccaggttattttccagttaagaaaatcaaatttattctcttcccacccaattactattatgttaccttcacacttaagtactgaattgaatttttatatgtatttcctgttatactaaaagaagtaaatttagtgaaaatggtgatctctaagtaccattctctcttaccattactaagaaagcaaacttttcttaagatttatctgtaaatagaattcatctttttgacgactgtaagcagaaaaatgggatctcattttaaactaaaatttttattttagtatatttgtaccattcatatactcgttagtcattcatatttcttatgttaattccctgtatatatttttaacatttttttcctactagggggtttcttatcttttcctattgcattaagagctctatgttggctgggcgtagtggctcatgactgtaatcctagcactttgggaggccagagcaggtggatcacttgagctcaggagtttgagaccagcctgggcagcactggtgaaaccctgtgtctacaaaaaattacccgggtgtggtgtcgcgcccctgtggtcccagctagtcaggaggctgaggcaggagaatctcttgaacccaggaggggaggttgcagtgagccaagatcatgccactgcactccagcctgggtgtgacggagtgagactgtcgcaaaaaaaaaaaaaaaaagagccgtatgttaacgataaaatttttgttttttatgtttcaaatctagtaagtccttctaaataagtgatttcctatatggtaacatggaaagtagtaaacatgcctagaaaagaattctattcctaggatttggctagatttcctaatgtgtaatttttttaaataagaaaaagagttctatggccaggcgcggtggcgcatgcctggaattccagcactttgggaggccggggcaggcagatcacctgaggtcaggagttcgaggccagcctggcaaacatggcgaaaccccatctctactaaaaatacaaaattagccaggcatggtggcaggaacctgtaatcccagatacttgggtggctgaggcatgagaatcgcttgtaccaggaggcagggatcacagtgagccgagatcacgccactgcactccagcctgggtgacagagcaagactctgtctcagaaaaaaaaaaagtcatacagctttttaaaatatgtactataaagtttccaaacttttaaaatttatttatttatttttagagacaaggtctcactatgttgcccatgctggtctcaaactcttaggctcaagcgatctgtctgccttgaccttcaaaagttggttttttttgttttgttttgttttgagacagagtctcactctattgcctgggctgaagtgcagtgtcataagcatggctcactgcagtctcgatctcttggactcaggtgatcctcccacctcagcttcccaagtagctggaacttcaggcatgcaccaccatgcctggctgattttttctgtatacagggggtgtcactgtgttgcccagactggtctcgaactcctggcctcaagtgatgcttccaccttggctgcccaaagtgctgggattataagcatgagctactgtgcccagccatatttttatttttaagagagttatgtgaattgtttttgtcttagtttaaataattcatgtaaaatataacaatttatcccattgttagtaaactgtctttttttttgagatggagggtctctctgtcacccaggctgaggtgccgtggcaccatctgtagcccactgcagcctccaactcctaggcttaaatgatcctcctgcctcagcctccagagtagctgggactacaggcacacactgtcaggcctgacttattttatctacctttttttggggtagagatgggcactatgctgtccaggctggtcttgaactgggctcatgcagtcatcccaccttggcctcgcaaagtgctgggactgcaggcatgtggcactccacctggctttttttttttttaatttagtaaaaaattacttgcactttaggttttaaaaagtttaacacatttaagatttagagtagctaagagtaatgtccattcatttatcctaagtaccaaataatacgttaattcctttgtccctgactggatcttccaaattctgtctagttctaaaatattgggcttaatatttttatgaagccacaggttatagtgacctcgtgtgctcttcctttctaaggattcagtataatctctgagtcttttgccatcaaattttgaaagttttatgaagtcactttcttgttcctgttgcctagttgtcctggttgttaggagcatgttgacttttgagattaacacctcttatacagaaattaatttcctgaaaaggaagatttattgattcaaaatcattgatttctttagtttttgtttctttttataactggcacatcgtaagtgcttagtgctatatttttatttctaaaaatccaatctgctgtaacatttccccataattttgactccgaattacaaagtattaagatagattatattgtagttcctggctatgtgataatagttactcatttgtatcttttaatgtgtcagtgaagtattaattattgacttaagaagttgagtagaaagatgagagcataacctttggcacttcaaattaccccctagtttgaagtcaggttatgagccaataaatgtttgtatggcactttgtagccataagtgctattgaaaggtaaaataattggagtggctcagaaagctgttttccctgaggccctgagaaaaatctcactaagatatgcttggcttcaaaagatgactcaactatgaattattaaagtaatctttgtttaaaaaaaaaaaaagttgtccgagtgtggtggctcacacctgtaatcccagcactttgggaggctgaggcgggtggatcagtcacctgagatcgggagtttgagaccagcctgactaacatggagaaaccccatctctactaaaaatacaaaattagccgggtgtggtggtgcatacctgtaatcccagctactcagggggctgaggtaggagaatcgcttgaacccggtagggcggaggttgtagtgagccgagatcatgtcattgcactccagcctgggcaacaagagcgaaactccgtctcaaaaaaaaaaggttgacaattaaacaactgtaattatctggactaattatctggtccctggaggacacgtataatttaagttatattgatattctagtcaacacccagtcaccagctggcaggtaaaagaagcagcttaaagctgtttgaaataatttttaaaaataactattagataaaaataattttttaaaaatgatactatgttactggttagaggtcaattatttttgtctcttagtttaaataattcatgtaaactatatttataatccatgtaaagtgaactgctacttatacataaagtagagccttcttttggtatgagatgaatgaaagatttttgccaaaagctctttttaaactgtaaaatgatgttgagatgttgttcgtcaatgctgcatagaaataatcagcacccatctcctagtttaattggcacaagagccaggtggggaggaaagtacatgcttgtcgttgaagctactactttcctcttttcttgcagcggataacccaacaaagtgtgtttttattatcacttgagtacagttttggacattggtgtaatgtggctttcttacactcagtaaaatacaactcacttttgtagctttccggtgtgttattttaaagcagaactttgttgaaaaagaaaataattctgagaaacctagtaaatagttcttccaaggattttaagaatatatttgtgtatatatatgcctaagaacgatgacttagaaagaaacaaggcaagtcttttttgtaatacatacgtttaatgccagctcttcttccttttagacctgaaacagtgttaaaaaatcaagaagtagaattcggcagaaatcgagagaggcttcagttttttaaggtataaatgattcagggaaatttttgtattgtaatatataaactaatgataggtacaatttttatatctttgtttctttttcttttcctttttttttttttttttttttttaagacagaatctcgccctgttacccaggctggagtccagtggcgtgatctcagcttactgcagcctccacctcctgggttcaagcagttctcctgcctcagcctcccgagtagctgggattacaggcgcacaccagcacgcctggctaatttttgtatttttagtagagataggttttcaccatgttggccaggctggtcttgaacccctggcctcaggcaatctgcctgcctcggccccccccaaagtgctgggactacaggcatgagccaccgtgcctgccgtatttattattttatttatttatttatttatttttgaggaagagtcttgctattgcccagacaggagtacagtggtgtgatcttggctcactgcaacctctgcctcttgggttcaagcgattcttgtgcctcagcctcctgagtagctgggattacagatgtgcaccactgcctggctatttttgtatttttagtagagacggggttttgccatgttggccaggctggtctcgagctcttggcctcaagccatctgcctgccttggcctcccaaagtgctgcgatcacagacatgagccactctgcccagccactttagtagtttctaaaggttttatagtagtagaacgcttttgttcctcaaatgaaatcttaattggaaaccctattgtgtagagaaagatgaaaacagtggctctagtttaggagagagagcttggagggagggccttgtacattgagcctttcttccttctcattcctgagaatctttggaacgcagttgaatactgccatttgtctggactttttgaacatttttatttgacctaaattaattttgtcttaataaaaaatacatttaggttcagtatctgtatatttgtttttaactatgtgatatgaactttgtatttaccatattgaacattagttaaaatatttttaatgttaatattacaccttgattgtgagcacaaatttatatactaacatttgtatttcttaaatttaaacaaaatatagtggagttcaagagtttttaagaatgtggcagtgatccctcctggaactggaatggctcatcaaataaacttagaatatttgtcaagagtggtttttgaagaaaaagacctcctcttcccagacagtgtagtcggcacagattcacacataacgatggtgaatggtttagggattctggggtggggtaagtaaatgactaaatatatttcatttcttttggggtaaggatgtcaagaacattgtaaaagaacataaattattgagtttgtatagcctctttgaggctctgtgtttttcatctgtaataacagcagcaacaacaaa

SEQ ID NO: 3816 - DNA, 538 bp, Homo sapiens
atgctttctgccgaccgtgactttgttgaaatgtggctactattaactcatccaagactggcctcagttatcttctgaaagtcttaactcccttgctgagttcagtgtacctcactttgtaagcttactctttcacagggtgttataaatgttgatttttttgtgctttttcattagactgaacttgttgaggttggcagggactggattctgtttatatctgtatcttgaatacagtgcagtgcctaacataatgaatacttaaactaatgttttaacttgaatatacttaaaactaatattttaccttgaatataaaggtaaaataatagtttttcgaccgtgcgagtggaatcatttcttttgggaagccttgggttcagtgtccacattaatagcaatatagcaactctgcaaagtactgtgtaagataagctcatgaaacacctagagattcagatgttacagagataaatgatctttaaatatactgtgctaatatacctgtctttattacgttaggggttggaggcattga

SEQ ID NO: 3817 - DNA, 615 bp, Homo sapiens
ctttcagacagatgatgaccaagctgctttcctgctgggggaaggaggcattccccctgggttgtttttctcttctggcccccacacactggcagacccgaaggcagggtgctcaggagctgcagagcctggcagggtttgctggacatgctcagggacgggccatggtgctggctctgctttctaatcatggtgtcagtccttcacttcccttggaaatacccagagattttatttcctgaagataggacatgatgggtgctgtgagatggtatttaaagtacctgtctgcaaggaaaactttaaaataggaagtactaaggataaggtcctatgggatattggaatattttataaagccacaatagttaaagcacttagatgtggacagatgagcagagaatagaggactttgaaacgggccaaataaatatggaaatttagtacaggctagaggtgtttccaattaacgagtaaaatggattattcagtaaaagcagttggccctctggaaaatagtaaagccatgtatgtgcctcactctttatgccagtacatattccagattaaagatttcaatgttacaattatgaaagtactagaggaaaatatggg

SEQ ID NO: 3818 - DNA, 1684 bp, Homo sapiens
tttttttttttttttttgcctatgattccaggattttaaaagttttagatgcccagagttgtggaggtatggagaagtggaccttctcatactgttggtgggaatacacaataatataatttgaccacgtaacaattctaggcacatgcatgctgtgactacttgctaggtgcatgaaggctcttgccaggggtggtcatggttcggtaccactacatgggggtttagagcagggactggaggttggccttgcctcctcccctccccgcatgagctgagggtccttacctgacctttttgagctgtgaccagagtttttcctcatggggtggttagaagggttgaatgagaatgatgcccatgcagtgccttggctggggtctgggccctctaacacccacctcatgggtgtcactgttttttgaacagcagaactggaaaagcccaaagatccagcaataaaggagcaaggcaaataaagctgttaccctgcaggatcagtcagcatgagccagattgtgctgcagtaacaaagatctccaacagcgcagcggctacagttggcactgcttatttcttgcttgcacctgtgggccaccgtggctggggcctgtcagacctgtgctgacgacagcctacctggacatatttctccatgctcactgaggcaggggaaaggccacagcaggccacaagtaatgtgtgtcaccccacttccatttctgtggccaaaggaagccacagagccacacctgagttccataggacggcagcagctgatcatcctatgggctggggtgctcagtatggagaagtacaagcagccacccagcgtggggctggttggtgctgctgaggatgggaggatgggaggggcctgcatccatcccagggcaacatacctgtttgtctgctggggctgcctgacaaaggaccgcaggctaggggacttaaacaacagacatttcctcatgattctggagctagaagcctgagatcaaggtgtgggcagggttggtttctcctgaggcctcgctccttggcctgcagatagccatcttcttgccgtgtccctgtctgtgtctgtgtcctaatctctcataagctcactagtctattggatcagggcccaccctcatgacctcatttaaccctgaattacctctttaaagaccctgtcttcaaatgtaagtactaggggttaggacttgaacataaaaatattgaagggacatagttctgcccacagcggtgcccgcgataggcttctctggttttgtctttgctgttcctggcagcgctatattgggcaggcttctgtggtctccacatgcctgtgtgcagagtcccccaggccctgggttctggggcccatactgaggagtggggatggccaagccttggctgttgagtaggcagtgcccagttgtgctgtatgggatgctgtttctcacttaagaaatctttccctacctggggggtacaaaggcattatcctgtattcccaggttgtaactttctgcctttgacattcaaccttgagtccacctgtaagtgtaactgcggcagaagggaggggtctgctgtcatccttgatagcctgtgatgagcagagcccctctgccgaccgcgatgcacatgtaatatgagcaagaaataaatttttgatgtgcgaagccactga

SEQ ID NO: 3819 - DNA, 5496 bp, Homo sapiens
gcgctcctaggagcaggcgttcccgactccggcaagagggtcagtgtggaggcgggagcccgggcggccggcttgaactccgtgcacgcgggcctggagctgcgcccctgcgtcttttcccgacttctgatccgcagaggggcactcggagccccagcctgggtcgcagtgccttcggtctgcgggcctcagtttctcggtccgcgccgggggtttgtgggggcacctggagacatttgggccgttctcgcagtctcgggaagccgcgcccgctccttgcctggcctcacggcggccgatctcgttctccactttctaggtggcgcctggactctcgccctcagagggaggcccgtcccacggtctgtggctacggatcccaggaccctcttcgcgggcgattcgcgtagcctcaggtgggtgggcttcttgttgccgtgggccttgtgagctcgtatttcctgcatggcggttgctggggggcgggcggtgcagtcgtctgcactcagcttgctttaaggctttgggcaggttttgttcttggggctcctgggtctccccagagcagagaacggctccagcgttccaggtgctgcctttggccttgtgggggcaaacacacatgcgccgtggtacctgcccctttaggatagtgctgtccagtctagaagggccgaaagtcttctatgccaggcagtgtggggagaaaagtagggggaccaacagactgataggcgtgggagggctaaggttctcaaaatggtgagagtgcggcccagggttaggaaggctcaggcccaaagcaggcctggctggctggtgcagggaagccttctcccagactgcaggggacacaggtgcgcaggtgagtgggcagggtaggggactgggaagaagggaaggcagagatctgggtagcacactgtggctcccgggcatggggtgtggtcattgtgggcaacctggatacctaaccttggctggtggtgggagctgggccctggatcggggtcactgcttttttagagctcagtgagggactggactggactcgactcacgtccaggccttagtataatcctgcagtaaggtgggaagccagggtcatgggctgggctttcaggtgaagaccccccccccagaggggggtcagacctgagggattccagagtgtttgggtggtggaggtagggccagtggccctggcaggttctagtgctgcaggccaccctgggaggtacctggaggaactcaccctgaggggggatggccagcagataggagatgtgggatgaaggtgtgtgcaggccttgtgctcccagtgagccggtggcgtttgtgtgtggggtgaagcagagagtttcctggaggtcgtgagtgggcctccgtttgcagagagactggggagggggctagatagagttaggctgcagagtgtaagagccctacaggagggctccttgcactggaatagaactggctactggctctggagcctcctaggtgactgctgcgtggagaaggaggggcgggtccagccatcagactgggactccccagaccctgggcacaagtgactggagtggcgggagcagacagcaagtggggttccaggattttacaatggtgggggctgggatgctctgctgtggctgggatggggactgtggaaaggtggtgtttgtgggtgggggtggcattgcctgcaggtggcactcagttgtgagaggtgaatttggaaagcatgtggggtcaggagggagcagagaatagcaggctcactgctctgtcggggaagcaggtaggacctgctgtgtgcctggtgctgggatgtaaaagagcctaatgacgacgcggtctgtgcgttgttcagagtttttggggcggctagagcctactcagcagacaaatgtagtttataatcgcgtgctgtatagtagttaagcctctggtctctccagccagtttttgctgcttccaccacttatgggttagtgtgtggctgcagacaagttacttcaccactgtgtgcctcaaagacaatgctagtaccaacctcctgtgggggaggtggcacaaatggggcactcagtgaaaggttactactattgctatcctgaaattcctgacagttctgatctggccccttttcttctgaaattgacagcatctgtcattctgccttgcccttgcaatgtcataggcagcatttgcccacctcagacctcccaggccagccccctgggcccctccttccattcaaagctcctagttgggtaccagagggttgcccgcttgtagcctcttcccaccagtccagtgggtgatggttaggcctagttcctgctcttccccaccttgtctttggacagattgcctcggatgatggcctgcgactgacagtctctcagctcttctcagctctcctgaggctgcagctgtcagctccctgatcctcagcacttgcctggaccagtgcgggtctgccacgccctgttcagccatccctgtcctgttgtgtcgtgcaagccacatctgtccacacccccaccacccaccagtgctggctctcctctcttctcccctgtgctcccagcatgcctcgtggccggtgccgtcagcagggccctcgcattcccatctgggcagccgccaattatgccaacgcacatccatggcagcagatggacaaggcgtctcctggggtggcatacaccccccttgtggatccctggattgagcggccctgctgtggggacaccgtgtgtgtgcgaacgaccatggagcagaagagcacagctagtggcacttgtggcggtaaacctgcagaaaggggtcccctagctgggcacatgcccagctcccgaccccacagggtggacttctgctgggtaccaggctcagacccaggcacctttgatggctccccgtggctactggaccgcttcttggcccagctgggcgattacatgtccttccactttgagcactatcaggacaacatcagccgtgtctgcgagatcctcaggcgcctaacaggccgagcccaggcctgggcagccccctaccttgatggggacctgcccctgcctgacgattacgagctcttctgccaggatctcaaggaagttgttcaagacccgaacagttttgctgagtaccatgctgtggttacctgtcccctgcccctggcctccagccagctgccagtggcccctcagctgcctgtggtgaggcaatacttagctaggttcttagagggcctggcactcgacatgggtactgcccccaggtctttaccagccgccatggccacccctgctgtgtctgggtccaactctgtatctagaagtgctctgttcgagcagcagctgaccaaggagagcacccctgggcccaaggagcccccagtcctgcccagttctacatgtagctccaagcctggtcctgtggaaccagcctcttcccagccagaggaggcagcccccacacctgtccctagactgtcggagtcagctaatcctcctgcccagagaccagacccagctcatccaggaggtccaaaaccccagaaaacagaggaggaggttttggagacagagggagaccaggaggtgtccttaggtaccccacaggaggtggtggaggccccggagaccccaggagagccaccactttctcctgggttctgaacacagcccaggtgggaacaatgctgcccctcatgatgaagtggcctgtgtggcttgagcgccccatagtccccagtcagagcagagtggtgtccccagatgacttcagaccccatagctgggcaagatgcgcttgttttggactctgcgctgagcagaaccagctcccccaactccagcagagcttgacctccgccctgtgccctttccctgctgctggctctctgctgcatccctgcccgtcttctgggagtgccgtctcacccaggcctgctcccacgagggggtcgttttgtagatcaactctcagcagatagttgcatcatctttgtcacctccacccccataaaacaccccccttggtgtcttccacactggctgggactgaactgggtctgccacgtctgccctgttgggacctcgttcctgtatggggtttctgtgtctgtccccctagccccaccctctctgctccctgtgacttctgtcccagctggaatgtgaggaaggctgcctggaggaagtggccactttgattctgggggatgagtgggatagcatcttggcaaagaatgatgtttcctgtgggattaccagcagttctgggcagctggaaggtttggatgcaggaaggtgggatgcaagccccttgccaggctcagctgcaggcattcgccctttgtgtgttaacactgtagctctaatcgtgcctggtgttctgaagcaggctcctcttccctgctgctgtgctgccatcccctgctcactccgcactcgcatgcattgcggattcagcacttaagccctagtgtgtaaatgacttggatctccctcctggcagactgtgaccctcagcacaggggctctgtcttagtcagctctgtggcctggtacacaattggtgctcattaaacacgtgttggattactggctgaggtggtgcagtggctgcctaccagcaagtctttgtttcccattctgtcaggagcagaggcctggccatgagcattccaggtcagcattgcagctgtggtttctggcaggggctttgagggtccaagggtctgatcaaagaagctgggtggggctgagtagggggtgggtggctctgcaggtagagaactgacttccgagagctgtaggtgaagtgaggaccaggcagcagtccagagctgtgaggccccaggcccagaggaatggaatgaagaaagacctgttccacacaaggaggggttttctagtggaagctgagcttggaagctcctggagccaagtttaccacaggataggcaggtacagccgcccagtgtgtgcagtgtgtgcccactctggtgcttggacaagaagttcaagtccctttcaggtttacaattgtgaaaacaacaaaacaacaccttcctggaaagtaggaagaaaaagcagaaatgtgaattggaaatacagccaactattttaggaaaaactaattagcaagcatctgattaaacttattcagaaactggccgggagcagtgtctcacacctgtaatcccagcactctgggaggccaaggtgggtggatcacctgaggtcaggagttcaagaccagcctgaccagcatggagaaatccatctctcctaaaaatacaaaattagccaagtgtggtggtgcatgcctgtaatctcagctacttgggaggctgaggcagaagaattgcttgaacccaggaggcagagggtgtggtgagccgagatcacgccattgcactccagcctggacaacaagagtgaaactccatcccaaaaaaaaaaaaacaacaaaaaa

SEQ ID NO: 3820 - DNA, 1048 bp, Homo sapiens
accattcctttattgtttttcctacagatcatttgaacatgcatccatgacttatcaaaatttaagatcaattagtacttttaactcttcctgcgtgattcaaggaccttaaaatatttaaactctattcctcttcctgccaaactatatatgctattattctcatgtattttaattctaaatattttataaatcccaaaatactttactattattgttttaggcagtcagtacttatttagatttatccacatctttattctttttattgtgctggaattttgaatcaaaaagagaacagaaaaaagaatttagtgcaaataagggccctgaggcatatggagaaacattgcgcagaaagatcataagtaagatataatgaaatgggcaggaaaatacacacaagaaagtaacattctctgaaggcaagaggcacaaaggtattctttattgaaaaagctttaggcagttaatgagttggagaagtattgccaagttacactcaccaaatttagtagtatgcctcaatttagtgggcacaaaagctgcttattgttgaatgaacaacaagcataatgtaattggtttcatacaattaggaggtcagcaagccatgcttgttataattggcactgccatagtcaggggcttatgcgacctcaagtgatgatttgcctgaaggaataagccaggaatgtgtgtgctttgggctccagagacttgactaatctggctgcaaggcctcagggagggaggccaagaatcaaatcacagtgctcaggcagggcttggtagactcagttgaatgtagtcagtctccattcagttcatcactcaccagtgtttgagccggagccggggaagtgggagatagaggagaggagagatcaagtggccgggaaccaggaaaacacaattgaaatgtcagtgcagaggcatcccataatagggcgggatcttaattcctcccaaggccatccactttgaagcaggtctccagcctgtgtggcatgggcttaaaccttcacacaaagggtctttaatttct

SEQ ID NO: 3821 - DNA, 381 bp, Homo sapiens
gtcatatttgcatgtagcatgttaacactgtttttaaacacagatgactagtcaaatcccccacctcctgctgggatccacattgaatcgtttgtgtatttccagtgataggaaactcattatctcctaatacatcaaaacaaataataaccacattttctcttacactgagcgaaaatctgcctttcttgcatttctagccatttattctatttctgctttttggaaatacatggtcaagatcttttcctcttcccagggagaagagcagaaaaaataactattgagtactagggttagcacctgactgacaaaataatctgtacaacaacccccagtgacacaaatttacctatataacaaacctgcacatgtaccccc

SEQ ID NO: 3822 - DNA, 1320 bp, Homo sapiens
ggtaaccttgaacttaccaggcagggatgagatgacgtaaacttcctcagatgatgtaagttcagccacatcttgctgcccattagggagagaggacgacccccacagtgaaagtaattgagtgaaatgcacgttctggaaatcagtttctattttggcctggaggaatgtggctatactgcttccctgagtgtgacacagttggaatctaatcttgttggtttcccaacatctaggtttttgtttgtttgtttgtttttatgatagggtcttgttctgttgaccaggctggagtacagtagtgtgatcatggatcactgcagcctctacctcctgggctcaagtgatcctcccatctcagcctcctgagtagctgggactacaggcatgcaccaccacacctggctaatttttaaattttttatacagacagggtttcaccatgttgcccaggctggtctcgaactcctggactcaaactgatcctcctttctcggcctcccaaagtgctgggattacaggcatgagccactgcacccagcccagttctttcttaaaacagctgagagttttgttttcttcagcgttcaccttccttgtctccagttccgatgctggcagtggttcctacctctgttgggtttctagatagtttgggaacggggttgatgggtttctgtgaaacacattttccaagtcttgggctttctctggaggggaaggtggatgctggcgggtgacttgcagtgggcgcctggcagtgggtgtggactgtaactgacaggtggaaatgagtagggacactattgttccctccatgccagcttttttttttgctggaaatgccccctccacacccctggtagctctgtgtcctgagaaatccagagtgtgggagacatcactgcatctgtccccccagcttctgtgaagggaagctgtggcctcttttgaatgtggggaacaactgaagactcaggggtcacccagaggtctggtggaaagcaacttcaggtttcatcttgctctattcctcaaaggtctggtctgtgggcctctgaggagaaaacaggtctagccaagacagggacaaaatggggaaggggatgtgccaggcctgaactgagctaagcacctgccccgggctccacacttccatctttcttttgtcttcatttcacctctgtgtttaaagcactgtgtgacatagctccttagagatataacctattgtctgctcattgtcacgtgtgtgtgtgtcatctttgtattcttgcagtggtttcacatttccttacccagtcaagccagtatcccatc

SEQ ID NO: 3823 - DNA, 3456 bp, Homo sapiens
ctcacactgttactcgggctagagtgcaatggcgtgatctcggctcactgcaacctccacctcctgggtttacacaattctcctgcctcagcctcccgagtagctgggattacaggcgcccgtcaccacacctggctaatttttgtatttttagtagagatgcagcttcaccatgttggccaggctggtcttgaaatcctgacctcaggtgatctgcctgccttggcctcccaaagtgctgggattacaggtgtgagctactgcgcctggccaagttttttacaaatatttttcttttggtggaactcatctgtgcactctctggtgtgtttttccacctttgttgggtcttggcttaaaatatcctcatgtgggctaggtgtggttactcacacctgtaatcctagcactttgggaggttgaggcaggagaatcccttgagccaggagttcaagaccagcctgggcaacatagcaagagatcccatatctaccaaaacatacaagaattagccagatgtggtggtgcatgcctgtggtcccagatactcaggaggctgaggcaggaggatcacctatgcctgggaggttgaagccccagtgagccatgatcacaccactgtagtccagcccgggtgacacagcaagactctgtctcaaaaaaaaaaaaaaaaaaaatcctcatgcaagaagggaaggaccaagtcccattccctcttgcctcattttcagagcctggggtaggggctacaggtggcataggaagggtctgcaaggtgggtgggacttggcaggtgttgggaagaggaataggggtggcaagtgtcaatggtgaaaagacaggctgaggggtgtggtgggaaggctgggggagaaaggtgagaagtgattgggggggcttccctgatgagtcctcatggagggtgctgaggcagggaacaggggtgcagggacagtgatcagggcacctggtaccctgaccaacttgatgatggcatctcttttaagatgcccaagtctgcgcacttttattcctttattcggcccctagcaccccctccccaccccaaagaaggtcagttgcatgcgtgtggggatgtagctcaaaaaagaaataagatggagtggaaaggaaagaaaggaagaagcaggaattcaaggtgggtgggctgagcttggggccacctagcccacctgctccaatcaagggctggaacaaacctgaggccacttggagaggcagggctgggcagggacagggggtgggggccgaaatcacagcttccccatcagagccagatgtgtgaaggaaatgtcccagatggcagtagtttctcggcaaggaggggaatcctggagatggttcatgtctgtgatcccagtgctttgggaggctgaggtgggaggattgcttgagcccgggagttcgagaccagccctgggcaacatggcgagaccccatctctacagaaattaaaaaaaaaaattagccagttgtggtgtcaagcacctgtagtcccagctacttgggaggctgagttgggaggcttatctgagcccaggaggtgaaggctgcaatgagccatgattacactactgtaccccagcctgggcaacagagcaagaccctgcctcaaaattaagaaaaaaaaaaggggggccaggcgcagtggcttatgcctgttatcccagcactttgggaggccaaggcagactgatcgcttgaggccaggagtttgcgaccagcctggccaacatagcaaaaccccatctctactaaaaatacaaaaattagtcaagagtggatggtgcgtgcctgtaatcccagctacctgggaggctgagacaggagaattgcttgaacctgggaggcagaggttgcagtggtgtgagatcacgccactgcattccagactgggcaacatagcaagactctgtcacaaaaaaaaaaaaaaaaaagaattccctgctctgcttttctgctcgttgctggcatagaaacatctagaacagaaagtatccactctggggcagatgggagagctggaaaagtagattcaagatgccttttagtcttggaagtttcttccaggaagcaagaccagctggtatgtttacacctgcactccagtgccctggggaggtgaccaggtggagggggatggctcatggaaatctgtcccgcacagctggcccccttttggctgccactgtctagactgttggcctttgacctctctgcctcttgtggcgtctgaacctagacgtcccttttggagacagctggacaaagccctattctccgcagccccagcctctatcctgaggcctctgggagctgcgtgacggccagcatggggtgctgatcatggtcaaggaggcaggtctttgccaggttgccccatgcagccacccatcctcagcatcctaacttgagggggcaggagagggctttgtttttataatccggattaaatttcccttccctgggcacaagtgcctcatgagggcccggggctgctggttgggagggaaagcatccccgtttttgcagtgaggaggccggccgagggctggggttccacttagacccttggcagaatggctgttgaggggcaggcgctgcccagtgcccacgtctggaaagctaattcccgggtggacgctgaacatacctgctgagagactctgtcccctggtttccaggacagttgtcacaagctgagtggggggggactcccaggacttgagggacccagtcccaccccaaactgctccccctcccccaaattccctttctcctcctgctctttctccccgctgtgcctcccccagttacccacagaagtgcctgcctctccagcgctcacagaacacacaaaaagggacaggaattggtcactgggtagtggccgtggctcctgacgatccagaccagcgtctggcccaagccattcagaggtggggtctggggcctgggggttttgtgtcgtgacactttgtctcaaggagattccacatagggatttgaattaggctttctgcttgccaaggcctgtggcatctgagcctggctgagggccgggcaagcctcccctgagcctttggaagccgagttcactctctgcctgcccaggggagcaccggcttggttctgggggctcctctaacatctcaggtttttatcttgtcttaaatttctttctaggaaaaaacccttccctgccaaaggtgactgtgttttctgccgccgaaggagggcccggtccctccaggctcagtgtggcttctccctgacccccgccctagaacttttgccagtgccttttctgaaactcctgtgtcccgggccccccaggcggagaaggatatgccggattctgcctggggctgggctctaggagaccccaaatttgacaccacagaaagcaaataaaacacttgaaatacgcataca

SEQ ID NO: 3824 - DNA, 348 bp, Homo sapiens; identical to SEQ ID NO: 919

SEQ ID NO: 3825 - DNA, 113 bp, Homo sapiens
ttgagggctcattcggacctgctggcttagttaggggacctcttactctggaatcttatagtccaaaacggggaatgttctagacagagagattctaaattcacattaaaaaa

SEQ ID NO: 3826 - DNA, 1234 bp, Homo sapiens
agctaatttaaaatttcattgaacacatggtgaccaggaaaactttttttcaagcactgttggaaagcaccacaaagccctttagaattaatctggatttgtttctcaagttctgctgaagtttaaaaaaaaactttattatacaaataactcaaaattttcctgtgtaaaactaaacctgtagttttaaaacataatcctgtttgcattagagctcactgtctttttgtgatggaaactgtgttcgtatggaatgactaaaaatcttttatttggtttgtttcaaattacaattgctgatggacaatttgtattgcagcgagaacaacagaatgaaagaaatgtatctctgtgcggctatacatatacatacataaaattgatttttaaatttaaaacatatggaaaacaaaacattgaacagtttgaattttgccaagttggacattaaagtaaaaatgaagtgaaatcatgcattgaaagaaaacattttgtttctaaattagtctaccattgagtgagaataatcaatatcaagaaagaagactatctttctcaactaaacaataatattccaatcagcttgggaagacctgaaacttgaataagcagtggaaatgccaaatataacagagggtatgtgctacagagaagtaaaaagggtttgactttttatgatgggattttttttttctgggtatgtaatctattttttttttaaactggaaagcatttttgtcagtgtgaatgagggtcaatagtgcagccagtggtgacatttttctttattttgcaaaatgcttttaaaaccaaaggctgctctagttgatggacagtatcagtcttgatctaaattgtaggacactttttcatgtaacataacatttggggattgggtttatttagtgtaatgaagataatttgatataaaaatattttgtgtatatatatatatttttactttgttttctaaattgctgtttgcagtaacagtaagcgcaaagcaaaatatataagttatgactgtatgatcagatgaagtatgagttcttttggtttgcatccttaaatagttagagatctctgataaaaactttggaatctttgcaaaacaatacaaaaatgccaaaatgtgagcatgtcaatgaaaactaaagacaaatacttcactctttttcatactattataagttattctggtattaaatatgttaataaaagtgtttttgttttg

SEQ ID NO: 3827 - DNA, 508 bp, Homo sapiens
agcgcagctaacagaaaaggaccaagcaaggatgacacgtattggaaggagatcaacgcagctatggccttaacaaatcttgcacagggaaaggacaaactgcagggaactaccagctgcatcatccagaagtcgtcccatatagcagaagtaaagactgtcaaagtgccgctggtgcagcagttttaagagcttgttgcttttcagatccaatggatgttctttccggtgttttcatcaaccctcatcctaagagccgaagcagggatgaaaatgactctctcccaaacctcttcttatttttaattatcccaaatatatcatttagttgcttctataaaagacatataaattataaaaaactcattttaatcaaaaatattaacttattttatgttactcaaactatgcataaaacatctgcattaccattacagtaagtgccttgcttcccgacaataagctccaacgtgggcatagttgaacaagctatgcctcaaaatgccaa

SEQ ID NO: 3828 - DNA, 1004 bp, Homo sapiens
agtgggtggaggccagggacattgctcagcacctgcagtgcccaggacaaactcacccagagaaggatccagccctgaatgccaagtgggggactgcattagttatttgggaaaaaaaaatcaagtctgctccctgctcacaccagacaccagaataaactcccaatatggcagacggtgtaaaccaggggacctcagctcctgggattctcttcctctccccctctgtggatttcaatgtgtgtagcctcctgggacctcagcagagcagaggatcatgggccacggagtctcttgggggtccgtggaatcccctaacccaagaggtgtcaattgagggtaattctgcccccaggggacactgggccaagtctgggacatttgtgtttttctcatgactgggggtgctcctggcatggagtgggtggaggccagggacgctgctcagcaccctgcagtgcccaggatggcccctccccagagagtgacccacgccgatgtccacagtgcagagagtggaaacgctgccctagtggcagacgcagcagattcagaattgaaggatctgagttcaagcccagacttgtaccttttacctcccaccctcaggcgaggcaactggcctcagcttctggacgtgcagcacgggtgagcccctcccgccagccaggaaatgatgagtttcacgagagcaggtcctccagggccccagcaaatgccaggcctgtttactaatgacagcaaaggtccaccatcacttagcaggaatgagagcattcgctttcagcctgccctgccagcctcacagggctgcggcatgaacccctgtagggttagtttatgagtgcgtagggaagtgctccccagaaagcaggagaaacacggatggccagatacacgtttgagcctctgacaactacagtcactgtgtactaactagtggtgaggttggcaatttgtaaaaattactcattaaagagggagacagagccaggctccgtggc

SEQ ID NO: 3829 - DNA, 347 bp, Homo sapiens
aggcgagactggggtgggcccctggctcccactgggcgggctcagagcatggctcctgcccccacgttcagactgaagccatccaggaggccaagaaggcggtgccaagtcggtggtgcccagtcaagcccagatcctgcggccctgggttaggaaaaagttccgtgaaaggagtgtggccctgggttgggatggtagcttggggcgttcctccctgtggcttcctctttctgacacttggtctcttgtctcttgaaactttgggctgagtcctctgaagcaggcaccacaggtgtccgtgacgtctcatcactgtaactgtcccctaggtgacacgatcttagctt

SEQ ID NO: 3830 - DNA, 913 bp, Homo sapiens
ctgggcgcagtagctcacgcctgtaatcccagcactttgggaggccgaggtgggtggatcacttgaggtcaggagtttgagaccagcctggccaacatggtggaaccccgtctctaccaaaaatacaaaaattagctgggcgtagtggcgggcgcctgtaatcccagctacttgggaggctgaggcaggagaattgcttgagcccgggaggcagagcttgcagtgagccgagattgcgccactgcactccagcctgggtgacagagcaagactcggtctccaaaaaagaaaaaaaggtctgggtatccatactgttttgcaacttattttttgcacttatcggatattgggtgtccttccgtgtcagagcctgtgtctcattcttcttaaaactgtgtggccgggccgtcctgggttacacaaggatgagaagtctcctctgggttgagaggttttggctcaagtttaaggcttttctttccagccagatgggcttgggaatgactctgcaggaagcgcgtgttcccctgatctggccagcagccggcactggaatcttggttgtagggttacttactgcaggggtcagtttcacggaggtttccctcccttttcttccccacaggttgtgggttttctcttaggtcttctggctttaatgcagagctttatattcagcttattagttttaaaagtgtgttaaaataatgcacgtattttggccgggcgcggtggctcacgcctgtaatcccaacactttgggaggccaaggtgggcggatcacgaggtcaggagatcgagaccatcctgactaacacggtgaaaccccgtctctactaaaaattcaaaaattagctgagcacggttgcaggcagctgtaatcccagctactcgggaggctgaggcaggagaa

SEQ ID NO: 3831 - DNA, 527 bp, Homo sapiens
tagaaattttctttggttatttttctgatttgcttaattttttttgatagtgacttgttctttgcttatgttttggcattttccttttatgtcattaatactgtaattttagacataacctatgttaggtaaagtcctataattatctctagagttcttaaaatatattttttctgtctgctgtctctcactcatggtcagttcttgggttttatgtgtattatttatcaaccataatgttgaattatggtcttgtgttcagggatgcagggaagggttttatctatggacattatttgcagcttatgtcaaagatgggtccctctgaagtgtagttatttgttttaatggtagcaggtaagacagtaaaaagaggctgtgatacattttgaatacggcactaagaagtttagttaattttgtagacagacttatttgttgattcaaaatgagaaagaggccaggtgcagtgactcatgcctgtgatcgcaggattttgggagaccaagatgggaggatcacttggg

SEQ ID NO: 3832 - DNA, 270 bp, Homo sapiens
tttatttttttatttttattttttattatactttaagttttagggtacatgtgcacattgtgcaggttagttacatatgtatacatgtgccatgctggtgcgctgcacccactaactcgtcatctagcattaggtatatctcccaatgctatccctcccccctcccccaaccccacaacagtccccagagtgtgatattccccttcctatgtccatgtgatctcattgttcaattcccacctgtgggtgagaatatgtggtgtttggttt

SEQ ID NO: 3833 - DNA, 739 bp, Homo sapiens
tttagaaatccatctcatggccgggcgcggtggctcatgcctgtaatcccagcactttgggaggccaaggtgggtggatcaggaggttaggagatggagattatcctggctaacatggtgaaaccccgtctctactaaaaatacaaaaaattagccgggcgtggtggcgggcgcctgtagtcccagctactcgggaggctgaggcaggagaatggcgtgaaccctgggggcggagcttgcagtgagtcgagatcgcgccactgcactccagcctgggcgacagagcgagatttcgtctcaaaaaaaaaaaaagaaatccatctcatgcaagttttgttaaaggaatcagttcctcgggccttggcctcctctgagagcactgacataaatctgtcacttaacttgggacaggatggaagctgctgcctcttctagcctcgtcctctctggcctgcactgctgtgcagcggtgtcagtgcaggggcatctgtggagctcagcctgccctggatgttctcgtctcctcccaggggacttaagactccacctaaggttgccagcctttcagtggtaagacatctatgcaatcaacccgaagccttaccacctggcactacttcagtgtatccttagactaccaggaggatctctgagacttggtggggaatggaacagcttgctgcaatttgtggatgtagattccgtatatttttgtctcttccaagagactgtaaactct

SEQ ID NO: 3834 - DNA, 831 bp, Homo sapiens
aaactcgacacatgtttaatgatcaccagaccgtggagcttcaaaaaggggctcagctttgcctcctgcgtgaaggcttccggccggaggggtggcggccggcctgggtggcgtcaacttgtatcaagggttggtggagaacaggccctcagccacgggcacctcctgacggggctgcttctcatcctgtttcccaggacctgtatgtggaccagctcaccactcgagcccagcaactggaagaagacattgccctgtttgaggctcagtacttggcccaagctgaggacacccggattttaaggaaagcagtgagtgaggtaaaagcagtccccgcagctctcagtgttcgaccctccagtgagtgtccacgcacagggtgctggtgggtctactagactgcacctgcccgtctgctggatgagtgactgcagccagcttacatctgcaaacattgggccctccccatggtggggccacagtagatactgacaggtggacagcccggattcctattccttccctggctagtgggtgacagaaggcctcgcagggttcaggtactctagtcgcttcatgaccgccaaggccagcttgctgcggggatgctcagcaagttccttagcctgcagggacctcttccggggaggactgaagtctttctaacaattctcacccccgtgggcagccggccttccgggtagctcctacatctctgcacctcgtggagtagggagtggaggggtcgaagggggtaagagctgctccctcttggccccagattcaggtctgtagtggtagccccagaaaccaaagttactgcagcttaaa

SEQ ID NO: 3835 - DNA, 4237 bp, Homo sapiens
ggggatggtttgtatagggcaggaggcccacccagaagtcctacccagggaagagagggcccagaatctagttgcagcatttgcccagtaaccctaccccggcctttctttgtgtgttaggaagctggaaatgcaggctggtctccctttcttgcctttgtcactaaccccgagctgtcagccatttggaatcagaactgctttccagtgttctaagtccttatttgattacaaatatttggtgaatcaaagtaaggcactttggtcctaatttttgacctttggtcctaatttttgtttgtaagatgtggagaataaccctgaccttaccaggggtcctgggaatgtgaatccattcgtcaagtggttccacatctagaagaattttgcctatgccatgtcaggcatcattcaacacaaggccaactatctgctgccagtctggcataagatcagattgaaactgctaagtaatggtacatccaaataaacaaagttcttccaagagagtaaacccaagtccatcttatacacgtatttgttctgggttggtggggacgacagttcagccgagtccgatgttctagagcagaggttctcaaccctggctgtgaattaggatcatctggccagtttttgtttttaaatcagtgcaagggccctcccctcagagattcagattcagtagcttcaggtgggacctggaatccatgctttgtttggaacctcaggagtgttcttgatgtgcagccaggattgacaagagcctttagtctagagctcgcagcagacctctagactatttggaatctgattttaaagaatggcccagcagatgaaggtgtttttttaaattgttagtcatgtgaaacgaactgagtattgatcagtaatacagacagggcagctgtgagagagtttgatgctaatctttgcagaactcaagaacatactccataaagtacagctgaaaagatcacgaaaaccttggagccttcgaggaaagagaagggtgacttggggtatgtatggggagaactaaaaacctgtcatcttggttcccacttgtggggaataaagggaaggtattgtcttaactgagctgctaactaatcaagcatgaaggtttctgggaagctgttttgttttttttttttaatttcacctggaattaaattaatagtcccctctggagtcagattttcttttccttcacctatcctcatgcctgagtccacactggattcctcagaataagggtgggcccatttactgctggagcaaagtagaaggttgtggtcctttgctatcacatggtgatggtggtggtttccgtagcaggtaattaaggagatgcacacttttgtatagccctgacagagagaagatgaaagctgctattccttttagtacactttttgagaactaccagaaacctgaactttctctcctagggaagaaaatttggaatttaaataaggccacatttcttcctaggacacaatcacaggaagggcatatggatccgagcatccagggtggttactggggtgatcagacaaataagcattgatgcctggaaggcagaaatcacactgcgacatcaaatgtttcatcaagcaaacagcaaggatctcttcaggctgtgttctctagacccgaaaatgtcctctgtggtttggctgacaaatggaatctctttagaaaacatgcaaaagggtatctcagctatccatgaacgattcggtctaggacaaagaactaacagttccttccaaaatagaggtctgttggtctgtttgacgtcatcccatcatcctatctctccctgtccttgtctgcagtagaagttaatgtaatcataccagatgtttaatgtgaacaagtaatttccaaatgtagaaacaccactgatgcacttagggggaaaaacagtggcagggtgttagagcatctcatcagaggtgaaaatcacccacttggaaacctactgtgcacccgttgtgagttctaagagtgtatcagaaagctgattttaccatctgttgtgaaagattatctgcaatgagggctgctagaaagtcagcctgctgatctcacaagtatatgacttcttattccacttcaaaagtggggaacttgacaagtttcttgtctgccttttgatgttgattctatagattaattagttcaggaacaagtctttcatatacattagactggtatcattgagttctgagctattctgttgttctttaactgacactctggattgccagtgtcggctgctacattctgatacagtaagtcaaaggaatctagtggccaagagttgtagtttagaaacaacccatctgaatactgcttttaccactttgatacctgaaaagatcatccccctttctaaaacctgaaaacaacatatagagaaatactgtagaaaccattgctagtgtcttaactaggaaaagcaagtagactcatcaacaatcctttcaaaacaagacctagagataaacagttttttccagtgtcaattttcatagacatttttaaaaaattaaacacatcttgtcacccagtgctagcaaaaattgtaaagagcaaaaccaaagtttttgatgttagtcttatttttgtaagcagggtatactatagtcgtggcccatatggaacacacaggcagccggttttctgctacctgagccttggagaagatgagaaggaagggctgcctgctgtgctgccctttgaaaaggtccaaagcagacaggagcgcacacagcagaagtcaccttctccttctgatgaccacctttcaaaaggcttaacagaatcaccaagtgtcacagtcagctcttggccagtggaaaattgtctgggcctgtatatgttggaggaactcagatagaaaaggacttgtaaacagcatggaaacctcaacatctgctgtctcaagcacttaaaaaaggctacaattcaggtgttactggatgacttaactgcatggacatttaggggctgacttgtgttgtgattattccaattgtgggctttggagaagcagagggatgattttcagttgtgtgggtgttaagtctatggattgggaatttaccactgaaattgatcgttcaaagtgtgacttcatagtagggccagctcctcctaagttgtccttttgtttttcacataaaatacatctggtactttttacttggaaagttgtactatgtccatgaaaatggttaaatgagaaggccataaagattcatttaatagctgaaaagcaacttttaaaatagaataggacgaatttaacatggaatgatgtgaccttctagggaactttttatagagagcttacatagtgtaattggggagaattttgtcttctatttccattcaacagtagcaaactggtggttttataaaattaacattatagtatgttatataaataaacgttatataaaatgacattaaagtataactgtgaaaaattaaagacttggcgttatccacaacctttatgtgcaataaggaaaactgcagtaggcccccaaagtgccgtctttccctagcattttactcaatgtttgcctttgtgtatgtttagattgctattgtaaagctagccatgtgtgttcctgccctttactgatatttaacacattttctcaaagcttttctttttttaaaaaaacaaaactcaaaataaaacaactaactggctgagctaattttgttttgtattttaaagtaaagtatcatctgttggtagaaggctgtagtgtgatactattcttagtctgtttccctcactgagaggttcttttctgggtgtaagctattcctctccagctttctttaggcctggggttggcaaactacagctggctcctgaaccaagtccagcccactgcctttttttgtaaataaagttttattggcatgactaggctcattcatttgcttactgtctgtggctgctttcctgctacaatgacaaagctgaggcgttgcaacagagatcatatggcccataaaaagtaaacagctatttactatctgggccttaacagaaaaagtttctgccagcctctgatttagatgcttgaagaaattcagttttaaaatagggctgggcacagtggctcacacctgtaatcccagcattttgggaggccaaggccaaggtgggtggatcacctgaggtcaagagttcaggaccagc

SEQ ID NO: 3836 - DNA, 601 bp, Homo sapiens
tgtcattaacatgactccagagtcatttaatagtatgattacaaaaacgccagacagaaaaattttaaagtaaaagtgtgtttcagttcattagggttttcccagcccagggagaaaaattacttctttttaaaaatcagttctgggtagagggagacggagctatttgaaggacagctggatgagtcaggttaaaaacaatactgcccagacctattattatttaataatattattaagtaatttaatcaagacaggactgcacttggcccttattcacattgatgttttcgtccagacacctgctggtgtgaaatggtaccaaatcacatctcttctttgttgtgaggatgccttgttgaaatggctccagcagtggcaggttcagcctgggaactaaagctcttcctattttacagccataaatatccacattgcactgtcacttccttactggaaacttcatctcaaccaatgcgtccgtcattattgaacagctcatgatattcctgctcagcagaattgcacagcagttgttggtagcaagtcaagtcccagactctgagagtgtgacagattgcccccacagcgctgcttctcc

SEQ ID NO: 3837 - DNA, 229 bp, Homo sapiens
ttgtttttgttttgcagagatggagagataggctgcttgggtctttggttgggtctttataaagctttgcttatcttatattgcttacttaattttggagggaaaaaactaacagacacaccctggtgatggttctttgttcacctcaaggctttgttgttgtgttgttgttgtttgttttttgttttgttttgttttgtttttagatggagtctcgctctatccccca

SEQ ID NO: 3838 - DNA, 563 bp, Homo sapiens
ggcttgctttaatgttcttaatgtttttgtatgagatcctccatgtgagatttgaaaagatccactatgcgggtcatctaaccggtcactagacattgattccacacttactacgtcgagcacagttgacactgggaatacatggatggacttatactagccctaaaataactccttttctattagaactttactaggtaaaggtatttgaatgtctgaactccatgtttagaaggagtcattggttttaaggctctgtcctagtacacctgtaagagcatttgcttaaaattgcctggcctttgtatgttatctctgtcacttcatatttgaaaatcacttgctagaatatggcctgatcaatgctgttatgctagtgagaaaatccacaactaaagactatttgctatatattagcattacggttagaagtctggaagcctttggaggctggcaaatctgagttcaggtctagctcttcgagtttactggctgtgtaaccttaggcaatttacttaacctccgtgagtctcagtttccttatctgtcaaatgaggataaaa

SEQ ID NO: 3839 - DNA, 1031 bp, Homo sapiens
ggcttgctttaatgttcttaatgtttttgtatgagatcctccatgtgagatttgaaaagatccactatgcgggtcatctaaccggtcactagacattgattccacacttactacgtcgagcacagttgacactgggaatacatggatggacttatactagccctaaaataactccttttctattagaactttactaggtaaaggtatttgaatgtctgaactccatgtttagaaggagtcattggttttaaggctctgtcctagtacacctgtaagagcatttgcttaaaattgcctggcctttgtatgttatctctgtcacttcatatttgaaaatcacttgctagaatatggcctgatcaatgctgttatgctagtgagaaaatccacaactaaagactatttgctatatattagcattacggttagaagtctggaagcctttggaggctggcaaatctgagttcaggtctagctcttcgagtttactggctgtgtaaccttaggcaatttacttaacctccgtgagtctcagtttccttatctgtcaaatgaggataaaagaacttagagttgttattgagattaaacgggatgattcatgtaaaatggcttagaataacgactggcaaatcttaagcgcttaccacatgttaattgttatcaatgactttctttacctttcacaccattaatatctgaccaacctctagaagtgatgggcctaaagaactcttggagctaaaattctttgtcacctgtaatgccagcgctttgggaggccaaggcaggcagattgcttaagcccaggagttcttgaccagcctgggcaacatggcgaaaccccggctctacaaaaaattagccaagcgtggtggtgtgtgcctatagtcccagctatttaggaggctgaggtgggaggatcacctgagtccaggaggtcgaggctgcagtgaactgtgatcatgccactgcaatccagcctggatgacagagcaagaccctgtcactaaataaataaataaataaat

SEQ ID NO: 3840 - DNA, 247 bp, Homo sapiens
ccagcgggggctgagggagaggtggagtcgttaccaaaggttctgcccgtcctcgtcgtcgcctgccgcggcgccaccgttgcccgacgctatctcgttgcccaaggggccgccagtgtaagtcgaggataatcccggcggagaagaaccgaaggagccgactcgccccacggccgccatcttggtcgggaatcacaccactcccggcaagactaaatgtgcgaggcggctgaggcggtggcggtgg

SEQ ID NO: 3841 - DNA, 247 bp, Homo sapiens; identical to SEQ ID NO: 3840

SEQ ID NO: 3842 - DNA, 307 bp, Homo sapiens
ttttcatttgcttagatttccatgtctttaattcagtttcaaattcccgtcccagctgtgtaaaactccttgttaggtattttaacaattttaccttcttaaagacacctttaagaaccttctagcctgctccattctgagttggttattctgaaactgaatacacagctgtcatcctgtgatctttcaccattgttcagaagattccctttgcctcaatcttgtgtcttcttgttttagtggagaacttcccccaatagttttctgataaaaaggctcactggtaagtctttggacaccagtgtat

SEQ ID NO: 3843 - DNA, 10885 bp, Homo sapiens
agcaaagaagattttctgaatatctgcattgaacctgacaccatcagcaaaggagactttataactatagggtaagtggactggggttcacaggaaatgaggcttgtgattttctcagattttactattcagagtgccccatgaagtctaagacagaaatccagccaaagccttgtcttgtttgggaatttcgatgttatttctttcctatgggctgacatgtagagtgcccctctcctatgctggccatcactgttcattttgtggggatcagaatgtaagagcagtctttgtttttcaattgaaaccaaagaattcaatggagcatgacacagcgtcaagaactttggtttcagggtcaaagagctgaatgcaaattttgattctgccacttacccgacgtcatgactcggatcatttagcatctctgaattctttccgtctacagaatgaaataatcatctctgccgatctcaggactggctttcagccttgagtaagagaatgtgtgtcaagcctttttatattttgaagcacttcacagtatccattactatttatgtcagttcaccatgtcctcctattcccagggccttcatgaaaaactggaaaaggtattgagtaccttggacatttcccaggcctttttcccttttccaatacagaatacccttccaagttctgtgatttgttaagtcctacctctgccagaattttattggtaaagaacactataaatcctccttcagggcatctgaggagctggtgtgttcccatgccaactggtaatctgctcagctccgcttttctgtgctttgtctcagagctccctctcgtgcccatttagggatcacacatttctgctgcagcggcctggtctccatggctacttcattatctacacaggcacataagtttgttgttcttgcctttggcataaattcttcagagactgaatagctgattctgcagcctttgattttcttgctgtatctataagaagggaaaatcctgttccttctacagaatgtccagaaatcacacaatcttcattgacagtctggccagtgagaccagcaatattcaaatctcctttatgatactggtatccagaaatagagaccccaattctattgctaaggttaggcgaagccactatgttctgcattgttagcaccagtggcagccagtgtccttctgttctctacaggaagtgaaatcaagtaatgtctgtttcctctggatatctgaagagaacatagtgaagctgcgttagaaaactctgataccgttttgtagagttactgttgttaataaatgataaatggactgatttacttagattagcttttactgtatttccactgcctaaaagatacatctgcatgaggtggagtgtgtgtctgtatatgcgctggaaattttactccatagtcactcagtcaaggtagatattgtatgccaagtagaccgcgttataaatacagtcatcccacggtatccttggggtattggttccaggacctccctcagataccaaaatccacaggttgtcaagccccttctatatagtggcacggtatttgcatagacttaggcacgtcctccctatgcacactaaatcatctctagattacttataatactcaatataatgtaaatgctatgtggatggttgctgtcctgtattctctaggggataagatagtctgtacggattcagtacaggtgcaaaaatatgtattctctatcctcagttggttgaatccacgggagtgggacccacagataggaagggttatcagagaacttctaagactagttgttcatatacataaaagaaatatctacattaaagtaaaaatattttatccttcaagtaatcacaagaagtaccaaataccagacgtttagtacttttcctaaagaatttcattctaatttttaaatttgagactaacaatctaagaattaggtacatgtggaatgattatttttaaatcaatcaatttttaaatcaaattaagagcatttcagagaaagtcataacttcatgcccagttctctactttcagtctagaatgtatcacaaggctaagcaagaatcactgttggaaaaattatttacagaattctatggcttaatagaccatctgtccacttatgtaagctcataaaaagggggaaagaagttgctacattgttgcaacctagtgcagttgccatcactggtcttaagcttgctttttcctgtgctcacagaagtcgaaaggtgagaaaccccaagctgcacgtggagggcacggagtgtctccaagccagccagtgcactttgcttatcccggaggtgagtggggaaggggtcggtagtcacagcatttgattcgttcgtcatcggcctgcccctctgtggtgtcccatccttcctctctgttagctgacctagacttaggcacatattgtgtgccaagcattttgccaggctctgggtcatattagcggggagctgaaaaggatggcagaatctccttgggagtcatggatttagagttggacttctgaagactcccatcgttttcgaaccaaggttcttccctaaagtgagttttaggtctccttttatttttccatatgtaaataatgcagaaggttactacattaagacacatagagaattgtctagctggcaaatgttaatagtggcttttactttaacattttttataaaggatctggaagcagttttcagttcaacactgaatttttctgtattatgaaatgccatgcttagaataacctatgtaagtgaaaaaaattggaaatagaatctggaattgggaggttattcaattgtcaatacggaaaaaaaggaggctcttcatatagcctttgaagacatgtggccatatattactgtattcagacaagactataggtaaacagaaggtatccccatagtgactggcgtcacagtttcgatataaatattgaattaaatgcatgagttatggaagggtttcatagactgtaatgatattaatgttgatacaccttgggtatatcaagctaaacaagtcttagagaataatgaaaatgatccagcagatacaatagcatgtcataagagaattagctgtctttatttttatttgagaaggattagcataatatagaaagactatgtatatgagttccttaagacatggcaggacccttgccttttaatacatatttgaaaattataaccatgttgttcaaatcccaaaatactctgggaggagataggggccaaaaaaagaaaataaatcctttttcatggatggtagaattaggatgtttccagaaccagcactgtgcccatcgtagtaggcactgaatttttttttgtaaaagaacattaggatagctcctcaagagaggatgttgttttccataatgaacttcttctggtgctgctgtgagacctccaactccagtaggccactgatgtgtttgagctgttctgaatattctcttctccccagggagcagggggctcttttagcattgacagtgaggagtatgaagcgatgcctgtggaggtgaaactgctccccaggaagctgcagttcttctgtgatcctaggaagagagaacagatgctcacaagccccacccagtgagcagcagaagacaagcactctgagaccacactttaggccaccggtgggaccaaaagggaacaggtgcctcagccatcccaacagtgtcgtcagagggtccccagggcattttcatggcaagtacccctctgcccccactccagcagtgcttcccaaagtgtgctctgtcacctgctttgcaatcggcttccattagcgcatgttttattttggtgtgacggttggccctcctaaacacggactttcctcaggctggttcaagacggaaaaggactttcttctgttttcttccaaagtgcaaccacagtggagagcccacggtgggcttagcctgcctaggcccttccatttctcttctttgaccgtgctaggaattccaggaaagtgcattcctgccctggtgaccttttcctatgtctaggctcctccacaggtgctgctattttgtgagctccggctcctgtttagcttttatttcagttctaacctcagtccagaaacatatgtgaggttgtttccctcttcagccacggctacaataccggaaaatgctagtttttatttatttttttaagtagtgcttcctaaatggtttgcatgagagccacctggggtacatgttgaaaacttatttggggtctaccccaaacctaataacccaaatttggggatggggcccaggaatatgcatttttaaaaagtcatctgcccttcccaggtgattctgtaagttgtccctcaactgtacttggagaaatcgtgttttaaagcagtagtccacaaagtattctgctcatgtgcccccaaaagtattttgaaaaatcatgtataccctcacccatctaagttgatatctaaaattttatctaagttggtatctaaaatttttcatgggaagttaaatagttgacaaagtatgtatttgctggtgtcgtgtaaatattggtattttaaaataaaaactgttacatcactattttaaacatatccagtacaatttaaatatcacaacaatttgacacccttcattcatttataaaaataaatgagctagttctttagtagttaaacatttcaaattggcttttctccttctgtatttccataccacttttcagccaagaatcctatcataatgtaatctattatgcccgacatcttttaatcattcaccccattacttcttgtcaacaaaaaatataaatggaaattttttttttagctcttgctttaagtgtttgtttgttatctcagtccagaaccaatattatcgtaattaattattggtatataatgaaaacggtattaattcttggatgattaaaagtttttttattagaatgttctttatcctaattagttcatttatccaagaatacatgaatgtgatttacagctgagatggggttcaacctcagctgtattccttgtttctgtatagatgtaagcacataaattcgatggaatagaattacgttaacaatgtttttacagttctttggattcctttggcattttgacaaagatcacagtgctctatcatcaagaattattaatgatgatctatcaactaacaaacaacttgattagattctcctttagtctgttgaaagcagagaactgaaatccacctgatttaccatggctttgccagccagtcattagcaccatttacttttactatcgctgacattttcctttgttcagtggccctgaggttcttacactctagggggcagtgcaccacaggaagatagatcaatgagggaggattgcgagggggaaggggaggaagcagagctggcaggccttagctacaggctctctctcaggcagatcccttttaagatacatacaccatgcccacacatcccatggagagagaccaatgctttagtagattacagaacagctatgaaaagtccatgaatgaagatcacaaaaaggaaggctttcttatttcatactgtattcttcagggtggtaaaatttctgcttttggcaaaaacataacagacggttccaaacatcagcataaagatcactcatcccataccacccacaggtagggaggaaggatgctgtagtatatgaaaacaaaagttttcacctgagctgagagcatttagcatatcgtggttctgtaacaatatcaaggaccagtgcagaatctggctttcttttctgataggctaccagtgtgtgtttatgtgtgctcattttgtggttctaatcataatggtacatataattagggaaggatatggaagccactttagaatcttattcatttttaaatataaatatgccttgtttcaaactttgttttcttgattcaggctttctttcctgtgagggcttggtttccttattgttgactgctttgttctttgccttgtccttccctataaagcctgcatggaagacgtttaatagtgcaactaaaagagagtcagctgagtgaggcttgtcagccaaagctggaatgctgagctatctggaggagatcctaataacccaatttggggatggggcccaggaatctgcattgggaagtcggccacccttcccaggtgattgtttagtacaaactttttgacagattaatttcactcaaatgcaaagattaatcccagcactttgggaggccaaggaaggtggatcacctgaggtcaggagctcgagaccagcctggccaacgtggtgaaatcccatctctactaaaaatacaaaaattagctgggcatggtggcatgtgcctgtagtcccagctactctggaggctgaggcaggagaatcgcttgaacccgggaggcagaggttgcagtgagccgggatcgcaccactctgcactccagcctgggtgacagagcaagactccgtctcaaaaaaaaaaaaaaaaaaaaaaaaccgtagttgctttctattaagatagggttttaaataaagcttttttcctttccctcacagctgttttgcacatatctggatgcagttatatttcctaagtgccagtgcttcacatatgtaactgatgcatcagttctcacaacaaccctaggaagtagctacaggttgagcatccctaatctgaaaaggcgaaatctgaaatgctccaaaatccgaaagtttttgagtgccaccatgatccttaaaggaagtgcccagtggaacattttggattttggatttataatgcaaagattctaaaatcctaaaacatctgaaatctgaaaatacttctaagtcccaagcatttcgaataagggatactcagcctgtaataatatatggttacatagcacagaaaataggaacctgactttgaatccaggccatttgatttacagagccaccgatagcaatgtactctataccggttctaaatacatactgtaactccccaagaggttaaaaatgaaataaaagtttagaatatacacatataccaaatatatatcaagtacataaagttttaaactgaactttgataagagagtttgtaaagtaaaagggtggtggtctctgtgggattctagaagtttcctgatgtaattaagggtacacagccctggctcttctgggtggcgcagttattcccaactttgtttcccattacctggagaaagtttgtccagaccgtggcttctagaaggacaggtagcagctccccaatctcctccatcatcactgtaagtgaagtcaggttcagcccccacaggctctgctcatggagtaggccaccattccttcctaccacaaaccacatttctcggactggagaagggattgcagcacgcacgttcatgttaaaatgtgaactttaattgtaaaaatcattttctgtaaatatagttatatcaacctctctgcacacaacttggttcagatatatacagatatgatattcatagatgttatttgtaccacagaacaaaatcaattcaagaaacatttacttttagcttcaggattaaccccagctttctttaggccttaaaattaccaccactggaaacagagagagagcacggcatacctgggcacaccagtattcagggcaaaatctatgcagtgtcttactaatttcatactatgaggtaaagacccgaaacaaaaatagattcagtctctcgtattgctataactcttaggctggggtattaatcaaaataggatttttacatttaaggcgacagggaggctatgctgattctaactcagaaagaaatgggaaaacagtttttctaaggctacaactatttgtttaggcttattttcccggacctatacaaaaattcagtcaacaagttttgggtaaataaaggaaattcattttgctttcctctgctctgtccctgaagtcactcatccaggttggctgctcaaacaccaagaatctccaccattcttcacttgacagtctttgtggacacgttagacccaaacttttttttgtataacaccatcttaaaattttttagtatactttatctttctttagtttacccaaaggaaggagttttcactctaatgtcaatatatttgcaaccatccaactcaaagacctctgtgtcgactgttcactttgtggatcatctctggctcatttaaaacatcctgcctcatccccacattcgctgactggccttagaaagcaaagtaaatttattgttagtctaaataagcattctatagcaaacataagtaattcacacctggcctactatgaaaattaaattttctgaatttagatcatattagctctaaaagccccacagtatgctaaaaatcgaaaataaattctaaaaagaggaaagcaaggcttttgtctccatcatcatttctttatatagcactagaaaattcttattccccttctaaatttgcaatttcatccaactgcccctaaattctagttccaaaaacaaattaaagtgccagttataacactacctcccactcccacctctctcaagaaagaggcctaaaaataagaatgatgacatttacccttttttgtactagagctttactgaaggttggtatttttatgtcaaccttcctaggactgtcaagtctgcctcctaaagagcgctgtcaggatttcatagcacaatctccttattcactctccaaattatttacatagtaaaacttctatggggtctcagccaccaccaaattacaaaactgcccatttcttctagaataatagttttaaaatttccttccatttcagtatatgcatactcagttcatcacatagtaatatcaataaaaaaataaacttccatttcttataagaaaaacattaacttaattcacagttagccttttcccacaacactcaatactccagtagcttctaggaagagaggtatattagtgataaaaatggaatattaaaaatccatgacttgggagtaaacggagcccttaactcctcctctccccctacctgaatcacaaaagggttttcctgaaatgagaggggatgggactggggtcagcaggattctcacctcggtctaactacaaggtacggggagaagacaggagggctggccatttggcagaatccaagcctactagcttgggatctactagggagataaaagcccatgcctggcatattggtccccattctaattgtcttgcccatgttagacctgtcatcacactaaggcaagtccactgccaagctgagcattatcctattttattcatccacctgcccctcctcctttacctctgcaaggttgacctatacagggtctggagaaagcatctcaatccattccctgggctatacagtttcgaagggaaataaatggtccctcgggtttctgccttttctcggagggttgatgtcctaaaactgaaagcctaattcattactgtcctttacaaaagcttccctgaaggcctcagtttaaagatgagtgatttcatcttttactgtgtttgaagggctttcagtgcatcaagactgagagcaaattcatcctcatagccaccagaaggaaaaacaatgatttagctaagatttaatttatcttctagctaaagtgtcatcggtagtcacatgatcaacaaatgttcacatgtggcatctggaagcatgtgcacctgtgtgctatcttaactttcttgtcttgactttaaagtggaacaaaacaaggtaagttatagatgcaagttcctaagctaaattacttctattgatacatcaatgatttcagcttccctccccctaaccaggtggaagcacagatgctataatggatgatggatatggaaggcaaaagccttctaattcattgcaatcataatttactgaggactgtacaggtcccaggtgggacactgacactggaatggtctctaccaggcatagggaatggttcgtgtttaaaggccaagcaaattctaaacacataatttgggccatacttttagtctggtaggggataagccctaccatttcaaactccttgtggagagtcctaagccaggggccaactggacattttcccaaaggctgggcagtatcatctgctgagcctacagaattgaaaatgccctcttgaacaggcctttgtcatattttgcatggataccaacgagccccaaacctgaattccactcccacctggaacttcttctgacttattcaggaacaacagggcagcccagccagcatctcaggtcagcaatcatttccaaactggcacatagttcatttcacagtgtggcatgagatcaggctgacagcttcacaggagaactaggcctgctcaggcaggcgagggctgaggcccggcaggagatggtggcagaaggtgtcacaccacaggtatccaaccctcctccaggaggccggtggtcatcataatgcccgcccctaaagagcttacagacctagaagtctgtgaacgatgttcagcactttcttctgaacaaaagcagatggtttctcagaaaatatttcaagactggcagaaaagcaggtccacatggctcctagcttctgctgccactgtggaattccctagtagagaactggtagcaaaggatcctaggttgtgcctgttaatctgtcatgttggggagcagaatctggcatagagcaaggcttcgaaaggtgatttccgaagccacaggctccacttcatagcccaggcaagacatactctgaggatgctcaacagtggcaaagg

SEQ ID NO: 3844 - DNA, 269 bp, Homo sapiens
aggcgcccgccaccacacccggctagtatttgtacttttagtagagacggggtttcaccacgttggccgggctggtctcgaactcctgacctcggctgatccgcccgcctcggcctcccaaagtgctgagatcacaggcgtgagccaccgcgcctggccaaaaattatttattttttagttgacaaacaaaaaccagagtctgaatgttacctgctctacagtggcacctgctaaagtttgagaaccactgccctgggtggccacatcg

SEQ ID NO: 3845 - DNA, 2013 bp, Homo sapiens
tgcctctaaccacctacccccagcttaaaacaccctgaacctcaggataccacgaaaaataaccattacttgacagaaaggacccctcaacccttgagaggcaagaagagagggttgcatgtaaaggagaataaaaggtgaggcttcaacctcgaaacacagatttttttttcttttgtaaacatacacattactgaaatgacagcaacccacattgcagaggagaaaagtctattagctgtacagtttacatttcaatgcccaaacttatttatatatttacataaagatgctaccttgattaatcaatgtctatttgcatttccacatgtgaatttcttcagttttgatattccatatgaaggagctacagtgaaaacacttttgaataaagcagtgaaccctaagaatcttatcttgagatgagatgtgtgaaccaccatttgaatgttatttctccctgctgtgtacattagtctggctgggtgttggtcacagacatggatgcactgacggctattcccataaccgagccaggcgggaagggggaaaaggaagacattatttgtcaccaacaacccagtatcccaagtcaaaattctcaactatggccaaaaaggcctaaactcgacccacaggaactggctttctaactggttgacaaacacgtaagctgccctcctgcaaaagccaaccagagaacaggcaggtggcaacaggacccagcctagagcagagcacttcagaagaggatggataaatccatcagggatgctcagggcttcctgaccactgtcccgggtgaaggcactgccacattttctctcaacaaatctgttatgtccctggatccaattatttagcctaaggaatgtcacctctgctaaagagaagtgtgtttgtgaggggtccaaaatgataaaccgtcttgttagcatcatgctccaccctctgagttaaccagctcagatccttgctagattttggaatccagtaaatctgtgttgacccagaggtgctgctgctaatgcctccagagaattcgtgtccagatgaagagacttagagtggcttctccatcctgctcgaacttcaattgctctatcctccggtagtccaaacttcagcctttaaaaatacccaacttactccaagagcattattgaacccttaagagactaaactggaaaattaatttgcttgcaagctccaaggccagcattggcccttagcaattcaccaattcatcccaagaagaggaaggttcagacaaagaggaacattacattgcatggccaccatcaagttactttgaggaaggtttccaggcttcattctataattttagttttcagctcactgataagcaacctctttcattctgaccataagataagctcatatttggtgtcagaaacatccttttttccctctttgtggtccctactcaagtaaacagagaagacataaagttgccctaatgaacaagaaaagggatttgatcccaagactatagactcctagaactactaaaaaccttaaaagatcatctggtctagtttctgcctttaggcagatgaacatctaaggccacaggggacaggtggttgtcttattctcaaatacatcaagggacaaagaccacacagactttctgaacagtccatcccaatgtttccagagctcagcctactcctagtgatacaactcccatgaccaagcccagaggaccagcagctctgggagaaagtggcagattccaatatcctaacatggcaggacacaaaaccaaggtgatctcaccttatctctagggaaaagggcagaaaggaaattgcaaaaattatgtttgttggaaagtataaacaatattcctttgtgtcaacttaataaaaaatgaggccctctggggccctggggtgaactccgggctgctgacatcccacgtgaagtggctcccagtcctgttggctcctcctacgggcaacaggggttgtcgataaccagcatgac

SEQ ID NO: 3846 - DNA, 2474 bp, Homo sapiens
ggccctttgggccctcttgaggagaggagagtcctggcagtaaggtaagatgggcttgccaccccccacctttcgcccctgcccaccagcgctccgcgcaaactggtcccctcatactgcagcgcagagttgggtggggctgagaagccatctggttacagcccaccttgtaggaaatgacccagcttgtttcccccacatcatgcttccaggggccgtctctcctgagtggagatgtgagacacacacccctcctccagaccaccctccgctccccaccctggaggcttgagactgctggcactggagcagcccaccaatggacacccaccgtgtgccgttcagcctcccacagtgctgtggagactgcaggaaggaggaggaagcaatggggccagaggccctgggcgccctccccacctcccctggctgaactctcagcaggcactgggggcactttgacccccctcctgctcctctcctcctgtggagagccagatgctggcgacagctggagggcccggccttcctggcacacagttctgcctgcaccagggatggattcattttaataacttcatttcaccctcatgcacactgccgcctcatccctcctttccaccttccccagtagcctggctgctctcctcagctaggacttcgctaacagatttcctcccaaaccttaattctttggaatagccctctggtccctactgttcttgccagatacttctgtgcccgcttggtcctcacaagggcaaggggtccatccaacttcctctggctaagaagacgtcacctctgccccattggcgagcagtgtccccatggtgatgcccccccaccatcacgacgaagtgcgctggcctcccactcttgccatgcacacactcacaggagattcctctgaagaaacctgtccccactctgcccagaccccaaagggccaggtcctactcacactccaacccgttgaccttccccatccactgcccttcaaggcagtctgaaatgccctcagaccgtttagcggtcccgtggtcctccaccctaacccctcagcccagctgggggctgccgggggccttgtctcctccatcagtggagcctctgggacaagtttaccaggctgggggttctttaaggacacagcttggatctccccatcaggctggggaacacctagggccgggggccatgcctccctcatcagactgaggacaccctgatgtcaggggctggatggccccttagactgggggtccctgagggcagaagctatgcctcccctcatcagactggagtctccctgagggcaagaactgtgctatggatgggagggggacagcttgccttttcctaggcatcagagcacctggaggctgcctctgcccttcagctttgctcaaaggcgctgtctgggtctcagcattcctttctcaagtagggtgaatctcctagcactctgtgaagctaataagggggattacccgttaggtcaactggtagcaatgcccgagtctccttctcgatgaagcttaaggcaaaagcaaatgaatatctaggtcccttcccccccttccccccttccctttcctgggatgagcaagcgggaactgagtcaccctgttccccatccttggcaggaatgctggtgaccttgcattgtggcagattcaggtggcgaggcccattgctcgagatgcacctggtgggtgggtggcagggatcctgggggagtgtttatggggacggaggcagctgaagggcagggaggggtgaccaggtgctgggatcatcgagtgagtatgtgcaggagggattgtagagacacaatgaaacagttgctctgtgttgggaagtgatccagtgtcatcgctgggagtgggagacagaaatgttacttccaaagattccgagtcctgtggtactgccaggagaaccgggggctggggtgatgggtaaggagaggcaccattagccccgccaggcagaggcaagatggggtgggggcggcacctgccaattatgccaaagtcttggagtggcagctggcaccatcaccaaggcacaaatgccagcagagacctggcactcacctgggttgtgattccatagggcccctgtctcctgttggtctcccaggctcaaaggctgacctgataattcaagtgaaggatgcctagttcaaggcctcccagttcctcatcccaggccacctggtcaggtggtcccaagggacaagctaggtcctcctgaactgcagaggctgccaataaactggcaacacaggtgttgcaggaagatatagctgggtcctcatcctgggtctgtaatttattagacgtgtggctttggacaaatgacataatttcccagagcctccttagataaaaaactagggctttgcttaccttggcgtattgttaggaaaattaaatgagttgctcaataaatgttacttcctcctg

SEQ ID NO: 3847 - DNA, 1810 bp, Homo sapiens
ccactctcctagggctgctggccccgcctggggaggcttggggcattcttgggcagccccccaaccgcccgaaccacagccccccaccctcagccaaggtgaagaaaatctttggctggggcgacttctactccaacatcaagacggtggccctgaacctgctcgtcacagggaagattgtggaccatggcaatgggaccttcagcgtccacttccaacacaatgccacaggccagggaaacatctccatcagcctcgtgccccccagtaaagctgtagagttccaccaggaacagcagatcttcatcgaagccaaggcctccaaaatcttcaactgccggatggagtgggagaaggtagaacggggccgccggacctcgctttgcacccacgacccagccaagatctgctcccgagaccacgctcagagctcagccacctggagctgctcccagcccttcaaagtcgtctgtgtctacatcgccttctacagcacggactatcggctggtccagaaggtgtgcccagattacaactaccatagtgataccccctactacccatctgggtgacccggggcaggccacagaggccaggccagggctggaaggacaggcctgcccatgcaggagaccatctggacaccgggcagggaaggggttgggcctcaggcagggaggggggtggagacgaggagatgccaagtggggccagggccaagtctcaagtggcagagaaagggtcccaagtgctggtcccaacctgaagctgtggagtgactagatcacaggagcactggaggaggagtgggctctctgtgcagcctcacagggctttgccacggagccacagagagatgctgggtccccgaggcctgtgggcaggccgatcagtgtggccccagatcaagtcatgggaggaagctaagcccttggttcttgccatcctgaggaaagatagcaacagggagggggagatttcatcagtgtggacagcctgtcaacttaggatggatggctgagagggcttcctaggagccagtcagcagggtggggtggggccagaggagctctccagccctgcctagtgggcgccctcagccccttgtcgtgtgctgagcatggcatgaggctgaagtggcaaccctggggtctttgatgtcttgacagattgaccatctgtctccagccaggccacccctttccaaaattccctcttctgccagtactccccctgtaccacccattgctgatggcacacccatccttaagctaagacaggacgattgtggtcctcccacactaaggccacagcccatccgcgtgctgtgtgtccctcttccaccccaacccctgctggctcctctgggagcatccatgtcccggagaggggtccctcaacagtcagcctcacctgtcagaccggggttctcccggatctggatggcgccgccctctcagcagcgggcacgggtggggcggggccgggccgcagagcatgtgctggatctgttctgtgtgtctgtctgtgggtggggggaggggagggaagtcttgtgaaaccgctgattgctgacttttgtgtgaagaatcgtgttcttggagcaggaaataaagcttgccccggggcactggagtcagagttgtccaaggaaagggcctcaggcatcccttggtccaggaagaatttctctgatggccgcaggacatttgcttgagacccaagtggcagggatccaaccgcccttggcgctgatgtttgctgagggctcagggcttccctctccagccccggttccaagctgtctgat

SEQ ID NO: 3848 - DNA, 406 bp, Homo sapiens
acccattttccctttctccatagtaatgggattctctgattttagctgggcatgtggctgcctgaaataactactgcatttctcagcctccctagatgtagtcatgtgactaagatctggccagtgacatttaagccaaaggtttaggtggcaccttccagaaattgtcagacagctgatgtgcactcttcgtccctttgttccaccctctatcctgcagcctggaataggtacgagactgctgccatcttagaccggcggtaagagccacaccctagaggtggcagagcagtgagttggaagaagtcttggtccctgggaatgttgtggaatagaaataccataccagggccaggcgtggtggttcatgcctgtaatcctagcacttttgggaggccgaggcagg

SEQ ID NO: 3849 - DNA, 5322 bp, Homo sapiens
aaaagctagtttcctgagtgaacaagccataacctcccctaaacaccacctaggtatttgttagaagtcacactattactccaatgtcatcagacacctaaggtctgccagccaggctcctggctgggcaatggaagatggtgtggccctgttagtctccgtgtgtggcttactagccagccttgggaactgccaactcaaattctaagaaagccactgctttctcatcatcactctataccaatacttatttctggccaaatgaatctgcttctctgcccctcaaacttttagttcacaattcatcttctaccttaacttgggcttcttgggcctctggccttccttacttaatgtcttcttttccctactctaatgcatttctaactcactttggagctttggttttctaatgtattatccccacttgccagtcaactggaccccttcctcctcggtttcagactgcctacattaggaaacaatggcagtcaaacccatggctttggagaaagtaaatgtttgccagaaaggaatactagtcacagtggcctttgtgagttgtctgcaactcagctcttcccccagcacagatctgttccccttatcctgcagaaaatcaagccctgactctgcactccccgaagtagtgatgttaattaacaactgaagaggtaactaaatctcacatgcaggtctaatgactaataattggagtacggctgctagacaactgcattttagtatttctcttccattctcctggttttgtagacccagaagattgaatgagtgacataaatctttagttcggggcaagccagggtgggctagggtggtaagctggaggacttcatccttcagttaggctgcacaagtaacattacctaaaaggcactaacatgctcaggttccccagaaagaggcgtaagaagggcctctccttagcagagcttccacctgccatccgtcttgggttcagtgagcttcaaggctcacaatggaagcactgtcatttccccagaaaagctgtgttccctatgctgaacacaccatacacattctcatctggaatctaaggagcagcttttaccctgatccagtatcctgaggaattttaagcctccactcaaatgacctgcctgtgttgtcatttccatgggaaagaactctttccacgagatctgctagttccaggcctctaagacaggaacgtatgtgccataagtgggtctacttcacagactcaatgaggcagaaattattgtagttttctcctatttcttctgcacccaactttctccttgtatttcaaaggccaggccatgtacactaacgtccttgaaatttgcagttctgtatgcttctattccaaatcattcattaccaataaaaacgaaataccaccctttccattttatagacctcatcccctatttctgtcagacagttatatgacagggtgactgtggaacctcttagttcatccaaagtctacctgaagtgctagactttcagactcttatcactgaaatccttaaggttgaggaggctttatttccctagcactggtgaagggcttcaactgtcaaacctcagaacaaatgcattagggccttagaaatgtcaatggggcaggaagaaaacacaatttctaactgcctgtttttgtataatttaataaaaaccttttaaacattactgcttttgtctgaattttttgcgtttgtgtttctgtccctctgagtcattggtcttctttttgttcctgttcctatttttcacgttgtgtgtttcatagtagcgcacaccaacttttttcggccgttgctgtcgtactgctcgcctccgctgtaaaaaatggcaagaaaagatgaagaaaaaaaacaacaaaaccctgaaagtcattcacaaaacaggagtctctgcttctcatctctgtgttctatttcccgtgctgcttccacagctactggaagcagtgctaatgagggagggctcccccgtagacctaaggttactcttccattgtgacttatgcaactccaagttacaaatccacatgtgatccaacccttagccagtgcaagaatctgttctgcatcactcctgacaagtcccctgcagcaaggctgagtgctgctaaccactcccctccccagagggcccactctagctctgaacagctcagctccaaagctgtccttcacagaagtcagtgatctgcccaaagcagatctgctcattgggtcgtttcccttgggactagaaactgactcctctagaggatagtccactcgtgtggagacgttgattagaaactcctaaaacgtatgacatggactcaaggacctgcatctagtgggccagacccgaccctatttatctgacctcaactaggtcaacgaggactggggttcttgggattcagctctggaccatttgtttcagtgggtcttgacaactggagttctagttactctacttgggccatacttaaaacctatgacacttacttcttttgatgtaagcgccctgggagctttatttgaatgttcctgttcctcttccctttgtgccttccgcttctttccctttttggaaggtgctggatacaaacaatacacaaacaggaattttctattgaaaatttgtctataaacccaacggtgggaacaagcttgatgtatcaggaggaggacacccaatgtggacagagcaggtgagcacagtggtgagtaaagcaggccaaggggaggctgccaggtaaaaggatgccctaagccatgctctcagtgtgaaagctgatggtcaaatggaggaatggataaatgcaggaaacacacccccctctttgtctgtggacccacccttggattctaggttaataatgaaccctttctaggaagtttcctgaattgccaatttaatcctaaaaaatgtgcagaatgaaaagcagataattcaatttgcataacactatgtaaatttaaagtaatctgccagatatgacaaacatttatgtggatgactgagataatttggagactgaacttaggtttctcaaaactctaaatatgcaaattacatctaaatgattgaaataatttaacttcacctctgtcatctacatcttcttccagtgtttttctttgttcttcaggttttgcaaatatcttttcactcagtcccttggatattctgaaacagaaaagcaaagtaacattcctcctctcactcgcccgaatcacatactgacctggagacctgcgacaaactcacagactaaagaaaccccactcctatccaagtagttatcaccagtggaagaagtcaacatccaacatgtttgtacctccctgggtgtttctaaagcttctcatactgcaggcagctgaattttacaaaatttacagttcactttttaaaaatggcaataacagccaagtgtggtggtgcacacctgtagtcacagctacttaggaggctgagatgacagcattgcttgaacccaggagagtgaggccagtctaggcaacatagcgagacgccgtctcaaaaaacaaacaaacaaaaaacccaaccgaacaaacaaatggcaataaccccatgtaaaaatatggctctggtactcatggcaaatttttgggaaaggaatgaaaatctgcaatttgtgagaagatgaaaatattacctgactgctgaaaactttttggctttggctttgtctagaaacttctgatatttggcaatcttctcatccagtgctttaataacggctttggtgtcgtttcccacattttcctcctcaggctccgaggaagactcttccgcatcatctctttgttgctcctgttcctcctcctcttcatcagaaaagctctcaagctcttcctcaagatctgacacctccacaggaaccaggtcatccccagaaaactgaggcaccacgttgattttaccaaagttctgccgaactcgtgtgagaatctgctgcatctctgtgttagcatcacagtgactgttctcttctgtttcttccttaatgatggattctgacccttcacctgcagtttctgtgacttcctcccctggattgttctgggctgcttctgggacaacttccaaagatgaggagggtagaagctattaaggggtggaaatgggggaaataaatagaatcagaaaatgaaaaatggaatttctgaactcatatcttgctcttaaacagtcctcttctcaggactaagggaaggtattgaaaacacccaaatttgagtcatttcattaatgtatttttaaaccaatgtacattaagcccagagatcagtactaggaccaaaggaatacatgtgtagttccacaggatgaaccaactaagactatttaaaccattaaaaccaaccaatgatttatcatagaaaagcaaggctccctagaccttccctagggggctgctgatataagcacatgcaaaatcagcacacacaactacataaaaatgaaggccaggctggatgttacagatgagaacagtactaagagaggcatttgaggaggtcctctgatttaaatgtgtcccccaaaattcatatgttggaaactggtatggtttggctgtgtccaaatctcatcttgatttgtagctcccataatccccatgtgttgtgggaaggaccgggtgggaggtaattgaattatgggggcaggtctttcccatgccgctcctatgatgaattaagtctcacgagagctgatggttttataaagggcagtttccctggacacacactcttgcctgatgccatgtaagacatgcctttgttcctccttcaccttccgccatgattgtgaaacctccccagccatgtggaactgtgagtccattaaacctctttttctttataaactaaccagtctcatgtatttcttcatagcagtatgaaaatggactgatacagaaacttaatccccaatgcagcaagtgttggtaggtaaggcctaataagaggtaattagatcatgagggctccatccccatgaatggactaatggatctcggggatgggttcgtttttaagagtgagtctgttggccggatgtggtggctcacgtctgtaatcccagcactttgggaggccaaggtgggcagatcacaaggtcaggagttcaagaccagcttggccaacatggtgaaaccccatctctactaaaaatacaaaaattagctgggcctggtggcatatgcctgtagtcccagctactcaggaggctgaggcaggagaatcacttgaacccaggaagcagaggttgcaatgagcc

SEQ ID NO: 3850 - DNA, 17146 bp, Homo sapiens
aaaagctagtttcctgagtgaacaagccataacctcccctaaacaccacctaggtatttgttagaagtcacactattactccaatgtcatcagacacctaaggtctgccagccaggctcctggctgggcaatggaagatggtgtggccctgttagtctccgtgtgtggcttactagccagccttgggaactgccaactcaaattctaagaaagccactgctttctcatcatcactctataccaatacttatttctggccaaatgaatctgcttctctgcccctcaaacttttagttcacaattcatcttctaccttaacttgggcttcttgggcctctggccttccttacttaatgtcttcttttccctactctaatgcatttctaactcactttggagctttggttttctaatgtattatccccacttgccagtcaactggaccccttcctcctcggtttcagactgcctacattaggaaacaatggcagtcaaacccatggctttggagaaagtaaatgtttgccagaaaggaatactagtcacagtggcctttgtgagttgtctgcaactcagctcttcccccagcacagatctgttccccttatcctgcagaaaatcaagccctgactctgcactccccgaagtagtgatgttaattaacaactgaagaggtaactaaatctcacatgcaggtctaatgactaataattggagtacggctgctagacaactgcattttagtatttctcttccattctcctggttttgtagacccagaagattgaatgagtgacataaatctttagttcggggcaagccagggtgggctagggtggtaagctggaggacttcatccttcagttaggctgcacaagtaacattacctaaaaggcactaacatgctcaggttccccagaaagaggcgtaagaagggcctctccttagcagagcttccacctgccatccgtcttgggttcagtgagcttcaaggctcacaatggaagcactgtcatttccccagaaaagctgtgttccctatgctgaacacaccatacacattctcatctggaatctaaggagcagcttttaccctgatccagtatcctgaggaattttaagcctccactcaaatgacctgcctgtgttgtcatttccatgggaaagaactctttccacgagatctgctagttccaggcctctaagacaggaacgtatgtgccataagtgggtctacttcacagactcaatgaggcagaaattattgtagttttctcctatttcttctgcacccaactttctccttgtatttcaaaggccaggccatgtacactaacgtccttgaaatttgcagttctgtatgcttctattccaaatcattcattaccaataaaaacgaaataccaccctttccattttatagacctcatcccctatttctgtcagacagttatatgacagggtgactgtggaacctcttagttcatccaaagtctacctgaagtgctagactttcagactcttatcactgaaatccttaaggttgaggaggctttatttccctagcactggtgaagggcttcaactgtcaaacctcagaacaaatgcattagggccttagaaatgtcaatggggcaggaagaaaacacaatttctaactgcctgtttttgtataatttaataaaaaccttttaaacattactgcttttgtctgaattttttgcgtttgtgtttctgtccctctgagtcattggtcttctttttgttcctgttcctatttttcacgttgtgtgtttcatagtagcgcacaccaacttttttcggccgttgctgtcgtactgctcgcctccgctgttaaaaatggctagataagatgaagaaaaaatacaacacaaccctgaaagtcattcacaaaacaggagtctctgcttctcatctctgtgttctatttcccgtgctgcttccacagctactggaagcagtgctaatgagggagggctcccccgtagacctaaggttactcttccattgtgacttatgcgactccaagttacaaatccacatgtgatccaacccttagccagtgcaagaatctgttctgcatcactcctgacaagtcccctgcagcaaggctgagtgctgctaaccactcccctccccagagggcccactctagctctgaacagctcagctccaaagctgtccttcacagaagtcagtgatctgcccaaagcagatctgctcattgggtcgtttcccttgggactagaaactgactcctctagaggatagtccactcgtgtggagacgttgattagaaactcctaaaacgtatgacatggactcaaggacctgcatctagtgggccagacccgaccctatttatctgacctcaactaggtcaacgaggactggggttcttgggattcagctctggaccatttgtttcagtgggtcttgacaactggagttctagttactctacttgggccatacttaaaacctatgacacttacttcttttgatgtaagcgccctgggagctttatttgaatgttcctgttcctcttccctttgtgccttccgcttctttccctttttggaaggtgctggatacaaacaatacacaaacaggaattttctattgaaaatttgtctataaacccaacggtgggaacaagcttgatgtatcaggaggaggacacccaatgtggacagagcaggtgagcacagtggtgagtaaagcaggccaaggggaggctgccaggtaaaaggatgccctaagccatgctctcagtgtgaaagctgatggtcaaatggaggaatggataaatgcaggaaacacacccccctctttgtctgtggacccacccttggattctaggttaataatgaaccctttctaggaagtttcctgaattgccaatttaatcctaaaaaatgtgcagaatgaaaagcagataattcaatttgcataacactatgtaaatttaaagtaatctgccagatatgacaaacatttatgtggatgactgagataatttggagactgaacttaggtttctcaaaactctaaatatgcaaattacatctaaatgattgaaataatttaacttcacctctgtcatctacatcttcttccagtgtttttctttgttcttcaggttttgcaaatatcttttcactcagtcctttggatattctgaaacagaaaagcaaagtaacattcctcctctcactcgcccgaatcacatactgacctggagacctgcgacaaactcacagactaaagaaaccccactcctatccaagtagttatcaccagtggaagaagtcaacatccaacatgtttgtacctccctgggtgtttctaaagcttctcatactgcaggcagctgaattttacaaaatttacagttcactttttaaaaatggcaataacagccaagtgtggtggtgcacacctgtagtcacagctacttaggaggctgagatgacagcattgcttgaacccaggagagtgaggccagtctaggcaacatagcgagacgccgtctcaaaaaacaaacaaacaaaaaacccaaccgaacaaacaaatggcaataaccccatgtaaaaatatggctctggtactcatggcaaatttttgggaaaggaatgaaaatctgcaatttgtgagaagatgaaaatattacctgactgctgaaaactttttggctttggctttgtctagaaacttctgatatttggcaatcttctcatccagtgctttaataacggctttggtgtcgtttcccacattttcctcctcaggctccgaggaagactcttccgcatcatctctttgttgctcctgttcctcctcctcttcatcagaaaagctctcaagctcttcctcaagatctgacacctccacaggaaccaggtcatccccagaaaactgaggcaccacgttgattttaccaaagttctgccgaactcgtgtgagaatctgctgcatctctgtgttagcatcacagtgactgttctcttctgtttcttccttaatgatggattctgacccttcacctgcagtttctgtgacttcctcccctggattgttctgggctgcttctgggacaacttccaaagatgaggagggtagaagctattaaggggtggaaatgggggaaataaatagaatcagaaaatgaaaaatggaatttctgaactcatatcttgctcttaaacagtcctcttctcaggactaagggaaggtattgaaaacacccaaatttgagtcatttcattaatgtatttttaaaccaatgtacattaagcccagagatcagtactaggaccaaaggaatacatgtgtagttccacaggatgaaccaactaagactatttaaaccattaaaaccaaccaatgatttatcatagaaaagcaaggctccctagaccttccctagggggctgctgatataagcacatgcaaaatcagcacacacaactacataaaaatgaaggccaggctggatgttacagatgagaacagtactaagagaggcatttgaggaggtcctctgatttaaatgtgtcccccaaaattcatatgttggaaactggtatggtttggctgtgtccaaatctcatcttgatttgtagctcccataatccccatgtgttgtgggaaggaccgggtgggaggtaattgaattatgggggcaggtctttcccatgccgctcctatgatgaattaagtctcacgagagctgatggttttataaagggcagtttccctggacacacactcttgcctgatgccatgtaagacatgcctttgttcctccttcaccttccgccatgattgtgaaacctccccagccatgtggaactgtgagtccattaaacctctttttctttataaactaaccagtctcatgtatttcttcatagcagtatgaaaatggactgatacagaaacttaatccccaatgcagcaagtgttggtaggtaaggcctaataagaggtaattagatcatgagggctccatccccatgaatggactaatggatctcggggatgggttcgtttttaagagtgagtctgttggccggatgtggtggctcacgtctgtaatcccagcactttgggaggccaaggtgggcagatcacaaggtcaggagttcaagaccagcttggccaacatggtgaaaccccatctctactaaaaatacaaaaattagctgggcctggtggcatatgcctgtagtcccagctactcaggaggctgaggcaggagaatcacttgaacccaggaagcagaggttgcaatgagccgagatcgtgccactgcactccagcctgggcaacagagcaagactccgtctcaaaaaaaaaaaaaaaaagagtgagtttgttataaaagcaagtttgaccctctcttgcttgctcttgtcctcccactttccacgatgggatgacccttgtcagatgctggtgccttgatactggacttcccagcctccagaaacatgagccaaaacaatttctgttcattataattacccaatctgtagtattctgttgcatcatcacaaaacagactaagataggaggcatcctgaagcaagagtataaggtaaggagggggaattctgtgattgaagagagttcattagagaactaagtctggggaccctgaaatgactggcctgttttaggtaaccgcaaagataagtatgtgccaagctttctactggtgtttcacatgtataatatcattttatccttgcaacaaaaactcagagaacttaaaagtgatgttctaaagtcaagagtggccgggcaaatcactaaataagtacagaactataaaattcaggaaaccacacacaaaatttatacatacatttttctaggaagggcaatttttggctttcagtttctgaaggggtttctgctcttaaccaaaaaagaaaaacagaatcacagagtaaggcatatgagagtgaaactgcctccaaagggttgacaagaagtatctgccaagttctggacagaaatacaattataattaagcactaattagggggcactttggcccatatccttgttgctaaaagttcctgaacactaggtactgaccatttgcatccccactgtccctatagataggatttctgacatttgggtcataagactatgtaagaattgatatgcacccccattgttcctataggcaagatctctgacattagaatcataaggtttttgtttaaggattgcttaaaatgtcttttcagatccctaattccagcaaccagtttgaagatccccagagaaacgggatctgcatgagaacacagcttcttcatctccctgtccgtgacttcaccctgcactcttcacccaaccaatgaccctcactccagcccactccaaaacccttaaaaccctaaccccaaactcctcgtggaaatgatttcaggattcctcccatctcctcctttggtgaccctacggttaaacttctttctctgctgcaacctggtggtgtctcagcatattgacttgctgtgtgcattgggcaacaaatctattatggttacaatagttcttaagaattatctgaactacttatctacacttactgactacatacggaggaagggctgaagacaatgccagtgtttccacacagggtcccaagacagcagtgatacggacatccagaatgaccctagaatccagctgctaactcaaaacctccaatggcttcccaccatgacaccctctcctggcccacgacattccagccacagtgacctcctttcagcatcaggacacacagagcatactcctgccccagctgctctggatgtgctgttccccttgcctggaacattctccctagatactagcatggctcctgtctcatattaagggctctgctgaagtgccactgcctcagaggccttccccgaccaccccaaagtactcctcatctcccccaaaccccttagcctggtttagttttcctcacagcacgcaagacttcctgacattatatgtttatctgcctactgtctccctgtgatataaatgtcacacttcctggcacagagctcctaagacccttggaatttcccaagcgatgggtatcttttttattgattacaagcccctttccaccacacctgagtttatgctaatgtggtgactcatggtagacccctagatagcttcaggatgggggatgcgctggtcaccagaaagacaaagcacttgaccacatggttggtgctttcagccactcagaggagagaagggagaccagaaattgagtctatcaccaactgccacagatttcatcagtcatgtctatgtaatgaaacctccataaaaacccctacatgatggggtttggaaagctctgggttgctgaacacatcaatgtgtggagagggcatggaagctctgtgcctctccccaataccttaccctgtgcacctcttccactggctgtgactgagtttcatcctttatcataaaccgttaattgtaaacacagcactttcctgggttctgggagtccttctggcaaattatcaaaccccagaacccctgaatttgtagttagccgggcgtaagtgtggatagcctgaagctgccatctgaagcaggggacctagtccttaacttgtggggtctgtgctaactccgggagttagtgtcacaactgaattaaattgttgggacactcagctggtatctgagaactgcagaactgatatggaaaaaaattatgtatttggtgtcagaagaaaccacacactcccctgctggaatatatgtgcaggagagcagcagcttgtcagtttctcaccacagcaccaccagtacccagaagagtctgtggccaacaggagacactcaatatgggattgctgggtgaatgtatcagtgaattaatgaatgaaagatgcaatacacatgaagagggagagaaatttttgtttggttgtttgatggtttgggcagggagaagggagaatgtcaattaacatcagtttcaggctaactttcaaatgctgcagaatacattcaactgaaaatacctagctgcaactgcaacttggaatggggtcaggtgagaggaaaccagcactgtatggacccaacgacactagcaagcatagatgcacaatttgaagccaccatttcaagagacttggctgggttctgaaaaaggtcctagaaccagaaaggcaaaacgttaacgttgagccttgtggcggcccactgccagggtgagggaaatggggatagtaggagagcttctggccccagccttcagtcttctttctccgactatcagtagtaccactctcctttcccactggatcacaggttttttgagggccagggctgtttttcgttcctatattccctgtgcctggcacatagtcgatgctaataaatgtttgttaaacaaatgttatcttagcaatgattctgtttcgtaagcataagaaaagatacaggtaccagaagatcacttacatttaatgagccctctttttccaaggccctaaaggctagtatctaagtttggtcttctctcatatgtctacttattagtctccaaatgcaccccctagcaaggccatggcactggcactctagaatgagagagggtggagtgatcgccatgggccagcagtggctcccaacagtgcttcaccctcaaaaaaatttttttttatttttttgagatggagtctccctctattgcccaggctagagtgcagtggcacgatctcggctcactgcaacttgtctcctgggttcaagcaattctcttgcctcagcctcccgagtagctgggactacaggagcgtgccatcatgctaggttaatttttgtatttttagtagagacagggtttcaccatattggtcaggctggtcttgaactcctgaccttgtgatccacctacctcggcctcccaaagtgctgggattacaggcgtgagccacccatgcccggccccaaaaatatttttatatatttaaaaaaataataaaatgagagacaccgcagctgaatgaatacacgctctatgaagagagacaatcacaagctacaccaaatctaggtcaggacccatgctccccagaggtgggcccaccctgctcttacctggggggccacaagtggctctgcattgggtggcttgacaaagaaaggaatccggcccctctgccagtcattgaggaccatcttacccacagtctgcaagtcgggctctccaccctgaaaggtcacaaagagattcccaattaaattcaaaggaccaaaaccacctaccactttgggggtatttcagttgtcccaggggttcatcatcacttaagtgacaagtttcacactgctcatacatgcataccaaaaaaaggcccatatcatatacatacatgcttgtgacaagtatcagtctaaattctcacaaacgccgggtcacctttagtaacttcccagtccggaaagcgagcttctcaagaaagtcctcagcattctcccaagaatcaatcttgtatgttttgctgatatattctggctttgctcgttcaagtacagcaccaatgtggtcttcaggactcttaattttttctacttgaacctaaatgttaataggaaatctctcacttacaaactttgttgtggaagcagtgaagttcccagtgtcctttgcagcactatttgaaaatagacttcaacatcacaaagctcgtggagattggcaggagcctgtctctgacggggctagacatggtcagctgcaaggagcactgctgaaagctgaccatagccacggagcccagaactcagctttaatccccactcaccacaaactaactgtgtggctgccacagtttaaacttggaatgcttcatgttactcacttgcagaaatggttaaaagcctgcccatcccaggacacaaaaataatggaatagtttaagaaaggagaggaggaatgtgtacaggatgtatagccagaagcatggtcaaggttaagtggaaccatttacagtttttcagtcgtattcagaaacaagtgaggaaatgactgggttccaaaatgactcaacccataaacccacgaagacgaattatcgctaagcataaacaggccctgcttccctttggatcctgtgtgtaaactacaaactcttttgtgggatgatattgaccagatatgcccatggttccactaattcctcaaacagcttatgctgagaggctgctgttcagcatcatgttcctaaagtttggtcagacaggctgaccccaaactgccttcttaataagtaaaaaggaaaggtatccagggttccctatagaacactcccccgcaaacacaaacagcctatcagggccaaatactcacaactccttttagcacaatgtctgtctcggagtcctcagaggggtaaaccacacctggacagtcaatcaggaatatccgacgcatcaaagtaatatactgccagacctgaagtcagaaaaaagtcagagatgtcctgtatcaaacactaagagtctaatttcacaaacccctgatgctcatgtatgaagctggaaaggaggaaggggtgagtcaaagaaaagcaacgcgctaagtaattaagctactaactctctcatctgtgccgtgcacaagatacttccactaagtgtaaactatagtttccatcagctaagagtctaaaaacaacacagagacaggatttccatctcgtattgtgcaattatacccggtgaacctttcctgagttttagaagtactcttgagagcttagtactgcttgacctcattgcctttaagcaaaaccatgctgttccccactatgtgttctaggatatgacccccaactttcagaacctaccttaagtttgaggcttcttaacccaggcatcaaatattcttgggttagttttgtttatcaaaataaaaggctggagtgataatttaaaacagatctaaatatgaatcacattaactaacacaggccaaagccacacgggggcatataaaatactctcagtcttatcaaagtgggcagaaacaactctgatacgttccaaactattatatggtgagctaaactcctagtggtggtctgcattcaagagaagcagagagaaatcaacaagtcctaaacaatcactctctatgaaaagaaaatatgcaaaagtaaggtcaccctgcgcccaacgtacctttgtttcacctgcaatgggagccacgttgcaaactttcttagaacgcaatgtatttatcacagagctcttgccaacatttggatagccaatgaacccaacactgatctgtttcttgtcagtgtgcaactgttcaaagagagaatacacagcacatacatgcagtcatatatatccctttggacaagtaggttgtattactttgttaatatcaagaatacagtgcaaaactgttgatacaacttgatctgaagcctagatacacaccacctacataatctgagtaagctggatacatatgcttattaataaatcagaggtgagtcatttcctcagtcatgcaagtgaaattatccttgtatgtgttaaggttaaaagtatgtaggtcaagaaataaaagaaggctcggcacagtggctcacgcctgtaatcccagcactttgggaggccaaggagagcggatcacctgaggtcaggggttcgagaccagcctggccaacatgatgaaaccctgtctctactaaaaatacaaaaattagccaggcatggtggcgcaagcctgtaatcccagctacttgggaggctgaggcaggagaatcgcttgaacctgggaggccgaagttgcagggaaccaagatcatgcactgcactatagcctgggtgacagagactccagtctcaaaaaaaaaaaaaagaaacaaaagaagaaaaacagcttgttagtcactgatttagaacaatgccatctattgataaaacatcttcgggaaaaagaatatgaacaggttcatcaactggacaatcccacaactcacccccccttttctttgcataatacatctgcatttccactgccaaaaataaataacaaaagaaaaaaagcaaccttgaaagttacgactacagggtgaaagtctcaaaaaggcagagcttgctatcaagaagagggcctacaaacgaatggaggcttccgattaaagatggtggactgaacatacatgctaaccccgttccctcaccaactccactagaatgacagcagtggacattaacacttttaaaccaatagaaccaaacatactgaaccagagaatgagatggagatgagacaacaaaaactaaagtgatgttaaacaaaatactagatgcttaaaagtagtatcaaacttggcccattacaaaatataaaagctaagtggttgtaaagatagaaaaactaaagatccagcaataataatgacaatgaatcacagagattcattgggaatcactgggaattggtggtagatccctcttaagatagggctgaaaacaaggaccagcagatagtctgccaaagcagccacacttctccatcccctccctcattcagggtgggcacacaacttctctactctcaaagaaatccagggcctatgaaagtggcttttggattttttgaaatgtcacatgtttgaaagtatctgtaatcttcagacttgaaagggatcctggatttagagatataacagtattcccagaatgattaattgaaaatctaagtattcaatagtgagatgcccagtctactattcccactgagttcccagaactctagcagccaggattctatacccctagagctagagattgaaagattctcttctggggaaactcacaagcccaagaaaaaagacctacagacactggtatctacaggatgtcctcccaacaaaaaatttgggtcccagtcaggcacagtggctcatgcctgtaatcccagaactctgggaggctgaggtgggcagatcacttgaggtcaggagtttgagaccagcttggccaacatggtgaaaccccaactctactcaaaatacaaaaattaaccaggtctggtggtgcttgcctgtactcccagctacttgggaggctgaagcaggagaattgcttgaacccaggaggcggagattgcagtgagcctaaatcaggccactccactccaacctgggcaatagagcaagactctgtctcaaaaaaaaaaaaaaaattaaattaaattagagtccctatttaatcaccttacaatgaagtctatcagtcaacaaggccactccatggagaaaaaaaagaacctatcagctttttaatgccttactctttttttttttgaaacagggtcttcccttgtcaaccaggctgaagtacagcgacacaatcacagctctctgcggcctctgtctcctgggctcaagcaatcctcctgcctcagcctcctgggtagctggaaccataagtgtgcaccactatgccttgctaatttttttctatcttttgtagagatggagttttgccatattgcccaggctcgtctagaactcctgagctcaagcgatctgcctgcctcatcctcccaaagtggtgggattataggcatgagccactctacctggcctaatgccttactcttaaatataaatagagaaccaagaataaacatttaagttgactctacttgcgggtcgaggctgcagtgagccatgatcgcaccactgcacttcagcctgggttaagacagaacaagaccctgtctcaaaaaaatttttaaagtaaaagaaaaaatttttaagcgtgactgtagcagaaaacacaaaaaaacccacaaaaatttggaggtaacagaatcaatgcagacaggaaaatttcaaaacgtcattaatgatactgtgactgtgaaataagatgtaaaaggaggcagagcaaatcagaattcaacaagagctctcagaaattaaaaattaaaagcaattggcaaaataaattttgtgactgggcagctggatgatcaaaacaaggaaagtggccgggagcagtggctcacgtctgtaatcccagcactctgggaggccgaggggggcggatcacctgaggtcggaagtttgagaccagcctgaccaacacggagaagccccgtctctactaaagatacaaaattagccaagtgtggtggcacatgcctgtaatcccagctactcgggaggctgaggcaggagaattgcttgaacctgggaggaggaggttgcagtgagccgagatcgcgccattgcactctagcctgggcaacaagagcaaaactctgtctcacaaaaaaaaaaaagtacccagaaaatagaggaaaatgtcatatatgtaccaaaagaaaaaatatataggccaggtgcagtggctcatgcctgtaatcccaacactttgggaggctgaggcgggcggatcacgaggtcaagagatcaagaccatcctggctaacatggtgaaaacccgtctctactaaaaatacaaaaattagctgcgcgttgtggcgtgtgcctgcagtcccagctactcgggaggctgaggcaggagaatcgcttaaacccgggaggcggaggctgcagtgagccgagatcacaccactgcactccagcctggtgacaagagtgagactctgcctcaaaaaaaaaaaaaaaaaaaaagaaagcaaatataaatcaagaattaaaccaggaggtaaaagcaaatttctgaacaagaatacagacaactgagggaggaaagaaaatttcaaagaaataatgtaagacaatatcagactaaagtctcatcaaacgccaagctcactgagcaataaaaggcccacttcaagacacaccactgtgaaattttagaacaagagaaattttaaattttagaataagaaaagattggctgggcgtggtggcacacacctgtaatcccagcacttcaggaggccaaaacgaggcaggaggatcgcttgggcctaggagtttgaggttacagtgagctgtggttgtgccaccacactccagcctgggtgacaaagcaagaccctgtctcaaaacaagaaatcacagccacacaaagtatgaggggtcagaatggcctcagattcctcagaattcagaagacagtgcagtggtaacctcagtattctgaggaaaaacagcataaagggtagaataaagatcttaataaagatattttcagaacgcaaggcgtatctcaaaaaaatgttctttccaagtattccttctcaggaaacttttggaaaatatgtcccatggaaagaaaggagtaaaccagaaaagaagaaaagaggtcctataaataagaggtcccatacaggaaaacagccatgggaattctctggatgacagtgaaaggaaatcccagaaagacgacgctgcagcagcctggagagcggccagccctgcggaggacggagtgctggccaccgaagggaactacctgtgctgcctggaagctctgacagttcccactgtatcagagaatttggtagtatgatagtgacagatacaaatagaacacagcaaagtaacactagcgaaaataaaagcttcgatcagaaaggaattatactcatagcacaccatgtggatcagctgtgactaatattttacagtcatgacaatgtaaagactgaatggccaagactactcttcccagcctgttagagtggccaccctgcaggctgcaaccctttatgagaaataaagctctcctttccaagttaaaacaacaacaacaaccaaccaacactgaatgaataatactgtaacccaacattggcatctaacaatacagggggaagtacatacagagagaggatggctataagatagcaaatcctcattttccatagtaagaaattaataagcatcttaaactgggggtgaggggtgggcacagatcaagaaaatcataagcatgtactaaaaatatggaggaaaataacagaactaatggctattggaagcatttgcttctgtaaagtggggaagggtgggacagcagacatgtgtcttttgttagaagccaggtagaattaactaaatagacaaattcaaaatgacaggtacagaacatgaagctttaagaatttgatagggtagtctggttccacggcttccctcaggagctgacgtctgaccagggatctgaagcttgaattttggcagggccctctccaaccagaggacatagaagctgcatgggctccatgggcagaggatgcacagcaggcctggaaagcccagcagagcgtggaacgtcaggtgccagggctgtggcagaaatggaagcaacactggtcacggatgggggcaaaggctgagcaagaaaacacttcagaatctcttataatcctgatgctctgtgagtttttacatctctggaagtttttacatcttcttcttctttttttgagaagtctcgctctgtcgcccaggctggggtgcagtggcgcaatctcggctcacggcaaactccgcctcccaggttcaagcgattctcctgcctcagtctccccagtagctgggactacaggcgtgtgccaccatgcctggccaatttttgtatttttagtagagacggggtttcaccatattggccaggctggtctcaaactcctgaccttgtgatctgcctgcctcggcctcccaaagtgctgggattacaggtgtgagccaccgcgcccggccacatcttttttttttagaggcagggttttgctctgttacccaggctggagtgcagtggtgccatcatagctcactgtagccttgatctcctgggctccagcaatcctcctgcctcagcgtcctgagtagctaggactacagacctgcgcaaccacgtccggctaagaagttggcaactttctgctatgccatggcaagacagattcttataccaactcacagctacacaactccaggagaaacagatcagggctcaatacctttccaaactgccgcagaagctgaatgaatgctcccttgccaaacgggttagtaaggcttgcatggaaagcaagtgttgg

SEQ ID NO: 3851 - DNA, 30568 bp, Homo sapiens
gtgacggcaaacaaggcccacactggacagggcagctgctgggttgctactctcgcctccgccatgattccgcccgcagactctttgctcaagtacgacaccccagtgctggtgagccggaacacggagaaacggagccccaaggtaaagacgggggctcgggagacaaaggagcctcgaaactccgatagggaaagacacattcccgcatggagggtcaggaatctcaagggacggggattgcagcgactgggagtaaagggaattgggaagtcagagaaggagggtgagaggattgtataggaagcccagatgttgggtgtgaccccagagggcagatttaggatggggaaggaggtcacagggagatggatggggctcactcttcttaatggtacgcgggtccaagaacagatgactaggtagtgatttccccatcaccagaggtgtgaaagcacatgcgccagaaacacctgttcaagcattgagttggggccagacttcatggcctccttcagctctgtgacataatttctgctgagaagaccgacccaaagtaggctaggaagaggggagggctgtgcagaagacctggagcaatatacaggttggggatgtgtggagctgagctcctgaacaatttcctgccctcacctgtgccttcatctcaggctcggctactgaaagtcagcccccagcagcctggaccttcaggttcagccccacagccacccaagaccaagctcccctcaactccctgtgtcccagatcctacaaagcaggcagaagaaatcttgaatgccatactacccccaaggtaagaaagtaggagcagtggctgggagaaggcctaagcttttacatcgtggattttgggagtgtggggggaggcactctgcctctgttcctggctggggtttcctcccagtatcacagagctcctagaacttacatatggctggatcctggcagggtggtgggagacctcttctcaatctaccctcatttcctgcatgctgtcacccaatctcatggctttagataccacctatgtgctgatggctcccaaatgtgtatttccagccctgtcttctccactaaactccaggaccatatagtcttctgcttcctcattatcttcatgaagatatctaatagacatctcaaactcaatatattcaaactaaatcacaatttcttccttccccaatctgctcatcccccgtattctcctttttactagggactcaaaccacctttcattccttttgatcactctcacagcatgtgtcctatccttcgtcacattcttttggctccaccttcaaattctttcccaaatccaaccacttttcaccacctctgcttccaccatcttgctcctagtcactggtggccactcgcactgctgcagtggcctcctatctgaaaacactgcttccactctgctcctagaatctatcctccatacagcccctaagtcataagtcagatcatgccagtctctgccagaaactcttttgtggcttcccatctcagactaaaatcaaaaatccttacaatggcctggaagatgtggcatgatctggcctacgatgtatccctgaccttatctcctgttattctgtttcttgttcactgtgctgaatccacagggacctcacttgctatttctgaaatgcctcattcactctcctaccacagggccctgacagctggtgttttcactgccaaagatgttctccccttgatattctcctggttcctttcatttcttccaggccttccttgagaatttgctatagcagagcacccctgcccaacatgatctccttttcttgcttttttcttctgcagccacattgataaaaggacatgccttttcatctatttttatgtaataagttgacagcacagttggtaaggctatgaggaaaagggaaatgggggcctacgcaggcacacaccttcatgaacctctccaccccgatacacacatctgcctctttctggctcgcacaaggttcatgatgtcctgtgtttcccaccccgtaagttggtgggtagttcctactgttcacatcaagcaacaaccataaatcggtcttcagcatgttaggagggtaagatctggaacagtggggaatgatttcacagaggcccgttgccaaggtggaaattgtctaccacctacccattcccaagatccctgtggaggcagcatagtgggtgtggctttggagcctcacaccccaagggatggaggattctggtgggttggtggcaaagctgcccctcaccactactcaggcagagggctcaaagggccctctgctcatgtgctagggaccttcaagtcaacgggttttgctcagcctcgctgtgtctgccacagggagtgggtggaagacacgcagctatggatccagcaggtgtccagcacccctagcaccaggatggacgtggtgcacctccaggagcagttagacttaaagctgcagcagcggcaggccagggaaacaggcatctgccctgtccgcagggaactctactcacagtgttttggtgagtgagccaggtgaggggtgggcactacacaccctactgctcccttcccttcaccttcagcacagatccaagcctgagcaccttggagctggagcccatctcatgctggaatcccctcttctccccctgcctgacccacccagcaacagctaactgcccccttccccttcccagctgaagggggccagcccctccacacctgtgggtatttctcctcaggcaggaggagagactaagaaaagaaataagacacagacaaagtatagagaaagaaaggtgggcccaggggaccggcactcagcatacggaggacccgcaccggcactggtctctgagtttcctcagtatttattgattactattttcactatctcagcaagaggaatgtggcaggagagcagggtgatagtggggagaagatcagcaagaaaacacgtgagcaaaggaatctgtgtcacgaataagttcaagggaaggtactatgcctggatgtgcacgtaggccggatttatgcttctctctacccagacatctcagtggagtaaagagtaacagagcagcattgctgccaacatgtctcgcctcccgccacagggcgttttttctcctatctcagaacaaacgtacaatcaggttttatactgagacattcagttcccaggggcaggcagaagacagaggcctttctcttatctcaacggcaaggggccttcctcttttactaatcctcctcagcacagacccttcacgggtgtcaggctgagggacggtcaggtctttcccatcccaccaggccatatttcaggctatcacgtggggagaaaccttggacaatacctggctttccagggcagagatccctgcggctttctgcagtgcattgtgcccctggtttatcgagaatggagaatggcgatgacttttaccaagcatgctgcctgtaaacattttgttaacaaggcacatcctgcacagccgtagatcccttaaaccttgattccatacatcacatgtttctgtgagctcaaggttggggcaaagttacagattaacggcatcttagggcaaagcaattgttcagggtacaggtcaaaatggagtttcttgtgtctttcttttcaacgtagacacagtaacagtctgatctctccttcttttccctacaccagccccgcctcttctacaagtcctccagctgccaaccactatattcttggcaacttgagttcctcaccccttagcagatgtttggagtaaaacgataacttccatctgttttttcaaagattttctataataagcatgtgctaattttttagtcagaaagattaatgttcagtatttacatccatccatccatccatcaatatttggcccttggtccagaaaaatattgtgatttgttgttaacccacagacacgagagatttaagatgcacctccttgagtgctggtgtcaaatggctgtctcccagcccagtctcattggctcttatggacgccgatctgcaaaccacctccaaaccctcaggcagctgcagggtctagcaggcttccctatccgtgtgttattatggtttgccctccaggtcagcatttatggggagatagatgggcaagctctagaccctgccatttccctcaaaccagtgcagccaagggggcacacaggatgtcccagctgctttaaaacagctgccatctttaaacagaaaaagtcaggttttttcgagtagtaaccagtttttacctaaggcaggaagggaggggacccagtgctgtaaacaaaccagagcctcttgtctcctttgctctggccaacccagtcttgctgactgtgctactcacaagtgccaagttcagaggagtgactgcatggcaaggctctttgggccactgaaggcaccctccctgaggcccttctctgaggccttgcactttgtctccaagcgagaacaccctaatgtccttcccaagaggaagggtgtttgcagtagacatactgcaagccccctccccacgccctgtctgatctcatggtgtgtgtgcattggaagatgagttgatccgggaggtcaccatcaactgtgcggagagggggctgctgctgctgcgagtccgggacgagatccgcatgaccatcgctgcctaccagaccctgtacgagagcagcgtggcgtttggcatgaggaaggcactgcaggctgagcaggggaagtcagacatggagaggaaagtgagtggggtttaccgtgacccttggtcccatctcttctgtaaacctcagggccacatgcttatcattccagcactacattctgacctcctaaggtgctctgctgacagtcacgacacctggacttgcatcacctcagtgagggacccctggttgagtatgatggccagcctggtggtcttggcagagttgtttccgctgtagacgctccatgccaggcactgacctcccactgggtggcagtatataccctggcaatgtcatgtcccatgtcccttccacccaggctcacaccattccattcacctggcgacatcccaggatgactgggcattctctcctcagatcgcagaattggagacggaaaagagagacctggagaggcaagtgaacgagcagaaggcaaaatgtgaagccactgagaagcgggagagcgagaggcggcaggtggaggagaagaagcacaatgaggagattcagttcctgaagcgaacaaatcagcagctgaaggtaatcaacgcgcagggtggggtggaggtgccccctgccctgcgacccagccccacaggccaggcattcggttccttttccatggcttttaaatgtttgtccacatgcactgccaaaggataaaggaagctgactttggtggtgggagaaggggagggctccagagggggtctctactctcaactccaaatctctgaggcgcctcagcctggctctccagtggaggattcttctccctggaaaaaagttgcccatcctcaaggaagaggtggatatggcaaaaagtggaactccattcccctggaagctggtatgttggagcctttctggagggggctgggctccaggtggcttgcgtggtagtgccatcccatggctgtctcctctgaggccctgtttcagggcataaccagggaagaagtcaaagggcagcagggccctttgagaggaagaaccatttcaaatcagaaaccttccccagaaatgtggtcggggaacccaggcacaggtgctcttcctcgaagtccgatgccagcagtggtcttttatccagctgaggtgataggagggagggggctggtggacaaagctgggcaggaggccatgctacaggcactgcaactcccagctgtttggtccaaaggtctcaaaaggtaggccctagatcaacatcgtcctcacctggcaaagcaagacaaattattgggcccaccccagatctaccaaatcagaaaattcggggttggggtccagcaatgtgctttaacaaggtctcaggtgattctaatgtttgcagaagtttgagcatcactgttctggaaagatggcctactgacatttagtggccttctcccatggccctggccaaaggaccctggatggatctccctctcctccctaggctcagatagaaaccttacaatcttgacattgcaggcttgtttggtctacacaccagcaggactggccatttgcgataaagaaggctttctgttaaccactactggaacttttcttgttgcacaaagaaaagcaagaaactttcacagccagagatgaatctgtttccttagcagcctctgaggctgctttccttaactgccatattcctttttcataagcctgagttcctcagttcttcctggattagcaacaagagcaaaccaaataccttagcatgtttctaacatttaaaagcaatcttgtaatctccagggtgaaagattctttagaagttggcatttttaaattttttttcttttgagacggagttttgctcttgttgcccaggctggagtgcaatggcaccatctcaactcattgcaacctctacctcccgggttgaagtgattctcttgcctcagcctcctgagtagctgggattacaggcatgtgccagcacgcccggcaaatttctgtattttgaatagagatggggtttcaccatgttggccaggctggtcatgaactcctgacctcacatgatctgcccaccttggcctcccaaagtgctggaattacaggcttgtaatacaggaagtgagctatttttattggctcaaaactgcattgcaaataaagcagctttgctgtccccaggatagacctacctaaagatctgtccagtattattttattggctaccagaggaacatagtaaataactcccaagtgtcttaagctttacataaagagggacagctctcggctgggtgtggtagctcacacctgtaatcccagcactttgggaggccgaggcaggtggatcacatgaggtcaggagtttgagaccagcctggccaacgtggtgaaacccatttctactaaaaatacaaaaagtagctgggcgtggtgatgtgcatctgtaatccaagctactcaggaggctgaggcaggagaatcacttgaacccgggaggtagaggttgcagtgaaccgatatcacaccatcacactccagcctgggtgacaagagcaaaactccattccccacccccaccccccaacaaagagggacagctctgtattcactggcagcatttctctaattgtgtgccaagttgtctcagtggctgaaaattcactgtttcccaaacctctggtcccagcagaactcccaggatcctaaaccagagagccaatatttttttttttttgagacggagtctccctctgtcacccaggctggagtgcagtggcacgatcttggctcactgcaagccccgcctcccaggttcatgctattctcctgcctcagcctctggagtagctgggactacagacgcctgccaccacgcccaactaatttttgtatttttagtagagacggggtttcaccgtgttatccaggatggtctggatctcctgacctcacgatccgcccgcctcagcctcccaaagtgctgggattacaggaatgagccactgcgcccggccagagagccaaatgtttaacttagcagacatattctggcctgaaacctgagccatgaaaagcccttacaacaatgcattcaatatccttttcaatgctttatatcatacccggagccattattgtgttgaaaccaggacagctctggcttctcctcatatactaaagactgtatgccaagctagaaactagctaatctagaaaatatggatttggggatcaaggggaaaaagaacccttggagtgacagcatgtggattcttcttcccagagatttgatcacctctcagctatttgtatcaggctgcaagtttcaagtattaatggagcttgtttttgtttttcaggcccaactggaaggcattattgcaccaaagaagtgataatttccacatgattaatttccaacaagacacttgggagttatttactgtgttcctctggcagccaataaaatcatcataagccctttgtaataaaaagctagtttcctgagtgaacaagccataacctcccctaaacaccacctaggtatttgttagaagtcacactattactccaatgtcatcagacacctaaggtctgccagccaggctcctggctgggcaatggaagatggtgtggccctgttagtctccgtgtgtggcttactagccagccttgggaactgccaactcaaattctaagaaagccactgctttctcatcatcactctataccaatacttatttctggccaaatgaatctgcttctctgcccctcaaacttttagttcacaattcatcttctaccttaacttgggcttcttgggcctctggccttccttacttaatgtcttcttttccctactctaatgcatttctaactcactttggagctttggttttctaatgtattatccccacttgccagtcaactggaccccttcctcctcggtttcagactgcctacattaggaaacaatggcagtcaaacccatggctttggagaaagtaaatgtttgccagaaaggaatactagtcacagtggcctttgtgagttgtctgcaactcagctcttcccccagcacagatctgttccccttatcctgcagaaaatcaagccctgactctgcactccccgaagtagtgatgttaattaacaactgaagaggtaactaaatctcacatgcaggtctaatgactaataattggagtacggctgctagacaactgcattttagtatttctcttccattctcctggttttgtagacccagaagattgaatgagtgacataaatctttagttcggggcaagccagggtgggctagggtggtaagctggaggacttcatccttcagttaggctgcacaagtaacattacctaaaaggcactaacatgctcaggttccccagaaagaggcgtaagaagggcctctccttagcagagcttccacctgccatccgtcttgggttcagtgagcttcaaggctcacaatggaagcactgtcatttccccagaaaagctgtgttccctatgctgaacacaccatacacattctcatctggaatctaaggagcagcttttaccctgatccagtatcctgaggaattttaagcctccactcaaatgacctgcctgtgttgtcatttccatgggaaagaactctttccacgagatctgctagttccaggcctctaagacaggaacgtatgtgccataagtgggtctacttcacagactcaatgaggcagaaattattgtagttttctcctatttcttctgcacccaactttctccttgtatttcaaaggccaggccatgtacactaacgtccttgaaatttgcagttctgtatgcttctattccaaatcattcattaccaataaaaacgaaataccaccctttccattttatagacctcatcccctatttctgtcagacagttatatgacagggtgactgtggaacctcttagttcatccaaagtctacctgaagtgctagactttcagactcttatcactgaaatccttaaggttgaggaggctttatttccctagcactggtgaagggcttcaactgtcaaacctcagaacaaatgcattagggccttagaaatgtcaatggggcaggaagaaaacacaatttctaactgcctgtttttgtataatttaataaaaaccttttaaacattactgcttttgtctgaattttttgcgtttgtgtttctgtccctctgagtcattggtcttctttttgttcctgttcctatttttcacgttgtgtgtttcatagtagcgcacaccaacttttttcggccgttgctgtcgtactgctcgcctccgctgtaaaaaatggcaagaaaagatgaagaaaaaaaacaacaaaaccctgaaagtcattcacaaaacaggagtctctgcttctcatctctgtgttctatttcccgtgctgcttccacagctactggaagcagtgctaatgagggagggctcccccgtagacctaaggttactcttccattgtgacttatgcaactccaagttacaaatccacatgtgatccaacccttagccagtgcaagaatctgttctgcatcactcctgacaagtcccctgcagcaaggctgagtgctgctaaccactcccctccccagagggcccactctagctctgaacagctcagctccaaagctgtccttcacagaagtcagtgatctgcccaaagcagatctgctcattgggtcgtttcccttgggactagaaactgactcctctagaggatagtccactcgtgtggagacgttgattagaaactcctaaaacgtatgacatggactcaaggacctgcatctagtgggccagacccgaccctatttatctgacctcaactaggtcaacgaggactggggttcttgggattcagctctggaccatttgtttcagtgggtcttgacaactggagttctagttactctacttgggccatacttaaaacctatgacacttacttcttttgatgtaagcgccctgggagctttatttgaatgttcctgttcctcttccctttgtgccttccgcttctttccctttttggaaggtgctggatacaaacaatacacaaacaggaattttctattgaaaatttgtctataaacccaacggtgggaacaagcttgatgtatcaggaggaggacacccaatgtggacagagcaggtgagcacagtggtgagtaaagcaggccaaggggaggctgccaggtaaaaggatgccctaagccatgctctcagtgtgaaagctgatggtcaaatggaggaatggataaatgcaggaaacacacccccctctttgtctgtggacccacccttggattctaggttaataatgaaccctttctaggaagtttcctgaattgccaatttaatcctaaaaaatgtgcagaatgaaaagcagataattcaatttgcataacactatgtaaatttaaagtaatctgccagatatgacaaacatttatgtggatgactgagataatttggagactgaacttaggtttctcaaaactctaaatatgcaaattacatctaaatgattgaaataatttaacttcacctctgtcatctacatcttcttccagtgtttttctttgttcttcaggttttgcaaatatcttttcactcagtcccttggatattctgaaacagaaaagcaaagtaacattcctcctctcactcgcccgaatcacatactgacctggagacctgcgacaaactcacagactaaagaaaccccactcctatccaagtagttatcaccagtggaagaagtcaacatccaacatgtttgtacctccctgggtgtttctaaagcttctcatactgcaggcagctgaattttacaaaatttacagttcactttttaaaaatggcaataacagccaagtgtggtggtgcacacctgtagtcacagctacttaggaggctgagatgacagcattgcttgaacccaggagagtgaggccagtctaggcaacatagcgagacgccgtctcaaaaaacaaacaaacaaaaaacccaaccgaacaaacaaatggcaataaccccatgtaaaaatatggctctggtactcatggcaaatttttgggaaaggaatgaaaatctgcaatttgtgagaagatgaaaatattacctgactgctgaaaactttttggctttggctttgtctagaaacttctgatatttggcaatcttctcatccagtgctttaataacggctttggtgtcgtttcccacattttcctcctcaggctccgaggaagactcttccgcatcatctctttgttgctcctgttcctcctcctcttcatcagaaaagctctcaagctcttcctcaagatctgacacctccacaggaaccaggtcatccccagaaaactgaggcaccacgttgattttaccaaagttctgccgaactcgtgtgagaatctgctgcatctctgtgttagcatcacagtgactgttctcttctgtttcttccttaatgatggattctgacccttcacctgcagtttctgtgacttcctcccctggattgttctgggctgcttctgggacaacttccaaagatgaggagggtagaagctattaaggggtggaaatgggggaaataaatagaatcagaaaatgaaaaatggaatttctgaactcatatcttgctcttaaacagtcctcttctcaggactaagggaaggtattgaaaacacccaaatttgagtcatttcattaatgtatttttaaaccaatgtacattaagcccagagatcagtactaggatcaaaggaatacatgtgtagttccacaggatgaaccaactaagactatttaaaccattaaaaccaaccaatgatttatcatagaaaagcaaggctccctagaccttccctagggggctgctgatataagcacatgcaaaatcagcacacacaactacataaaaatgaaggccaggctggatgttacagatgagaacagtactaagagaggcatttgaggaggtcctctgatttaaatgtgtcccccaaaattcatatgttggaaactggtatggtttggctgtgtccaaatctcatcttgatttgtagctcccataatccccatgtgttgtgggaaggaccgggtgggaggtaattgaattatgggggcaggtctttcccatgccgctcctatgatgaattaagtctcacgagagctgatggttttataaagggcagtttccctggacacacactcttgcctgatgccatgtaagacatgcctttgttcctccttcaccttccgccatgattgtgaaacctccccagccatgtggaactgtgagtccattaaacctctttttctttataaactaaccagtctcatgtatttcttcatagcagtatgaaaatggactgatacagaaacttaatccccaatgcagcaagtgttggtaggtaaggcctaataagaggtaattagatcatgagggctccatccccatgaatggactaatggatctcggggatgggttcgtttttaagagtgagtctgttggccggatgtggtggctcacgtctgtaatcccagcactttgggaggccaaggtgggcagatcacaaggtcaggagttcaagaccagcttggccaacatggtgaaaccccatctctactaaaaatacaaaaattagctgggcctggtggcatatgcctgtagtcccagctactcaggaggctgaggcaggagaatcacttgaacccaggaagcagaggttgcaatgagccgagatcgtgccactgcactccagcctgggcaacagagcaagactccgtctcaaaaaaaaaaaaaaaaagagtgagtttgttataaaagcaagtttgaccctctcttgcttgctcttgtcctcccactttccacgatgggatgacccttgtcagatgctggtgccttgatactggacttcccagcctccagaaacatgagccaaaacaatttctgttcattataattacccaatctgtagtattctgttgcatcatcacaaaacagactaagataggaggcatcctgaagcaagagtataaggtaaggagggggaattctgtgattgaagagagttcattagagaactaagtctggggaccctgaaatgactggcctgttttaggtaaccgcaaagataagtatgtgccaagctttctactggtgtttcacatgtataatatcattttatccttgcaacaaaaactcagagaacttaaaagtgatgttctaaagtcaagagtggccgggcaaatcactaaataagtacagaactataaaattcaggaaaccacacacaaaatttatacatacatttttctaggaagggcaatttttggctttcagtttctgaaggggtttctgctcttaaccaaaaaagaaaaacagaatcacagagtaaggcatatgagagtgaaactgcctccaaagggttgacaagaagtatctgccaagttctggacagaaatacaattataattaagcactaattagggggcactttggcccatatccttgttgctaaaagttcctgaacactaggtactgaccatttgcatccccactgtccctatagataggatttctgacatttgggtcataagactatgtaagaattgatatgcacccccattgttcctataggcaagatctctgacattagaatcataaggtttttgtttaaggattgcttaaaatgtcttttcagatccctaattccagcaaccagtttgaagatccccagagaaacgggatctgcatgagaacacagcttcttcatctccctgtccgtgacttcaccctgcactcttcacccaaccaatgaccctcactccagcccactccaaaacccttaaaaccctaaccccaaactcctcgtggaaatgatttcaggattcctcccatctcctcctttggtgaccctacggttaaacttctttctctgctgcaacctggtggtgtctcagcatattgacttgctgtgtgcattgggcaacaaatctattatggttacaatagttcttaagaattatctgaactacttatctacacttactgactacatacggaggaagggctgaagacaatgccagtgtttccacacagggtcccaagacagcagtgatacggacatccagaatgaccctagaatccagctgctaactcaaaacctccaatggcttcccaccatgacaccctctcctggcccacgacattccagccacagtgacctcctttcagcatcaggacacacagagcatactcctgccccagctgctctggatgtgctgttccccttgcctggaacattctccctagatactagcatggctcctgtctcatattaagggctctgctgaagtgccactgcctcagaggccttccccgaccaccccaaagtactcctcatctcccccaaaccccttagcctggtttagttttcctcacagcacgcaagacttcctgacattatatgtttatctgcctactgtctccctgtgatataaatgtcacacttcctggcacagagctcctaagacccttggaatttcccaagcgatgggtatcttttttattgattacaagcccctttccaccacacctgagtttatgctaatgtggtgactcatggtagacccctagatagcttcaggatgggggatgcgctggtcaccagaaagacaaagcacttgaccacatggttggtgctttcagccactcagaggagagaagggagaccagaaattgagtctatcaccaactgccacagatttcatcagtcatgtctatgtaatgaaacctccataaaaacccctacatgatggggtttggaaagctctgggttgctgaacacatcaatgtgtggagagggcatggaagctctgtgcctctcccccataccttaccctgtgcacctcttccactggctgtgactgagtttcatcctttatcataaaccgttaattgtaaacacagcactttcctgggttctgggagtccttctggcaaattatcaaaccccagaacccctgaatttgtagttagccgggcgtaagtgtggatagcctgaagctgccatctgaagcaggggacctagtccttaacttgtggggtctgtgctaactccgggagttagtgtcacaactgaattaaattgttgggacactcagctggtatctgagaactgcagaactgatatggaaaaaaattatgtatttggtgtcagaagaaaccacacactcccctgctggaatatatgtgcaggagagcagcagcttgtcagtttctcaccacagcaccaccagtacccagaagagtctgtggccaacaggagacactcaatatgggattgctgggtgaatgtatcagtgaattaatgaatgaaagatgcaatacacatgaagagggagagaaatttttgtttggttgtttgatggtttgggcagggagaagggagaatgtcaattaacatcagtttcaggctaactttcaaatgctgcagaatacattcaactgaaaatacctagctgcaactgcaacttggaatggggtcaggtgagaggaaaccagcactgtatggacccaacgacactagcaagcatagatgcacaatttgaagccaccatttcaagagacttggctgggttctgaaaaaggtcctagaaccagaaaggcaaaacgttaacgttgagccttgtggcggcccactgccagggtgagggaaatggggatagtaggagagcttctggccccagccttcagtcttctttctccgactatcagtagtaccactctcctttcccactggatcacaggttttttgagggccagggctgtttttcgttcctatattccctgtgcctggcacatagtcgatgctaataaatgtttgttaaacaaatgttatcttagcaatgattctgtttcgtaagcataagaaaagatacaggtaccagaagatcacttacatttaatgagccctctttttccaaggccctaaaggctagtatctaagtttggtcttctctcatatgtctacttattagtctccaaatgcaccccctagcaaggccatggcactggcactctagaatgagagagggtggagtgatcgccatgggccagcagtggctcccaacagtgcttcaccctcaaaaaaatttttttttatttttttgagatggagtctccctctattgcccaggctagagtgcagtggcacgatctcggctcactgcaacttgtctcctgggttcaagcaattctcttgcctcagcctcccgagtagctgggactacaggagcgtgccatcatgctaggttaatttttgtatttttagtagagacagggtttcaccatattggtcaggctggtcttgaactcctgaccttgtgatccacctacctcggcctcccaaagtgctgggattacaggcgtgagccacccatgcccggccccaaaaatatttttatatatttaaaaaaataataaaatgagagacaccgcagctgaatgaatacacgctctatgaagagagacaatcacaagctacaccaaatctaggtcaggacccatgctccccagaggtgggcccaccctgctcttacctggggggccacaagtggctctgcattgggtggcttgacaaagaaaggaatccggcccctctgccagtcattgaggaccatcttacccacagtctgcaagtcgggctctccaccctgaaaggtcacaaagagattcccaattaaattcaaaggaccaaaaccacctaccactttgggggtatttcagttgtcccaggggttcatcatcacttaagtgacaagtttcacactgctcatacatgcataccaaaaaaaggcccatatcatatacatacatgcttgtgacaagtatcagtctaaattctcacaaacgccgggtcacctttagtaacttcccagtccggaaagcgagcttctcaagaaagtcctcagcattctcccaagaatcaatcttgtatgttttgctgatatattctggctttgctcgttcaagtacagcaccaatgtggtcttcaggactcttaattttttctacttgaacctaaatgttaataggaaatctctcacttacaaactttgttgtggaagcagtgaagttcccagtgtcctttgcagcactatttgaaaatagacttcaacatcacaaagctcgtggagattggcaggagcctgtctctgacggggctagacatggtcagctgcaaggagcactgctgaaagctgaccatagccacggagcccagaactcagctttaatccccactcaccacaaactaactgtgtggctgccacagtttaaacttggaatgcttcatgttactcacttgcagaaatggttaaaagcctgcccatcccaggacacaaaaataatggaatagtttaagaaaggagaggaggaatgtgtacaggatgtatagccagaagcatggtcaaggttaagtggaaccatttacagtttttcagtcgtattcagaaacaagtgaggaaatgactgggttccaaaatgactcaacccataaacccacgaagacgaattatcgctaagcataaacaggccctgcttccctttggatcctgtgtgtaaactacaaactcttttgtgggatgatattgaccagatatgcccatggttccactaattcctcaaacagcttatgctgagaggctgctgttcagcatcatgttcctaaagtttggtcagacaggctgaccccaaactgccttcttaataagtaaaaaggaaaggtatccagggttccctatagaacactcccccgcaaacacaaacagcctatcagggccaaatactcacaactccttttagcacaatgtctgtctcggagtcctcagaggggtaaaccacacctggacagtcaatcaggaatatccgacgcatcaaagtaatatactgccagacctgaagtcagaaaaaagtcagagatgtcctgtatcaaacactaagagtctaatttcacaaacccctgatgctcatgtatgaagctggaaaggaggaaggggtgagtcaaagaaaagcaacgcgctaagtaattaagctactaactctctcatctgtgccgtgcacaagatacttccactaagtgtaaactatagtttccatcagctaagagtctaaaaacaacacagagacaggatttccatctcgtattgtgcaattatacccggtgaacctttcctgagttttagaagtactcttgagagcttagtactgcttgacctcattgcctttaagcaaaaccatgctgttccccactatgtgttctaggatatgacccccaactttcagaacctaccttaagtttgaggcttcttaacccaggcatcaaatattcttgggttagttttgtttatcaaaataaaaggctggagtgataatttaaaacagatctaaatatgaatcacattaactaacacaggccaaagccacacgggggcatataaaatactctcagtcttatcaaagtgggcagaaacaactctgatacgttccaaactattatatggtgagctaaactcctagtggtggtctgcattcaagagaagcagagagaaatcaacaagtcctaaacaatcactctctatgaaaagaaaatatgcaaaagtaaggtcaccctgcgcccaacgtacctttgtttcacctgcaatgggagccacgttgcaaactttcttagaacgcaatgtatttatcacagagctcttgccaacatttggatagccaatgaacccaacactgatctgtttcttgtcagtgtgcaactgttcaaagagagaatacacagcacatacatgcagtcatatatatccctttggacaagtaggttgtattactttgttaatatcaagaatacagtgcaaaactgttgatacaacttgatctgaagcctagatacacaccacctacataatctgagtaagctggatacatatgcttattaataaatcagaggtgagtcatttcctcagtcatgcaagtgaaattatccttgtatgtgttaaggttaaaagtatgtaggtcaagaaataaaagaaggctcggcacagtggctcacgcctgtaatcccagcactttgggaggccaaggagagcggatcacctgaggtcaggggttcgagaccagcctggccaacatgatgaaaccctgtctctactaaaaatacaaaaattagccaggcatggtggcgcaagcctgtaatcccagctacttgggaggctgaggcaggagaatcgcttgaacctgggaggccgaagttgcagggaaccaagatcatgcactgcactatagcctgggtgacagagactccagtctcaaaaaaaaaaaaaagaaacaaaagaagaaaaacagcttgttagtcactgatttagaacaatgccatctattgataaaacatcttcgggaaaaagaatatgaacaggttcatcaactggacaatcccacaactcacccccccttttctttgcataatacatctgcatttccactgccaaaaataaataacaaaagaaaaaaagcaaccttgaaagttacgactacagggtgaaagtctcaaaaaggcagagcttgctatcaagaagagggcctacaaacgaatggaggcttccgattaaagatggtggactgaacatacatgctaaccccgttccctcaccaactccactagaatgacagcagtggacattaacacttttaaaccaatagaaccaaacatactgaaccagagaatgagatggagatgagacaacaaaaactaaagtgatgttaaacaaaatactagatgcttaaaagtagtatcaaacttggcccattacaaaatataaaagctaagtggttgtaaagatagaaaaactaaagatccagcaataataatgacaatgaatcacagagattcattgggaatcactgggaattggtggtagatccctcttaagatagggctgaaaacaaggaccagcagatagtctgccaaagcagccacacttctccatcccctccctcattcagggtgggcacacaacttctctactctcaaagaaatccagggcctatgaaagtggcttttggattttttgaaatgtcacatgtttgaaagtatctgtaatcttcagacttgaaagggatcctggatttagagataataacagtattcccagaatgattaattgaaaatctaagtattcaatagtgagatgcccagtctactattcccactgagttcccagaactctagcagccaggattctatacccctagagctagagattgaaagattctcttctggggaaactcacaagcccaagaaaaaagacctacagacactggtatctacaggatgtcctcccaacaaaaaatttgggtcccagtcaggcacagtggctcatgcctgtaatcccagaactctgggaggctgaggtgggcagatcacttgaggtcaggagtttgagaccagcttggccaacatggtgaaaccccaactctactcaaaatacaaaaattaaccaggtctggtggtgcttgcctgtactcccagctacttgggaggctgaagcaggagaattgcttgaacccaggaggcggagattgcagtgagcctaaatcaggccactccactccaacctgggcaatagagcaagactctgtctcaaaaaaaaaaaaaaaattaaattaaattagagtccctatttaatcaccttacaatgaagtctatcagtcaacaaggccactccatggagaaaaaaaagaacctatcagctttttaatgccttactctttttttttttgaaacagggtcttcccttgtcaaccaggctgaagtacagcgacacaatcacagctctctgcggcctctgtctcctgggctcaagcaatcctcctgcctcagcctcctgggtagctggaaccataagtgtgcaccactatgccttgctaatttttttctatcttttgtagagatggagttttgccatattgcccaggctcgtctagaactcctgagctcaagcgatctgcctgcctcatcctcccaaagtggtgggattataggcatgagccactctacctggcctaatgccttactcttaaatataaatagagaaccaagaataaacatttaagttgactctacttgcgggtcgaggctgcagtgagccatgatcgcaccactgcacttcagcctgggttaagacagaacaagaccctgtctcaaaaaaatttttaaagtaaaagaaaaaatttttaagcgtgactgtagcagaaaacacaaaaaaacccacaaaaatttggaggtaacagaatcaatgcagacaggaaaatttcaaaacgtcattaatgatactgtgactgtgaaataagatgtaaaaggaggcagagcaaatcagaattcaacaagagctctcagaaattaaaaattaaaagcaattggcaaaataaattttgtgactgggcagctggatgatcaaaacaaggaaagtggccgggagcagtggctcacgtctgtaatcccagcactctgggaggccgaggggggcggatcacctgaggtcggaagtttgagaccagcctgaccaacacggagaagccccgtctctactaaagatacaaaattagccaagtgtggtggcacatgcctgtaatcccagctactcgggaggctgaggcaggagaattgcttgaacctgggaggaggaggttgcagtgagccgagatcgcgccattgcactctagcctgggcaacaagagcaaaactctgtctcacaaaaaaaaaaaagtacccagaaaatagaggaaaatgtcatatatgtaccaaaagaaaaaatatataggccaggtgcagtggctcatgcctgtaatcccaacactttgggaggctgaggcgggcggatcacgaggtcaagagatcaagaccatcctggctaacatggtgaaaacccgtctctactaaaaatacaaaaattagctgcgcgttgtggcgtgtgcctgcagtcccagctactcgggaggctgaggcaggagaatcgcttaaacccgggaggcggaggctgcagtgagccgagatcacaccactgcactccagcctggtgacaagagtgagactctgcctcaaaaaaaaaaaaaaaaaaaaagaaagcaaatataaatcaagaattaaaccaggaggtaaaagcaaatttctgaacaagaatacagacaactgagggaggaaagaaaatttcaaagaaataatgtaagacaatatcagactaaagtctcatcaaacgccaagctcactgagcaataaaaggcccacttcaagacacaccactgtgaaattttagaacaagagaaattttaaattttagaataagaaaagattggctgggcgtggtggcacacacctgtaatcccagcacttcaggaggccaaaacgaggcaggaggatcgcttgggcctaggagtttgaggttacagtgagctgtggttgtgccaccacactccagcctgggtgacaaagcaagaccctgtctcaaaacaagaaatcacagccacacaaagtatgaggggtcagaatggcctcagattcctcagaattcagaagacagtgcagtggtaacctcagtattctgaggaaaaacagcataaagggtagaataaagatcttaataaagatattttcagaacgcaaggcgtatctcaaaaaaatgttctttccaagtattccttctcaggaaacttttggaaaatatgtcccatggaaagaaaggagtaaaccagaaaagaagaaaagaggtcctataaataagaggtcccatacaggaaaacagccatgggaattctctggatgacagtgaaaggaaatcccagaaagacgacgctgcagcagcctggagagcggccagccctgcggaggacggagtgctggccaccgaagggaactacctgtgctgcctggaagctctgacagttcccactgtatcagagaatttggtagtatgatagtgacagatacaaatagaacacagcaaagtaacactagcgaaaataaaagcttcgatcagaaaggaattatactcatagcacaccatgtggatcagctgtgactaatattttacagtcatgacaatgtaaagactgaatggccaagactactcttcccagcctgttagagtggccaccctgcaggctgcaaccctttatgagaaataaagctctcctttccaagttaaaacaacaacaacaaccaaccaacactgaatgaataatactgtaacccaacattggcatctaacaatacagggggaagtacatacagagagaggatggctataagatagcaaatcctcattttccatagtaagaaattaataagcatcttaaactgggggtgaggggtgggcacagatcaagaaaatcataagcatgtactaaaaatatggaggaaaataacagaactaatggctattggaagcatttgcttctgtaaagtggggaagggtgggacagcagacatgtgtcttttgttagaagccaggtagaattaactaaatagacaaattcaaaatgacaggtacagaacatgaagctttaagaatttgatagggtagtctggttccacggcttccctcaggagctgacgtctgaccagggatctgaagcttgaattttggcagggccctctccaaccagaggacatagaagctgcatgggctccatgggcagaggatgcacagcaggcctggaaagcccagcagagcgtggaacgtcaggtgccagggctgtggcagaaatggaagcaacactggtcacggatgggggcaaaggctgagcaagaaaacacttcagaatctcttataatcctgatgctctgtgagtttttacatctctggaagtttttacatcttcttcttctttttttgagaagtctcgctctgtcgcccaggctggggtgcagtggcgcaatctcggctcacggcaaactccgcctcccaggttcaagcgattctcctgcctcagtctccccagtagctgggactacaggcgtgtgccaccatgcctggccaatttttgtatttttagtagagacggggtttcaccatattggccaggctggtctcaaactcctgaccttgtgatctgcctgcctcggcctcccaaagtgctgggattacaggtgtgagccaccgcgcccggccacatcttttttttttagaggcagggttttgctctgttacccaggctggagtgcagtggtgccatcatagctcactgtagccttgatctcctgggctccagcaatcctcctgcctcagcgtcctgagtagctaggactacagacctgcgcaaccacgtccggctaagaagttggcaactttctgctatgccatggcaagacagattcttataccaactcacagctacacaactccaggagaaacagatcagggctcaatacctttccaaactgccgcagaagctgaatgaatgctcccttgccaaacgggttagtaaggcttgcatggaaagcaagtgttggataatcctgggagaggacagcaacccaccgtttctagaaggagagatgaaaacattttggtaaactgcagtacatttatttacattatgtggaagaatcagagcttgaattacagaactgtttcaaatatactgttgtctaaggaaaatgttagctataattctttgaaatgttttttccaagtataacagttaatgctttgttcttctgtcttataaatacaaaacaatattccaaaaaatgtcttcattgttactaaatgcaattaatggagcataatgtgaagcaggcagtggcctcagaagccgtctcctggtgcctctgcccactatcaatgagcacactttcgtgtttccaatgagagcactcccattactacaatctcagccggacaacactttagcctaaaagccctacaactgacttactaacagatgtcttaatagtctattctggtttagtagttgtacttactgttgcccaggttggaacaaggtcacatttgttaagtacaaaaatgaggtgtttccaaggtttttccttcttcaggtaagtttcaatgtgaggggaacgagtacccattggatctctagcatcaagaacttgaactacaacatctgatgaatctatcacctgaaaattcagaaaggcaaaaatggtttgctacagtacaaataaaagagggatgacatttaagggagtctgggaaaaataaaataataatatttagagacaacttcaaaacagtctctgggcagagttcgttgtggctaatctcaaggcccagtgatcagaattcaaaaggtttttcatcctgtggcttttgaaacctgctgaatttaaaacagaaaaactagcttagatgaaactcaacttatttcctaactactatggattattgaactaaatcatttacttcttagacttctttaagtttgtaatattatctttaagtttgtaatattataggttttgtgtatttcacaaaaaactacaaagtttagcttgccttcacggtactagtttcctatcatgttactatttaattacgtgattatacttgaaaatttttcttctgaaggttattattagtgcatggacataaacctctgccggttaaagatcactggatcagaaatcaagatatacaaagcctccttcactaacaagctagtcgagctaggtacagcattaaacctttctagacaggagtcctcatcgataaaaggagaggggtggactaaataacttaaaatgttgcatgtgactttaactaggcatgataaatttggcaggaaatcttaaaaaatactgacaggtaataaatatgtgattgtataataaaagatagctgttactcttatacaagtactttaaaaaatgcagttacctagatcaatggtagtacgccttccgagtttctttgtaggaggaagaggatggaacaggcagtggtgcctgtactctgcgcaacagagcttcaatatatcaaaattagttttcttctacaaaatcatgaaagcccaaggaaccactcaatgggagagaatttaggagtcttaccttgtagagctcaccccatattcttttggactgtccctttttatagatctcttcttgagcttcatttctaaataagaaagcaccccaaatgagcaactgaagcaccatcaagactaaaaggatgctttagggtaaagtcaatgtaccaaaaaaaacagtatcaaacccagttggagatggaccagaaacaaactgaatttaaaaagtgtgcccaaatgtctgtcaacaaataaatggataaacacaatgtggcacatatatacacaagatagcattcaactttaaaaaagaaggaaattccagctggctcagtggctcacacctgtaattccagcactttgggaggccaaggagggcagactgcttgagcccaggagttcgagaccagcctgggcaacatggcaaaaccccatctccacaaaaaatacaaaaattagctgggcatagtggtgcatgcctgtaatcccagctactggggagactggggtgggagaactccttgagcccaggaggttgaggctgcagtgagccatgagcaggctactgctccagcctgggtgacagagcaagaccctgtctcaaaaaataattaattaaaaaaaaaaaaaaaagaagaagaaaattctgacacctgctacaacacgaatgaaccttgaagacattatgctaagtgaaataagccagacacaaaaggacaaatactgtatgattccacttatattaggcacctaaaccagtcaaattcatgagagagaaagtagaatgttgttaccaggggctgggggagaggggaaacggaccgttagtgttaaatgggtacagggtttcagtttgggatgatgaaaaagttctggagatggatagctgcaatgattgcacaacaatgtaaatgaacttagtatcactaaactgtacacttgaaaatggttagaagagctgggcacagtggctcacacttgtaatcccagcactttgggaggctgaggcagtggatcataaggccaggagttcgagaccagcctgaccaacatggtgaaaccctgtctctactaaaaatacaaaaaaattagccagacgtggtggcgggcacctgtaatcccagccactcgggaggctgaggctggagaatcgcttgaacccgggaggcagagattgcagtgagccgagatcacatcaaatggttagaagagtacttttttttttttttttttgagacggagtctcgctctgtcgcccaggctggaatgagtggtgcgatcttggctcactgcaacctccgcctcccgggtttaagcgattccccagcctcagcctcccaagtagctggtactacaggtgtgcgcccctgcgtccagctaatttgtgtatttttagtagggactgggtttcaccatgttggtcaggctggtctcaaactactgacctcaggtgatccgcccgcctcagcctcccaaagtgctagcattacaggtgtgagccactgcgtctggccacattttttgttacatatattttaccacaataaaacattaaactaaaaaaaagcatgactgaattaggcagtatgtcacagagaattacaaaatggaattggcaggacctgaatcacaacctatactccatagctcccatatacagcagtatttttctgataaggtttagaatctgtttatttactagtctctaggacatttacccaaggtaaacaaaaatagttttgtctttactgcattacctactatacctgttgcggaaggaaaaattcaaatcggcagaatacaaagccaacgaaagttcaaataattctaagaacaaataaatgaactcactgcctctttttgcttggcctcaaatggcttgacattttatctctaggtggcccaatgcttgaagatgggctgacaatagcaatgaggtaataacactgatgcagtcaaaggacaatgcctcttcactaagacagcaaaacctccacttcatttaagagacatgagatggacgagaatgagagctttctagcactgcccaagggaaatgaaattaaaccctttctcaagagcaatgtggcagctgcctatcaaaaagcatgcataccttttgatatcatgctttgctccgtaagaacttatctttggggaataattaaggatgaaaaagatgcggtcacattgatgcttcatccttgtgttgttcaccataaggaaaaactatacacagtataaatgtccaacaatgagactggccataacaaacaaaatactactctgacaataaatattatattattgttgattatgtactgacatagaaatatattcctaataatcacagcttactgcagcctcaaattcctgggctccagtgatcctcccacctcagccttctgagtagctgggactctatgcccagccaattttttattttttgtagagacaaggtctcactatgttgcccaggctggtctcaaactcctgtgctcaagcgatcttcctgcctcagcctcccaaaaaactagtattacaggtaagccactgcagccagccggtgactgattctccttttgagtatggatccctacgagaatatgattaaaattatagatacttcctctcctcctcctcctccccaaaacaaaaacaaaaaacacaaaaccctactgcctttatgtaagctcacaaattttccacattttcttcaaagagtcaaagaaaccttacaggccatccattaactcagagacctccagttaaggaagccccgatattcacagaggcattaacaatgcttaatatcagcaatgggatcatgagttatgttctttttgttgtattttccaacttaactatatttcctaatttgtctatgactggtgtattactattataaatgaaaaaatgttatttattttggggatgaggagagacctttgtcaatcaagccaccttagacatcttcagtctagccccaatttcaccaacgtctccagtctgagggaagaagataactccatatatgagttaaagcactgagcttcacacaggcaaaataagttgaaagaaaatgttttgttgcagaagagcaaatgatgagatttgcatgaacttcaaaactgtacctcgaccgggtgcagtggctcacacctgtaatcctagcattttgggaggccaaggagtgtggattgcctgagctcacgagttcaagactagcctgggcaacacggtgaaaccttgtctctactaaaatacaaaaaattagccaggcatggaggcatccacctgtagtcccagctactcaaaaggctgaggcaggagaattgcttgaacctgggaagcggaggttgcagtgggccaagatcgcaccactgcattccagcctgggcgacaaagcaagactccatctcaaaaaaaaaaaaacaaaaacaaagaagcaaaaaaaaaaatgtacctcacaccagtgtcttcagttaccaaatcacgatccttgccctggtcatagctctcagtggacatttcagcattttcgataagagactgcatatcacttgcaaataagtttggtcgtttcctctgtgacttagggccaaatgtagtttcaaaactttcagtatcaagaatgtgcaccttcaagttctga

SEQ ID NO: 3852 - DNA, 129 bp, Homo sapiens
tttttgtatttttagtagagacggggtttcaccgtgttatccaggatggtctggatctcctgacctcacgatccgcccgcctcagcctcccaaagtgctgggattacaggaatgagccactgcgcccgg

SEQ ID NO: 3853 - DNA, 110 bp, Homo sapiens
tttttgtatttttagtagagacggggtttcaccgtgttatccaggatggtctggatctcctgacctcacgatccgcccgcctcagcctcccaaagtgctgggattacagg

SEQ ID NO: 3854 - DNA, 392 bp, Homo sapiens
taaaaatcaaaacaagccctttcttgcggtgacgacctacccacgagaacatgcctctcgcaaaggatctccttcatccctccccagaagaggagaagaggaaacacaagaagaaacgcctggtgcagagccccaattcctacttcatggatgtgaaatgcccaggatgctataaaatcaccacagtctttagccatgcacaaacggcagttttgtgtgttggctgctccactgtcctctgccagcctacaggaggaaaagtaaggcttacagaaggatgttccttcaggaggaagcagcactaaaagcactctgaatcaagatgagtgggaaacaatctcaatgaacacattttgggaacaactacaacaacaaaaaaaaccttcaaaaaa

SEQ ID NO: 3855 - DNA, 3291 bp, Homo sapiens
aaaggaaacagatagtaacattttttattaaatattacagtggatcaaaaagtacaaaatatctcttgcctgctatgtgattgggaaactattggcacgtaatacagtatcaaaagcagtaataagtacaatttggaaaacatacaaaattgagtgtttatagttggctcagcattcttctggtagtgtttaaactaatgcaaaggttactcaataacctctccattgggaaactatataatatcactgggccatgttgctatatacaaataatcaccttacagagcatagaggttacatagctggaatcaccaaaagtatacaatatttacaacacaggaaagtttaaaaaagtataaacagccaagagattatgctgctattcttcagacatatttcaaccatgaggagacaggcagaatatcaaatacactaacagccaacactggactttaagtgctcaagataatcattgcaatggtatgggtctcaccagggcaaactcattcccatttctctttaaaattgggacaagagtaaaactagaccagatgcgacttggctgaccaccaccaaatgtgactttgtgggacgataagtgaagagaaataaatggttctctttgaaggcacactacataaaatatttttgtgggaccacctcgaaatttccatcagacacaccaacacagtgaaatacagtacttgagaattcatgcaccaggtcagaaagttgtaaagttaacatcgagttttaacaaacccttctgtatatgccctgataaacaagtgaacttaagagcttctagctagtaaataaataagtcagtcctgtggcaaatattacaagtttgaatcacttactagaagaatacttaattccgaaactcggttgggctgtttttatttttttatcatgtggagttgccaaacattaaaccagaagttgcatggaagttttttaaaaatattatttagaatctccaaatctccaataaatcacagacttagtgcattttgaattgcaacatttcttggaagccacactcagtaaatagatttatgactccactgccaattcgattccacagtttcctttacagaactaccaataacaatggtttgattgcacaaagaaaggcttgtgcaattccattcaataataaggccccttgaactcaaacaatgcaaacaaagccttatttaagacattttaaaacgtcgttctcagccaatgaagaattcaatggtctttttgaaagatttccaagatctctgttcagagttttaaaacaaataacacactgcttctgttgggaatgcgtacccccatttctctttatttgtcctgatgttttgccgagggtatgagcttcctcagacagaaacagtgagtctcctctcagaagagatgagaaaaacaaaagctggactatgttaacattgtttgaaaatggtgtgatcgaattccaacatgatgaaaccagactgaaatcattgcagtggaaaaaacaaatgccccatattccaaataggtgagctccaccggggacagatgccccccctccttttttttttgagacacgaactcatagaaaccacatatgacctagcccatgtctgctgcagaaccaccgaagtttcctttttcttccatgtcctccgattctgtgaccattcaatctagtgcaactttcttatatgtgtcctggctagcatcttgccagctggaattgagatttttcccccctctagcttgtgcaatagcaggataatctgcactcacacatttataatctaaattctactagtctatctatggttctattaaatatatatatatatattattccacaggaaggtaaataattaattgaagcaaatggaactcttaacactggatctctacattcttttgtttccacctttggatattaagtatgttacattgaatatttggcttcatatcatggagacatttcaatacaaatgcacggcatgcatggctttgtttaagagccgcagtttcattgttatcagttttgattattttgcagtcgagttacctatttagaagttgaaaattgtcaccaattttcccagaattaagtatctcagaggtaaaagacttagttaactatggttctaaagtctactggtagtgttgcgggaggggcacagtgggttggggagttcatccaagcggtcttcagcagggatgggacttggggagaaaatccactctctgtatccattgacttttaattaatacagttagaaaatgtgtccaccttaatgttatatctcggtagcaaatggaatacagtggcaagaatgacaacggacattctccacatcttttcactgcctgagcagcttgaccatttacttcccacaataaaagaaaccagaaagtggactgtattgccaggtggttaaaaacatgacccaaaccaccttacatgtttctgtgtgtgtacacacaaaactcacaccccataaaaccaaataggatgacttttcttttgaaaaggctaatccagtatgtcagttatccccaaagatgtggcctgggagattcttcttgggaatgacaagaaaccaactggatgaaaacaacatgactacttatcactcaaaagaccgaggctagagaagctatcaggactgcagctgctcctcttctggccagttgagctccatcctcttcccaaccccctttcccagaccatttaaaggaatcagtgccaacgccaatgtaaatcattttggctcctgttctaatttctgaaattcctaaaatatctgtgcagcccacaaatatgtcctctagactctgttgttattcggcagcttgctgccagtgaggtttttgtttttatgattctctggtatgtaggacagtttcacagcctagataaggtaagtacaatgctcaatattttcacagaacccaatacttcaaagcaaagcatttggctgggtaagcagtgtataagctctttcaactatgccatttatgaggaacaaaatccttaagttgcggatctacaaaggaacgttctttgcactattgtgtgcttgactgtttctttttcatttgttccactagaatcagttgcttcaatttgtaaacaataactttaccacccaaagctgctcaaaataagatgtggaaaaattacaaacacacaacaactaggacagtcagtcagcctcaaaaacaaaacaaaaacaaaaagacctgcaaacaaaagcaataccatttaataaaaaaaaaaaaaaaaaaaaa

SEQ ID NO: 3856 - DNA, 3291 bp, Homo sapiens; identical to SEQ ID NO: 3855

SEQ ID NO: 3857 - DNA, 92 bp, Homo sapiens
ctgggcgtggtggcacgcacctgtaatcccagctactcaggaggctgaggcaggagaatcgcttgaacctgggaggcggaggttgcagtgag

SEQ ID NO: 3858 - DNA, 7852 bp, Homo sapiens
aacagtgtttacttctctggattgtttaatagtgtcaaaatgaaagatctattgaagtttcactatacattgcattgattgaaccttggagagttttatgaaaaagaggggcatcccttgccatctgtttgccagtcttccttgccccttcctttgaaatgcctgcctcttttttgcccagattgtttcctgaccatccgaactcagatggggtcctctaagttcttcctggatattcacaaatcccttcacaaggcccacgtgcgaagtgaatgatctggaggtgcctgggcatctgtgttggaagggagtcaagactcaccagccagtcagtttgtgggctagagttgtcccacaaaaatcaggcatgttcacctcccttctggccccctacgctgggactgatcttaccctcagattagaagaaaaactgacttctaactctataagcccagcacctcctgggtaaggagtgaagcttggtgggccatgccgctttggactgctgggcagagctgagcctacagttttgtactggggtgcacggatgacagctgggaagatggaaaggcagcttgaggatttatagcagctaaagggtaaatgctgttatgcaaaaggtccccatatgaacttcctacaggtgtagccgcagccaagtgtctgtacagctgctgagaatttgtcggtgatgtaaaaattcctctttgcatcacaagcgagtggaaagccaggggctgcatgagtggagaaagcacagtctggtttttcaagtactgcagagaatgagaatacccagccgggagcctggagttgaggcccgagttacacaggctcccggaatacagacctgggaagataggggaggagaggggaagcttgtggccttctgatccgcccccggaatgcccaccgtgcgctgctttgctgccttcactctcctgctcagaggccttctccttcccagagacctccttggatgggtctaagggagacactgcccgggcctttttccctgcaatcacaaggtccaaatcctccaggctgcgcttgatcggccgcgccgccccaatgttctgcgggctcattttccggtgcaggattgggtggaccatgccttccatcttcctgaaattctccagtctcacatggtgaggttttcctgatcttgaaagcgattcagggtattttttagggcctgacatggtcatgggtgatacccgacaggctttggggtgacagtctcgactctggctgcctaagacctggaactgggagatgcctttgctctcctggggccctgtggtggaatgagccaggcccaggaccttgccggtaggtttgtgcgggttcttgggaaggctcagatctgtaggctgatcatccgtaggggcttctgctgccgccgactttttgtcttgcaggtgcagggacgtgagataatttacatggagcttttcttggtgtctgtgggaaggaaaagaactgttttccgattccctgtacatgtccctggaagggtatttggatgtctgttcattatgaagatggtgctcggtgtgtctgtagaggctatggagatgaggggacgagtagaagtcagccaggaagctaggcatgtgggaatgggggagggcccttttctctaagagtttatccttgccctcctgaatttcttgcttcaggacgtaggagtcagcaagggggttaaggtgatgcttggagaagctgcagcggtggggatctgatcgactcagtttctcatgcttaaagatgtcattgatggtctttctctcttccgagggcttgcttctgaaactctggacgtgctgaatcactgatggccggctgaccgccatatggtcagtgctttggccatggtgggtctgggacaaactggaacacaagtcatccctagcaatcagtttctttttgctgatcaaagggggtggggagccataagggtagctgctggagaggctggccccactcacttgggacaaaagctttttcttggccagtggggacatgatgcctgggttgcccctagagtagagcaggggcgtgtaattaagtccatggttctcgttcatgggcccagtcaggtctttgtctttgaacatgtcaaacgactggaccacaaggacctttggggtctgcttgagcgcattgtggatgtcgtcactgcccagctggtccaccttcacggtgcagttggcaatgtaatctgccatggcgggcagtttgtcatcctccgtctcattctggtttgccagcggtggctgtgtggtggggaagctggggaaggatgcttcttggggttcactttcagggctctctgtaaaacagcacagtttggattcttgttttgagtccaccagggcactaggagaggtgagtggctgtttgctggccccagggaccaaggctgaatctttttctggggccagaggagcacttgggagtggaggtgtgggccccttctctcccgcctcctctgccaccttctcactgttggaaccttggtctgtttcgttgtccttctctgggtctactctggatgccaggggcttcgctgaaaattcctgatacccttctatttttttcttcatgtctgctgctgggagaggctcagggatgcttttctggcttattaaagtctcttgttctttttcttgctctgatgaaacctggtaacatatttcaaaagacagtcagaagaaaaccaaatacacagacatgttttgctatgaaataaaatattccacacagcagttttacttgaaaacaggcttgtcaatcagctcgtgaagtttctgtaaagctttattactccccaatcatggctctaaacaaagaaatctaaattacagaaacattaggggaaatatgcatattcgcttcagtcccttatgagatacctatcaaaatagcaaagtattatgtactgatggtatacaatcatatcactccttgattctaatatatagtttaattctaaggttgtcttcttgtcaaatcagtcaattatccaaatgggttttaaattacatgttgtgttttatgatactcctgagaaagatttttttaaagcatttctctttcaaaaatccaaccaaccccatgttaacgacaaacaacaaacctattgcaactccctgctttccttaacagggcaaatcccttcccaatgtattcaatatgatgcactgaagattagcaatgcataagtgttaataatttctactcagggccagatgatatgcagataatgctaaaatattgacaaagtatgaagatttcttggcagcctgtctaccagagggacagaggagactaagtccttctaggttgcagcaaactacatttctattaaagcccaaaatgaagttgtcaaaattcagacagtcagtgccaccgcaaatatagctttgctgttgaatgaaataaattatagtcaatgagacagacacactccttatgtgaccctactgacagaagttgtgggtaccaattcgactcatttactgcattatgcagccatataaactttgaccttaggaggtcattttaactttccatctatgacccagctgactgacaagccctttcaaaactgctgtcattctgccctgacatgtcttagcagagcagtcacaaaacagttgtactgagctggtattcttcccctcctttttccatctcatcccttgaactttgttcttctctgttaagaaaagatgtgcctgtaatctcagcacttagggaggccgaggcaggcagatcacctgaggtcaggagttcaagaccagcctggtcaacatggcaaaacctcatctctagtaaaaaaacaaaaattagccaggtgtggtggtgggtgcctgtaatcccagctactcaggaggctgaggcaggagaatcgcttgaaccccagaggtggaggatgcggtgagccgagatcatgccattgcactatagcttgggcaacaagagtgtaactttcacaaaaaaaaaaaaaaaaaagaaaaagaaggaaggagggagggaaggaaggaaggaagaaaggaaggaaggaaggcaggcaggcaggaaggaaggaagggtgggtctgccaattagcatctttgggtaagattgaggatgctggtttaggaatacgtgggaacaaaagttttaagaaatcacacctatttcacaggtatttttccttaaatccctttaaaaaaaaaaccctgaattttagggacatgttatacctaagagactttgcttatcatcattatttctttttattttttgtactagtagctgccttttccagtacaaatatcattacttcttctacattaataatcatcacattggtctcttgagcttatacatgacacaaaaataaagacaaatgagtatggcaagggaaaaaggcaaattgcatctaattgttagtttcttatggggctatagtttgacgcagggcaatgagggatactcagtctcattgaagtttctatgatgtagaactgcagttatatcagagtcccatgcttcgggttgtaaaacaggtttaggaagtctttgaaagctaggcagaaaaaagtaaaggactttttttctagtaagacattttatgatctgcttagtatgttaaatgttagcttcccaccatgcaacttgcaatcccattacttgaatatagtggattcaactagagggaatttctcaccctttgtatctccattgagttcaccgcttcatattgaaaacaccaaaaactaaaagcgatgaaaacaataaaatccaaaccaaaaaccccaaatagagttaatgagaaaaaatacacctggctaataacatggttctatgttggaggtgagaagtgattcgtattataaggtcaaccttggagagggtggaagattccatgaggtttagataacctcatcatgacaactttcaaaacctgagacacttacagctccctgaagggaacagttgcagcctacaggaaacacaaagcctaacagctttcagggtttctatggactccagggagtaaggctccactcttgggcatggtcatcatccaagctgacaggctcagtgcataggctaaagattcctcctaccattcacaaaccaaccatttcaaacttaatccccaaattggagatattcaacggtcagctgtccccttggtcctcagtttgtcccctggtgttttgtgtacatatggcagctaatagaacacactcatctgaaaccctataataaatcaccaggccaaaagtatcaaggaaaaatggaatgtaagcatgcacttggaatttccttgcttttggccatttatgttgcaagcttgcagatgttgagaaatctgcatcatctggccagggacggtggctcacacctgtaatctcagcacgttgggaggccaaggcaggaggatcatttgaggtcaggagttcaagaccagcctgaccaacatggtgaaaccctgtctctactaaagatacaaaaatattaaccgggtgtggtggtgcatgcctgtagtcctagctactcgggaggctgaggcaggagaattgcttgaacctgggaggcggaggttgcaatgaaccgagattgcaccactgcactctagcctgggagacagagagagactctgtctcaaaaaaaaaaaaaatctgcatcatcttcttcctcctccccctttttagttactagagcttaaaataattatgaaacctaataaaaacaaaaaacccacaaatttctaatcttggtatcaatactattttcttatgtaagagtcagctgggtaagttgatgtctagatgggaggttggtgcgtgttgtacatgtgcaatttaaaccagtgtttaattatggagcctcttatgtgttcattataaacctgattttttagggggtatttaatatcagcatcaaaattccctctggggttgaatcctagaacatgctgtctccaaatgtggctgctcagtttttttttttttttaatgggcagcagcgttttttattattcatgttgaaatggagcccagatcagcctacatgactggctacatgctgggggtaatggcttctaccaaaaggctgttgggggcttaaaaagtgcagaaactacctgttaatatgaaaaataataatggtttcataggaaccatttcaaaattcccctataaataatatgcacttaagatcttttttccttttttttttttttttttttgagatagagtctctctctgtcacccaggctggagtgcaggggcctgatctcggctcactgcaagctccgcctcctgggttcacgccattctcctgcctcagcctcctgagtagctgggactacaggtgcccaccaccacgcctggctaattttttgtatttttagtaaagacggggttttaccgtattaaccaggatgctctcgatctcctgacctcgtgatccaccgcctcggcctcccaaaatgctgggattacaggcgtgagccaccgcgcccggccacacttaagattttcttaaattggtctcaacccatggctgttgcacagaaatcaattatgggagacaaacacttctctaaagttttcaggagagtcttgcaggatacagcaccacagttccaaggtcccctttcctggacctccaaagcattttttttgagacacggcttcactctgtcacccaggcaggagtgcagtggtataatcacagctcactgcagactttacctcccagggctctggttatcctcccacctcagcctcttgagtagctgggaccacagcggggcaccaccatgcctgatattttttttttttttttttttttgagatggagtcttgctctgtcacccaggctgtcgtgatctcagctcactgcaagctctgcctcccaggttcatgccattctcctgccttggcctcccaagtagccgggactacaggcgcccaccaccacacctggctaattttttgtatttttagtagagacggggtttcaccgtgttagccaggatggtctccatctcctgaccttgtgatccgcccgcctcagcctcccaaagtgctgggattacaggtgtgagctttgtttgtagagactgggtctcaccatgttgcccacgctcttcttgaattcctgggctcaagcaatccacctgccttggcctcccagagtgctaggattacaggcgcgagccaccatgtccagccccaaaatatgttttaaagtcgcaccagcacctcagatagacgggctgtggagcggccaagaagccatgttttcacagtaaaattctttgatgttagtgtggctctggacccttttctcttgaagcctgagcatttgctatcagttttctacaggatgtttgtatctttctagattctattcctgggctatctcattcaatactaggcattggatttcatctcatgagcaagctgaaaggctttcaggaactggggaactatgtggggaactgtgaagcttagatttcttggtttcttcatcaagccatccaactgtgcagggacacagctgtggattcagggctccagaaggacctcgaggcagcacatgtcttccagaggtatttctatggagcaaagcaactcacctctgctgcatcctggggctttggggcattttctttttctttcttgcttttaggtatttcatgtttgatgcgtttggttccagatacttttgttttgttctcattttcctgtgaactgttctcctgtttccgaggtttgattggaggcaggggcttatcttcttctcctttaataaatctttcatatggtaggattaatct

SEQ ID NO: 3859 - DNA, 7851 bp, Homo sapiens
aacagtgtttacttctctggattgtttaatagtgtcaaaatgaaagatctattgaagtttcactatacattgcattgattgaaccttggagagttttatgaaaaagaggggcatcccttgccatctgtttgccagtcttccttgccccttcctttgaaatgcctgcctcttttttgcccagattgtttcctgaccatccgaactcagatggggtcctctaagttcttcctggatattcacaaatcccttcacaaggcccacgtgcgaagtgaatgatctggaggtgcctgggcatctgtgttggaagggagtcaagactcaccagccagtcagtttgtgggctagagttgtcccacaaaaatcaggcatgttcacctcccctctgggcccctacagctgggactgatcatagcctcagattagaagaaatactgacttctaactctataagccagcactcctgggtaaggagtgaagctctgttggccatgccgctttggactgctgggcagagctgagcctacagttttgtactggggtgcacggatgacagctgggaagatggaaaggcagcttgaggatttatagcagctaaagggtaaatgctgttatgcaaaaggtccccatatgaacttcctacaggtgtagccgcagccaagtgtctgtacagctgctgagaatttgtcggtgatgtaaaaattcctctttgcatcacaagcgagtggaaagccaggggctgcatgagtggagaaagcacagtctggtttttcaagtactgcagagaatgagaatacccagccgggagcctggagttgaggcccgagttacacaggctcccggaatacagacctgggaagataggggaggagaggggaagcttgtggccttctgatccgcccccggaatgcccaccgtgcgctgctttgctgccttcactctcctgctcagaggccttctccttcccagagacctccttggatgggtctaagggagacactgcccgggcctttttccctgcaatcacaaggtccaaatcctccaggctgcgcttgatcggccgcgccgccccaatgttctgcgggctcattttccggtgcaggattgggtggaccatgccttccatcttcctgaaattctccagtctcacatggtgaggttttcctgatcttgaaagcgattcagggtattttttagggcctgacatggtcatgggtgatacccgacaggctttggggtgacagtctcgactctggctgcctaagacctggaactgggagatgcctttgctctcctggggccctgtggtggaatgagccaggcccaggaccttgccggtaggtttgtgcgggttcttgggaaggctcagatctgtaggctgatcatccgtaggggcttctgctgccgccgactttttgtcttgcaggtgcagggacgtgagataatttacatggagcttttcttggtgtctgtgggaaggaaaagaactgttttccgattccctgtacatgtccctggaagggtatttggatgtctgttcattatgaagatggtgctcggtgtgtctgtagaggctatggagatgaggggacgagtagaagtcagccaggaagctaggcatgtgggaatgggggagggcccttttctctaagagtttatccttgccctcctgaatttcttgcttcaggacgtaggagtcagcaagggggttaaggtgatgcttggagaagctgcagcggtggggatctgatcgactcagtttctcatgcttaaagatgtcattgatggtctttctctcttccgagggcttgcttctgaaactctggacgtgctgaatcactgatggccggctgaccgccatatggtcagtgctttggccatggtgggtctgggacaaactggaacacaagtcatccctagcaatcagtttctttttgctgatcaaagggggtggggagccataagggtagctgctggagaggctggccccactcacttgggacaaaagctttttcttggccagtggggacatgatgcctgggttgcccctagagtagagcaggggcgtgtaattaagtccatggttctcgttcatgggcccagtcaggtctttgtctttgaacatgtcaaacgactggaccacaaggacctttggggtctgcttgagcgcattgtggatgtcgtcactgcccagctggtccaccttcacggtgcagttggcaatgtaatctgccatggcgggcagtttgtcatcctccgtctcattctggtttgccagcggtggctgtgtggtggggaagctggggaaggatgcttcttggggttcactttcagggctctctgtaaaacagcacagtttggattcttgttttgagtccaccagggcactaggagaggtgagtggctgtttgctggccccagggaccaaggctgaatctttttctggggccagaggagcacttgggagtggaggtgtgggccccttctctcccgcctcctctgccaccttctcactgttggaaccttggtctgtttcgttgtccttctctgggtctactctggatgccaggggcttcgctgaaaattcctgatacccttctatttttttcttcatgtctgctgctgggagaggctcagggatgcttttctggcttattaaagtctcttgttctttttcttgctctgatgaaacctggtaacatatttcaaaagacagtcagaagaaaaccaaatacacagacatgttttgctatgaaataaaatattccacacagcagttttacttgaaaacaggcttgtcaatcagctcgtgaagtttctgtaaagctttattactccccaatcatggctctaaacaaagaaatctaaattacagaaacattaggggaaatatgcatattcgcttcagtcccttatgagatacctatcaaaatagcaaagtattatgtactgatggtatacaatcatatcactccttgattctaatatatagtttaattctaaggttgtcttcttgtcaaatcagtcaattatccaaatgggttttaaattacatgttgtgttttatgatactcctgagaaagatttttttaaagcatttctctttcaaaaatccaaccaaccccatgttaacgacaaacaacaaacctattgcaactccctgctttccttaacagggcaaatcccttcccaatgtattcaatatgatgcactgaagattagcaatgcataagtgttaataatttctactcagggccagatgatatgcagataatgctaaaatattgacaaagtatgaagatttcttggcagcctgtctaccagagggacagaggagactaagtccttctaggttgcagcaaactacatttctattaaagcccaaaatgaagttgtcaaaattcagacagtcagtgccaccgcaaatatagctttgctgttgaatgaaataaattatagtcaatgagacagacacactccttatgtgaccctactgacagaagttgtgggtaccaattcgactcatttactgcattatgcagccatataaactttgaccttaggaggtcattttaactttccatctatgacccagctgactgacaagccctttcaaaactgctgtcattctgccctgacatgtcttagcagagcagtcacaaaacagttgtactgagctggtattcttcccctcctttttccatctcatcccttgaactttgttcttctctgttaagaaaagatgtgcctgtaatctcagcacttagggaggccgaggcaggcagatcacctgaggtcaggagttcaagaccagcctggtcaacatggcaaaacctcatctctagtaaaaaaacaaaaattagccaggtgtggtggtgggtgcctgtaatcccagctactcaggaggctgaggcaggagaatcgcttgaaccccagaggtggaggatgcggtgagccgagatcatgccattgcactatagcttgggcaacaagagtgtaactttcacaaaaaaaaaaaaaaaaaagaaaaagaaggaaggagggagggaaggaaggaaggaagaaaggaaggaaggaaggcaggcaggcaggaaggaaggaagggtgggtctgccaattagcatctttgggtaagattgaggatgctggtttaggaatacgtgggaacaaaagttttaagaaatcacacctatttcacaggtatttttccttaaatccctttaaaaaaaaaaccctgaattttagggacatgttatacctaagagactttgcttatcatcattatttctttttattttttgtactagtagctgccttttccagtacaaatatcattacttcttctacattaataatcatcacattggtctcttgagcttatacatgacacaaaaataaagacaaatgagtatggcaagggaaaaaggcaaattgcatctaattgttagtttcttatggggctatagtttgacgcagggcaatgagggatactcagtctcattgaagtttctatgatgtagaactgcagttatatcagagtcccatgcttcgggttgtaaaacaggtttaggaagtctttgaaagctaggcagaaaaaagtaaaggactttttttctagtaagacattttatgatctgcttagtatgttaaatgttagcttcccaccatgcaacttgcaatcccattacttgaatatagtggattcaactagagggaatttctcaccctttgtatctccattgagttcaccgcttcatattgaaaacaccaaaaactaaaagcgatgaaaacaataaaatccaaaccaaaaaccccaaatagagttaatgagaaaaaatacacctggctaataacatggttctatgttggaggtgagaagtgattcgtattataaggtcaaccttggagagggtggaagattccatgaggtttagataacctcatcatgacaactttcaaaacctgagacacttacagctccctgaagggaacagttgcagcctacaggaaacacaaagcctaacagctttcagggtttctatggactccagggagtaaggctccactcttgggcatggtcatcatccaagctgacaggctcagtgcataggctaaagattcctcctaccattcacaaaccaaccatttcaaacttaatccccaaattggagatattcaacggtcagctgtccccttggtcctcagtttgtcccctggtgttttgtgtacatatggcagctaatagaacacactcatctgaaaccctataataaatcaccaggccaaaagtatcaaggaaaaatggaatgtaagcatgcacttggaatttccttgcttttggccatttatgttgcaagcttgcagatgttgagaaatctgcatcatctggccagggacggtggctcacacctgtaatctcagcacgttgggaggccaaggcaggaggatcatttgaggtcaggagttcaagaccagcctgaccaacatggtgaaaccctgtctctactaaagatacaaaaatattaaccgggtgtggtggtgcatgcctgtagtcctagctactcgggaggctgaggcaggagaattgcttgaacctgggaggcggaggttgcaatgaaccgagattgcaccactgcactctagcctgggagacagagagagactctgtctcaaaaaaaaaaaaaatctgcatcatcttcttcctcctccccctttttagttactagagcttaaaataattatgaaacctaataaaaacaaaaaacccacaaatttctaatcttggtatcaatactattttcttatgtaagagtcagctgggtaagttgatgtctagatgggaggttggtgcgtgttgtacatgtgcaatttaaaccagtgtttaattatggagcctcttatgtgttcattataaacctgattttttagggggtatttaatatcagcatcaaaattccctctggggttgaatcctagaacatgctgtctccaaatgtggctgctcagtttttttttttttttaatgggcagcagcgttttttattattcatgttgaaatggagcccagatcagcctacatgactggctacatgctgggggtaatggcttctaccaaaaggctgttgggggcttaaaaagtgcagaaactacctgttaatatgaaaaataataatggtttcataggaaccatttcaaaattcccctataaataatatgcacttaagatcttttttccttttttttttttttttttttgagatagagtctctctctgtcacccaggctggagtgcagtggcctgatctcggctcactgcaagctccgcctcctgggttcacgccattctcctgcctcagcctcctgagtagctgggactacaggtgcccaccaccacgcctggctaattttttgtatttttagtagagacggggttttaccgtattagccaggatgctctcgatctcctgacctcgtgatccaccgcctcggcctcccaaaatgctgggattacaggcgtgagccaccgcgcccggccacacttaagattttcttaaattggtctcaacccatggctgttgcacagaaatcaattatgggagacaaacacttctctaaagttttcaggagagtcttgcaggatacagcaccacagttccaaggtcccctttcctggacctccaaagcattttttttgagacacggcttcactctgtcacccaggcaggagtgcagtggtataatcacagctcactgcagactttacctcccagggctctggttatcctcccacctcagcctcttgagtagctgggaccacagcggggcaccaccatgcctgatattttttttttttttttttttttgagatggagtcttgctctgtcacccaggctgtcgtgatctcagctcactgcaagctctgcctcccaggttcatgccattctcctgccttggcctcccaagtagccgggactacaggcgcccaccaccacacctggctaattttttgtatttttagtagagacggggtttcaccgtgttagccaggatggtctccatctcctgaccttgtgatccgcccgcctcagcctcccaaagtgctgggattacaggtgtgagctttgtttgtagagactgggtctcaccatgttgcccacgctcttcttgaattcctgggctcaagcaatccacctgccttggcctcccagagtgctaggattacaggcgcgagccaccatgtccagccccaaaatatgttttaaagtcgcaccagcacctcagatagacgggctgtggagcggccaagaagccatgttttcacagtaaaattctttgatgttagtgtggctctggacccttttctcttgaagcctgagcatttgctatcagttttctacaggatgtttgtatctttctagattctattcctgggctatctcattcaatactaggcattggatttcatctcatgagcaagctgaaaggctttcaggaactggggaactatgtggggaactgtgaagcttagatttcttggtttcttcatcaagccatccaactgtgcagggacacagctgtggattcagggctccagaaggacctcgaggcagcacatgtcttccagaggtatttctatggagcaaagcaactcacctctgctgcatcctggggctttggggcattttctttttctttcttgcttttaggtatttcatgtttgatgcgtttggttccagatacttttgttttgttctcattttcctgtgaactgttctcctgtttccgaggtttgattggaggcaggggcttatcttcttctcctttaataaatctttcatatggtaggattaatct

SEQ ID NO: 3860 - DNA, 633 bp, Homo sapiens
cttgttttgctactttaggaaatgtaagagagattaaaattctttgggaaatggttttaaaaagtagttttgtactcagataggtaaagaacaagtccagtggtgctgacagcaatggaatttaaaacttgattctaataatctctgagtcccgaaggaatgccacgcagacatccgtttgagtcacgagcttgtaactgaggatttgacaaagattgagtcctcactgtgtgccaggcaccatgctaaattttgtgctaggcacttgggatactctttcagacaagactttgtccctgctcacagagaaatctgataggttggcctatagtcactcttttctaaacttgacctatctacctgaattaaccgaaggagctggttagaaatacagattcctgggccaagaagaagaacctaaagtccaacttcctgtaaccatcaacacatttaaccctgtaagtttagagtttattgtaaccttctcatgccctttgctatactcagtgtgcaaatcatgaagactaaggtggatcctgttttggtggagattctgatgtgttaagtctgtgatgaaacctgggaatgtgagttcttgaaagctcccattattggaaatcactgagctagata

SEQ ID NO: 3861 - DNA, 734 bp, Homo sapiens
acaaaacctaattgcattgcagttttatacaagattgaagggagtgcagtcaacactaagtatgccagaaactcatagtgttagtgaaaagagctcttcatttggagatggacagtcttactctttgtctccttaagtagaaaatggaggaaaatggaggagtagctctttctactcctagagctattaattttaggattgagataattctttaaaatgtctacctgttctggcacataggagaggcctaatgaatgccgactgtaggtccttctgtctccaaaatgataatgatttcattgtcttaccattaccttctactgacttgtctcagtttggggaatgaactgggtcctaacttggactttatttgttcattgaaagcatagcctttgtggcaattaatgggtttatacccacccccatgccttctacctcacagccatgtgtccttctgccgatgacaccagtgcctgcagcttccaaggagttccatgtctagactatgacactgagctcagtgagccatggttatgtccttgccaaagtacaaagatttttatcaaaatgaattttaacaactttcctcacacaattcactttatacatgactcttggcagagtcatgaaaatattttattgtagaagattagcatgtaaattatcgttatgcttgcttaaggcttattctatccttatagaatgattataccttgctgtgtacattggaatca

SEQ ID NO: 3862 - DNA, 1064 bp, Homo sapiens
cccaggaagtgtaggaatcatccaaagtggtaaaagagcagcgcttctaaactctgacttcacatggaaaataacgcgactactaaaactgataacaatagcagtccatgccatttgacaggggtgtgtaggagaggtggtgagcaagctgaaatcccttcaggtatttgcagaacttctgagcaaaagctaaagctaaaattaacattaaatatgcaaagtatttttaacccaacataaattaacaatgttcctatttcaattctattgctcttgggatgactatgtcctttggaaaatgtttaaataacttaagatttccgtcatgagtttactatttcaaaacttatttttttaactgcaagatacctttttatgttaccaggagtgttaccagctagctgccaaaacctggttgaagttctcccactttatattgtaaatgattacatagtttattagtaattgtgtcccctgtccacccactggtccatttggatgggaaaattttcaaaataacttcataagaaaatgataagaaaaatgtggtcaccggtatcatgaggaacttccagacagctcagcacagaaaagttggttttaaagtcctcgaaaacgttactggtaatgagcttccactcctttagtcgttgtgcatagatacaccacagagtaaggttataaaaataaaagttgtttcaggaaatttcccattgctttattacatgatcaatgagagtaaagagaaatggaagttgacgggataggaatgagggacctgctggaagagtgatcacaatatccaaaggaaatttaaaatgcctgttgaaagtgacacactgactcagcattgtcactaacacagaatcaccacaataaaactgccctgccctgtggctcctggcacctcatgtctctttaggttaagcagagagaggtctgtgttgctttggaacaaggtgcagcctccccctaagctacagagaggctctgagcaaggaccagcccccagggtgcagccttgcccaccctccacaggctccagagcagatggggtggctcta

SEQ ID NO: 3863 - DNA, 1617 bp, Homo sapiens
cccaggaagtgtaggaatcatccaaagtggtaaaagagcagcgcttctaaactctgacttcacatggaaaataacgcgactactaaaactgataacaatagcagtccatgccatttgacaggggtgtgtaggagaggtggtgagcaagctgaaatcccttcaggtatttgcagaacttctgagcaaaagctaaagctaaaattaacattaaatatgcaaagtatttttaacccaacataaattaacaatgttcctatttcaattctattgctcttgggatgactatgtcctttggaaaatgtttaaataacttaagatttccgtcatgagtttactatttcaaaacttatttttttaactgcaagatacctttttatgttaccaggagtgttaccagctagctgccaaaacctggttgaagttctcccactttatattgtaaatgattacatagtttattagtaattgtgtcccctgtccacccactggtccatttggatgggaaaattttcaaaataacttcataagaaaatgataagaaaaatgtggtcaccggtatcatgaggaacttccagacagctcagcacagaaaagttggttttaaagtcctcgaaaacgttactggtaatgagcttccactcctttagtcgttgtgcatagatacaccacagagtaaggttataaaaataaaagttgtttcaggaaatttcccattgctttattacatgatcaatgagagtaaagagaaatggaagttgacgggataggaatgagggacctgctggaagagtgatcacaatatccaaaggaaatttaaaatgcctgttgaaagtgacacactgactcagcattgtcactaacacagaatcaccacaataaaactgccctgccctgtggctcctggcacctcatgtctctttaggttaagcagagagaggtctgtgttgctttggaacaaggtgcagcctccccctaagctacagagaggctctgagcaaggaccagcccccagggtgcagccttgcccaccctccacaggctccagagcagatggggtggctctagagagcaaatggtcaaaacttctagcgctaaatagagctttaacatgtctcagatactagcaaaatagagaagcctcagatggctttaggtctggaagtgtgttgctaaaaatgctaaaaatttaacaaacttttataaatccttaagagatctttttcagttttctgaagtaccgttaattgcccatgtgtttcaacttgcagacaggcaagaatttggctttgtatgtttaaaaatatgtacatcttggttcataatgatgatttatttccaaaatggtgactcatactaggattacatataaaacatcatatgtgggccttatatgtaataatgtgtaagtatagtatattaattactctgacataacatgggcagagatttgtattaatttatttctatttcatctaatcaatattttacttaagtctaaaaccttatatatatattgacatgtatcatcgtatatataaacattgtatctattgaactgagcaatctgtagtttattttaaattctgatacattaaagatgtggagaactacataaaa

SEQ ID NO: 3864 - DNA, 611 bp, Homo sapiens
ctgcaggtggagcccagttgacaggaaatgtttctccagaagctgaaaagctgcctggtaaaggcctttcataaaatggtctgcgtttgggaccaggaagacagaagactcctcaagaagagaactggaaccttaacccacttcagacttcttcatgtctgaagcttatttccaccatcccattgagaaccaaagaagcgagctccttggagaatcggctcccacctggaccttctgtttatccttccaatagctgctgcattcatccttcccagctaatgacacttccagcctttcgtgtttcaaagtatcacggactttgcaaaagattccaggtttctatggagcagatagtacttttaacaatcaacatgtgcattattatttcctcctaaggcatacttagacatcaatgcatgctacagcaaggcaacttatctcaccctcaccaaggtatgaacttcagaatttgaacttgttcctttggggtaagttgtatcaccagcactcactaacagactgtattttccagtgaggtttcattctgtttcagatattctgcactttcagtggcaaaattttaaagaaaaggagacaaaatggaacacaaa

SEQ ID NO: 3865 - DNA, 147 bp, Homo sapiens
tggatcacctgaggtcaggagtttgagaccagcctggccaatatggtgaaactctgtctctactaaaaatacaaaaattagctgggcgtggtggtgtgcgcctgtaatcccagctactcaggaggctgagacaggagaatcgcttga

SEQ ID NO: 3866 - DNA, 611 bp, Homo sapiens; identical to SEQ ID NO: 3864

SEQ ID NO: 3867 - DNA, 446 bp, Homo sapiens
gcagttagattagctacttctaaggtgcttctactttttcaggatgttgtttctgtagcagagtcatctgtttcttgtccctccgccctctctatgttaatgattgatgaatgcctgaagtatatggagttgcagtggcaattactggggtttcagtggtgaacataaccagtccaggttccattgcccttgcccctgtcctcagagctccatctctccttagcagtattctctcttcatccctgatgggctgtataatctaaccatcaaatcccttctctaagccaccatcataggactcagtgctcctgtgtaggagatacatgctagtggcctagaactggggtggtccttgcttctgctaccaagggtgaggtaataaatgttttcctagcctcactcccttcaaactggtgtacaaaaaaaaaaaaaaaaaaaaacgaaaa

SEQ ID NO: 3868 - DNA, 446 bp, Homo sapiens; identical to SEQ ID NO: 3867

SEQ ID NO: 3869 - DNA, 233 bp, Homo sapiens
aaatacccttgttagaatcaacttatcagagcaaacggtaagctcggtcatcctacagctgatggagatagctatagatagtaatgtctgtgtcaatttatatttgcctaatcagaaatgattacattatcagtatcctcaaatttttcttttcttttcttttctttgtttttttgagacagagtctcgttctgttgcccaggctggagtgcagtggggtgcaattctcctgc

SEQ ID NO: 3870 - DNA, 528 bp, Homo sapiens
ttgaagatttatgacagaatgaaggccaaagaattcactggaatagataacctttggggaattcatccattttttataccaaggggtaagaatgatttttaaaaaatgaattttccttttctatagatcatagatacttggcttttattgtgacttagttttaatgtgtaatactcatgattatatttgcactaactgagttagattctgacttgagaataaccataattgtgtgaatggttgaaaatacctgactggcatgtaaaaatagagggaaatagagacttcaatctataaatagattgtcttatacagtgcttatttttttattagttggttcccacattaggaactttcctatagtaaagctctaaactctactaatgttgacaataaacttttaagtggcttgcaaagacctatttagcctataatgtatcttaactatacaacctcatcatcttttacagaaacaggttttgtgaacccttgaaggctggtaatgtgtcattcctgatccggtccctg

SEQ ID NO: 3871 - DNA, 233 bp, Homo sapiens; identical to SEQ ID NO: 3869

SEQ ID NO: 3872 - DNA, 528 bp, Homo sapiens; identical to SEQ ID NO: 3870

SEQ ID NO: 3873 - DNA, 3156 bp, Homo sapiens
gctcggctccgcctggtgcggccgcggccgggagggactggattatgtcggccccgtttgaggagcggagtggggtggtaccgtgcgggaccccgtggggccagtggtaccagaccttggaggaggtgttcattgaagttcaggtgccgccaggcacgcgcgcccaggatatccagtgcggcctccagagccggcatgtggcgctgtcggtgggcggccgcgagatcctcaaggtagcggcagctcggggcttgtgttcagtttcctcttcccagacgcccccagccccgtttccctgaacgactgttgggtgtcccgacggctcctgtggctggcagaaagagaaagaggataacactgaccaggtttgggtctggtcagagcccccgcctcttcagggcaggtgctgagttgtggaaatttgaggagcctattttcgtgtttagttttcaaactaagactgctgcttctgcttctctgacgggcttcagctgggaacagattaactaggttgctaaaggaacaaatatttcttccgtgcactgaagacaggcaggaagacaacagataacgtacctgcagtggagaggttaagctcctgtacggaagcgtaattcataaatagataaatataggaaaggacaacaaagaaaatagggatagaataacgggcagagaatttagagatgatgtcaggtgattagttttctcatctaaaagcttgaaaatcctgcatgtttgtggagtggtcaagcaggtggtgaagaggtgtgtgcataaaataagtagtactccttttatttcttttcaccaatgctctttggatctggacccgctttttctttgttaagtgtataattaaactaacaggttgaaattagatttagttctcaggttagatgcccaagatgtttgatggcagtgtaatatggtgaagggagactacttgtttcctagttttgtaaacttgggcgagagattgttcagtgtctctatatcttccttatccacaagataaggtagttatagtacccttctcatgggattgttttgagcttaacatggtattcacttgtatgaagagcttggagtattcactggtatgtaataagttcatactatatgttagctattagctattatatatattacagtatatggaggtgctttgagtgcctcaagattcgtgtgaaagacattatgtcagcttggatctcagttacttttctgaattgtacaattcatagtttcctcaccaatggttttagattacgatttaaattagtaaatccagtaactttcggaatttagcagtagctgctgaatttgggatttctgatgtacgtatagaccagtgggatttttttctcactaattttgacatattttaaaatgtgggcttttcctagtgacatttaatttcactttctataacttaaatttggcaacaaattaaaatggatttgagtttaggcattctctctttaaaaaaaaatatatatttattgagacagggtccctgtctcccatgctggggtgcaggggtgagattgtagctcacagcagcctcaaacccatggggtcaagcaatccacgttggcctccaaagtcctgggattacaggcctgagctactgggcctggtgcagtctcttttaaatttatattttgtttatttttttaaaaaacatgagtttgtgaacagttagtcacaactaatctatcaaatctggaatacgtaaagtttttttaatgccgattgcccaacaaaaagattaaaacgtttttaaaagtttactttaaaaacaacattttgccgggtgcggtagctcatgcctgtaatcctggcactttggaaggcctaggcgggcggatcacaaggtcaggagttcgagaccagcctggctaacacggggaaaccccatctctactaaaaatacaaaaattagccgggcgtggtggcgggcgcctgtagtcctagctacttgggaggttgaggcaggagaatcgcttgaaccctggaggtggaggttgcagtgagccagatcgtgccactgcagcctgggcgacagagcgaaactctgtctcaaaaaaaaaaaaaaaaaaaaaaaaaagacaacattttttagttttagcaggagatcccttcttgtggttaatttaaattggtagaattaaagcatttcagatattaatttcacatttggccagtggtcagtattactgtatcttctaaaaattaaggagccctgatctttctttagagagctctgtgttctttgccatagtaaatatcccttgcagtgtaaactagtttccattttacctgctgggagaaaatttagggttgtgcacctataaatgtcatggtgaagtggtggtataagatgtggattaggtaggaaagtaggtaaatcttaatcatgaaaactttataaaaattaaattctgtatttttagcaccttatatgtttatttttcagggcaaactctttgattctacaatagctgatgagggaacatggactttgggtaagggtaattactataattcatcaaattaaaataattttgtcttgatatcttttcctcttttgtattaggtcttttttgtctttgcagctttgaaagataaagcaatagaaatgtgttgaaaaccgttgtatgtcaaagttacctagtggggggagaaaaaattagttagttgtttttggaaatataaaatttaatgaagaacttcttgagaccaccctggccaacatggcaaaaccccgtttatactaaaaatacaaaagttagccgggcatggtggcgcatgcctgtattcccagctagtcgggaggctgaggcaggaaaatcacttgaacccggggggcggaggtttcagtgagccgagatcaagccgctgcactccagcctgggtgagagtgatactgtctcaaaaaaaaaaaaaaacaacttgatgaagaactctaatttatttgtgcgtgtgtgtgtgtgtgttttttttttagaggacagaaaaatggttcgtattgttcttacaaagacaaagagagatgcagcaaattgttggacttctctactagaatctgaatatgcagcggatccttgggtgcaagaccaaatgcagagaaagcttacattagagagattc

SEQ ID NO: 3874 - DNA, 2540 bp, Homo sapiens
  SITE (2096): n equals a,t,g, or c
gcgtgcgctcggctccgcctggtgcggccgcggccgggagggactggattatgtcggccccgtttgaggagcggagtggggtggtaccgtgcgggaccccgtggggccagtggtaccagaccttggaggaggtgttcattgaagttcaggtgccgccaggcacgcgcgcccaggatatccagtgcggcctccagagccggcatgtggcgctgtcggtgggcggccgcgagatcctcaaggtagcggcagctcggggcttgtgttcagtttcctcttcccagacgcccccagccccgtttccctgaacgactgttgggtgtcccgacggctcctgtggctggcagaaagagaaagaggataacactgaccaggtttgggtctggtcagagcccccgcctcttcagggcaggtgctgagttgtggaaatttgaggagcctattttcgtgtttagttttcaaactaagactgctgcttctgcttctctgacgggcttcagctgggaacagattaactaggttgctaaaggaacaaatatttcttccgtgcactgaagacaggcaggaagacaacagataacgtacctgcagtggagaggttaagctcctgtacggaagcgtaattcataaatagataaatataggaaaggacaacaaagaaaatagggatagaataacgggcagagaatttagagatgatgtcaggtgattagttttctcatctaaaagcttgaaaatcctgcatgtttgtggagtggtcaagcaggtggtgaagaggtgtgtgcataaaataagtagtactccttttatttcttttcaccaatgctctttggatctggacccgctttttctttgttaagtgtataattaaactaacaggttgaaattagatttagttctcaggttagatgcccaagatgtttgatggcagtgtaatatggtgaagggagactacttgtttcctagttttgtaaacttgggcgagagattgttcagtgtctctatatcttccttatccacaagataaggtagttatagtacccttctcatgggattgttttgagcttaacatggtattcacgtgtatgaagagcttggagtattcactggtatgtaataagttcatactatatgttagctattagctattatatatattacagtatatggaggtgctttgagtgcctcaagattcgtgtgaaagacattatgtcagcttggatctcagttacttttctgaattgtacaattcatagtttcctcaacaatggttttagattacgattataaattagtaaatccagtaactttcggaatttagcagtagctgctgaatttgggatttctgatgtacgtatagaccagtgggatttttttctcactaattttgacatattttaaaatgtgggcttttcctagtgacatttaatttcactttctataacttaaatttggcaacaaattaaaatggatttgagtttaggcattctctctttaaaaaaaaatatatatttattgagacagggtccctgtctcccatgctggggtgcaggggtgagattgtagctcacagcagcctcaaacccatggggtcaagcaatccacgttggcctccaaagtcctgggattacaggcctgagctactgggcctggtgcagtctcttttaaatttatattttgtttatttttttaaaaaacatgagtttgtgaacagttagtcacaactaatctatcaaatctggaatacgtaaagtttttttaatgccgattgcccaacaaaaagattaaaacgtttttaaaagtttactttaaaaacaacattttgccgggtgcggtagctcatgcctgtaatcctggcactttggaaggcctaggcgggcggatcacaaggtcaggagttcgagaccagcctggctaacacggggaaaccccatctctactaaaaatacaaaaattagccgggcgtggtggcgggcgcctgtagtcctagctacttgggaggttgaggcaggagaatcgcttgaaccctggaggtggaggttgcagtgagccagatcgtgccactgcagcctgggcgacagagcgaaactctgtctcanaaaaaaaaaaaaaaaaaaaaaaaaagacaacattttttagttttagcaggagatcccttcttgtggttaatttaaattggtagaattaaagcatttcagatattaatttcacatttggccagtggtcagtattactgtatcttctaaaaattaaggagccctgatctttctttagagagctctgtgttctttgccatagtaaatatcccttgcagtgtaaactagtttccattttacctgctgggagaaaatttagggttgtgcacctataaatgtcatggtgaagtggtggtataagatgtggattaggtaggaaagtaggtaaatcttaatcatgaaaactttataaaaattaaattctgtatttttagcaccttatatgtttatttttcaagggcaaactctttgattctccaatagctgatgagggaacatggactttgg

SEQ ID NO: 3875 - DNA, 31314 bp, Homo sapiens
ttaattggttaaatgacttactgtgtaattttatttcatattacacaaatgttaatcaaatgctgagtagacatgcagatgacaagcagtatatgacaaactctgaagaaatagttacatgtagagtttctcagatttttagtgtatctaagaattaactgaagagtttgttaagaatgcaggcttaaaggccaatccacagattataatttcatacaaacaggatggagcctaagaacctgtaaattattaaacaactgattaaaaatagagaggtttctatgaagttaggcttgtccttatttcttatttgaactggacaagtagaaggataataggtaggaccaagtgagcattatcagaatcaaagtagaggcaataacaagccaaggtgttttagcctagctaaagaagctcagactagaaaagacctccaggatcaagctgaagaatctggggtttagactcttgaaactaaggtttcagaacaggaggataataatatgatactgacttttaagttgatgagatgcattctaagctggaaagccagcgaaagggttcagaatgaggtgataaaggtgagcattagggaggaggtatttgcaagaaaaaataaaatgtcaaaagacactttggtaaaaaatgttcctttcacatatttaaggattggcagttaaaattaaatacaacattataaaatacccatgtcaaatataataacagcaacatcaataacaacaagacgaatgaaataatcttcaacaggtttctcagatgtttacttccatgattcttgacactccataggagctcggtaacagtttgtattgcctagaagaattattgaaaagaaggattagtaatctagattaaaacgaatttatccatcattataaactaaaaacaggccttgtatcttctttaaggcagatgaagcaatatattctgtaagataatttttagatttatcttttcaaccaactttaatttatcgtgaaagacaaacattcacagtcaagaaataagaaatttacttctctaaaactacaaatcagaaaatgattaaggacctaagagacatttaggttaaaatgctaagggtattatagagggagtaatttggggtgtgtggacagggacaaaatagtcatgcaaagcttcaaggaagatttgagatttgccttgaagaacaggcagaatccaggtatacagaagagaaagcgtagaaggaggaagaaaacagtcattgtacacaacaatctcagtaagaactgcttttatcagaaggtgtcaacaaattttcacagttcataaaatggatgacttgctaaatgctataaaagcaaatccaaaggaagaggacacttttatacatttattcatgtcttaccttcttttaatggggtcttcagggcaaaattttctttactttcatgatgaaaagcctttgaaggatcaaagtgtttgatacctagaactttattcaattcctcttgaagttttgtctcactttgtttttttttagcaagctgacagcggagttttgatacttcctaggtaaaaagaaataataggtaataaacaattattaaagagtatgtcagtgaaatgtgttaccaatgttgcgggcaaattccaaagttgtttatgtattatcacactcaacagcaaaaatcactactagacacaggctttaagactgaattacaaaatgacatgaaacagctgtgacaaaggagatacagtcttttaaatctccttgcccctcctcagctacaaagctatttttctgataaaagttcaactcaaaagtaattgctgagatggacttctggcatgacagcatgaaagttctgctgacctgctccctagtgaaactaaaagttataaaatattaaccagttaaagcctctgaaaattgacctaagggaaaaatagcaaatgaagaaacatctattcaagaaaatctgcaaaaatttggtgaaaaagagagtctgcagtgtttaagccaaaactccttcccctcttcccactcccagcttagcaaggcaaagtccacgccagacggctacagccaaaagcacagggccctcttttcccccaactccgagtcagaagcttccctcccaggaggaccaggacatcagagtttctcattttgtccccagctccctgtggctgcggttatatcctggacaaatgcaattgtgaggtgggggatcccttcctccagtcagccccattcatggaacaggggctcaccttgggcacagtgtgttgaaaatgctgggccccgatgactctttctctggctcatgagggggatggttctacaccaggaggttactcaagagggcctgaggctattcctcatctcttccccacaagtccactgaaaactcagctcctagggcagaggatgtcactcagagagaaaactgccattgtctccaatttcagctctagtcctggctcagggatattgtcgggggagggggaaaggagggcggaaaagacaagcaggccataaaacagggagctcctcatttcttttcaaaggaactgacttcacctgcaacagagcttggagaagctgaagcctaagggtgctctaaagcaggggtccccaacctccgggctacagaccaatacccatccaaggcctgttaggaacccggctgcagagcaggaggtaagtggtgagccaggaagcataagcattaccccctgagctccccctcctggcagatcagctgcggcattagattctcacagcagtgtgaaccctattgtgaaatgcacatgtgagggatctaggctgcatgctccttatgagaatctaatgcctcatgatctgaggtggaacactttaatcctgaaaccatccacataaacccatcacaagctgggtgatccggtctgtggaaaaactgccttccacaaaactggtccctggtgccaaaaaggttggggaaccattaaagaacagtggtggttatagtgagagagaaatgggaggagatttaagatacaggctgaacagtaggctagttagtttgcaggagaaaactagggaatatgacagctgggacgagcccttctgtagtcagaataaatatccagcactgctctcgtatgcaatccctacaaaggagccagaatttgattggattagtttatagagcaatttatgccctaaggcactgttgcaaataatcaagcaaggagccagcatctactggagtttacagtcactatgttcatggaaagagaggaaggcagccctaccaaagcaagtgtcatcccagggtaattgtgggcacacctaaaactgtacctccctgaacagcaacatcagaggcacaatactgttggggtctggggaggtagtgggatatgtttccctaaaataattgagccactcattaagcaaacaagcaaataaaaagcccccaaaaggagggggagctgtacccagaaatgctacaatatatgatctaaaaatttactttccaatgaaaaattacaaggcatgccaataaacagaaaagtataacctatacatttggacacaaggagaaaaaatgtctgagagtaatcggatgttggatttttcagccattaaacaagggctgaaaaaccacctattgagtactatccttactgcctggctgacgggacctgtcataccctaaacctcagtatcatgcaatgcacccatgtaacaaatctgcatatgtacccccacatctaaaataaaagatgaaattataaaaaagaaaagttcttggccaggtgcagtggctcaagcctataatcccagcattttgaggccaaagctggtagattccttgagcccaggagctccagaccagcctgggcaacatggcaaaactctgtctctacaaaaagtagaaaaattagccggatgtggtggcgcacgcctgtggtcccagctacttgggaggctgaggtgggaggatcacctgagcccagggaggttgaggctgcagtgagccgtgattgcatcactgcactctagcctggtgacagagtgagatcctgtctctaaaaaaacccaaaaaccaaacaaaaaaataaagttctttctccactaaaaatttaaaaaaagaaagaaacttaaaaaaaaaagactcaaattactagaatcagaaataaagagaagccattactactgaccttacagaaataaaaaaaagattataaaggaatactatgaacaattatataccaacaaattaggcacatttatagaaagacataaactactcaagaagaaaaccgaatcaagaagaaagagataatctgaataagcctatatcaagtaaagatattgaattagtaaccaaaaaatattcacaagaaaaaccaaggtccagatggcttcaccaataaattctaccacacattcaatgaagaattaataccaattattcaaaaaccattccacatagaaaagagggaacatttctcactcattttgtgatgtcaccattaccctgataccaaaatgagacagacattaaaaaaacaaaaacaaagcaaagaaaacctacagaccagtatatcttaggaatatggctgaaaaaaacccctcagcaacatataaaaataattatatgccataaccaagtgagatttatctcagaaggttagattaatatctaaaaatcaattaataaaatacatcatatcaacagaataaaaaaattacatgataatctcaatagaaatagaagaagcacttgatagaattcattaccctttcatataaaaatgctcaacaaactaggaaacagaagggaacttcctcaacttgataaagagcatctatgacaaatcgacatctttgttttttttagattgtttcgctgttgtctcccaggctcaatggctccatctcggttcactgcaacctctgtcttctgggttcaagccattctcctacccaagtagctgggattacaggcgcccgctgccacacctagctaacttttgtatttttagtagagacgaggtttcaccatgttggccaggctggtctcaaactcctgacctcaggtgatccacctgccttggcctcccagagtgctgggattataggcgtaagccacctcggctggccaacaaatcaacatctaataatgtcacgctatatacatcatacaggtaacatcatatatcatggagaaagactgaatgctttccccctagatcaggaacaaagcaaggctgtccatccattttcattacttctaaattcaacactgtattatactacaggttttagccagagatattagacaagaaaaagaaataaaaggcatccagattggaaaataagtaacactatctctatttgcaaaagacatgatctataagaacatcctaaggaatccactaaaaaactattagaactaaaatgagtttagcaagggtgcaggatacaagataaatatattaaaatcaattgtatttctatacactggcaatcaacaatccaaaaatgaaattaacaatttcatttacaaaacatcaaaaagaataaaatagtaataaatttaacaaaagaagtggaaaacttatactctgaaaactataaaacattgttgaaagaaattaaatgagatctaaataattggaaaaatatcccatattcatatattagaagacttaacctagtgaagataataatatgtcccaaactgatctacagattcaatgcaattcccatcagaatcccagctggtttctttgtagaaaaactgattccaaaattaatatagaattgcaagaggtccagaatagacaaaaccatattgaaaaatacaaagaggactcacgcttcctgatttcaaaacttactacaaaacaacagtaatcaagacagtgtggtggcacaaggatagatgtatagatcaatggaagacagttgagagtctagaaataaatccatacatgtacagtctaaatgattttttaattggatgctaactccattaactggaggcaagaatattctctttaaaaaatagtgtggggactattgcatgtccacatgctaaagaatgaagctggacccttacctcacaccacatacaaaaattaactcaaaatcaatcaataatctaaatgtaagagctaaaactataaatctcttagaagaaaacacaggggtaaatcttcctgaccttgaatttggcagaggagatagataccaaggaacgaacaaacaaaaaaatagacacactggacgtcataaaagttttttgggtcaaaggacatcatcaagaaagtgaaaagacaatgcacagaatgggagaagatattcgcaaataatacataagagacttgtgtccagaattgatgaagaattctcacaataataaaaagactaataatccaatttaaaaatgagacagagtataaacagacatttctttcatgaagatatacaaatggccagtaagcacatgaaaagatgaccaacatcattaccaattaagaaaatgcaagttaagttaatgagataccacttcatacccactacaatggctaggataaagaagtcagataataacaaatgttggtaagaatgtggagaaattggaaccctcgtacaccgcctgtagaatatagattggtatgagccacttttgaatacagcctgacctttctatggccataccaccctgaacgcacccgatctcatctgaatgtagtctgatacttcctgaaatgattaaatgtagagttatcaaatgatatggcaatttccctcctattatttcccagggaaataatatgtcccaggaaaaaacaaatgtccatacaaaaacttgtacatgaatgtttatggtagcattattcataatagccaaaaatgtgcaaacaagtgtttatcaactgacaaacgaataaataaaatgtggtatacccacataatgaattattaggctataaaaaaaataaagtactctccatgctacaacacaggtgaatcttgaaaatattatgctaattgactgaaagaagccagtaacaaaaggccacatattatttgaatccatgaatatgccaggtccacaatagggaaatcaacagagacagaaagtagattagtggtttcttagggctgaagggtggggtggggtgaggagataggagagtgttaggaaaaggataacaaggtttcattttgaggtgatgaaaatgtcctaaaattgactatggtgatggttgcacaaatctgtgagtatactaaaaaacactgaattgtccactttcaatgggtggattgtatgggttgtcaattatatctcaatacatatgttaaaaaatttaaatgcccaaatatttttgaacactgcttctctttatggttttacatcaaggagtttgcagttttgcaaatggaaatagatatgtaaagcttaatgaattcatccaattactcaagtaattttcaatatattaagaaggtagctagaaaactttagaacattgaatgcccatctggtcaacactctaaaataaatccactaaatcacagctcaattttcctctataaacagttatttttttctgataccaaagatattcattttatttaagtattatagttagaataacccccactccaatatctttaataaaatgaaaagtcattttacaaaccgatttgagttggctattttcatctttcaacttcacaacatgcttgattttttgtttcaaattctgatgacccaataatttagcatatgaatctcttattttatttagctgttcctgagctgcaccatgttcattcaacaatgcctgtttttctacttcaaaagcatctagttgtagctgaaaaagattttttaaataaagttaagacttaaaacagtttgatcttactagtttcatataaaccataaacactaaagaaaattaaaaacacaaatgaaaacaaggtatgttcacatattctcagggctctccatagattctctacgagaatcttttaaactttgtatttttcattttaaagatcattaaaacagaggaaaagaaacaaggtaaaaaagccagctggccagttttatctgtatcagttagattaccacattataaccaatactgtacttctaagttccaaaatcagcatttattcttttttcttttaaaagatcagtatattgagaaacaatgagtatttgcaataagtcatatcacaaattaaaataggttaattatcaaaagctcataccaggcaagccctctgagccaaacttttaagttccacattacaaagtttttttttaaaccacaaagggtccattgaaaaaattatgccaattaaatttgtcaattatacttcaataatgtgggaaaaaattatgcataatttaataaaatgtataaacctttaatagtgagctaaattggcactgtaagtgcagagcaaaatgatcttgcagaaaacccgagtcactgtcctcattataatagggaacaaagtgagtccctaaaataaacacaagtaagtttactcctaactgacaaacctgaaaaggttttgttttattatatagttcttcatagaggagacgccacttgttaatttcttcagttaattctgctgttgtattttctttttcagcttttctgcatggaagaattaaattgagaaaaacatagttatttaaaaaatcacatcgtaactgagttaacaaggcactgaggttctaatcatagattaccttccttcttcatcttccagctgttttctaaagtcttcctcctgttgcttgagttggttctgcaaatcagttattttttgaagaaaagaaactgtgatttctttaatttctgtttcctttagtgctgacttggtctgcagatctagaagcatcctttggtttgagagagaagaggtcactaaacattttatagccactttcattaatttttccttttttttttttaaacctcaaggaactcttcaagaagtgtcattttttaactgagtaaattcttaatttgcagtataagatggccaaaagcaagccaagggacagttactagctggctttcaacattaaattgtcttaatggttctaaggccattatttgctctatataccttacatattcttgatttgagctctcagttgccaaaatctgatgctgaacatcctctgcatttttcccagccttggccactttttcctgtaatgatgagttctccagcttaagatcttctatctcactggctgttaacgctttatagcttattaaaaagaaaaaaaagtcaaagtagttttctaactattgcgtatgacaatcataactgattagtttacactttatatacttctaagtaaaactaaaaagtttttaatgtattcatgcatttaacacaggtaagaattcagtgttctgaggcaagtactaatgagtttacatggcatctgctgtgtattcaaagaaaaaaaaatcaagtgcctactaggtgcaggaagtatgcatacagagatggaaaagaaatcaactaccaagcatgaaaattacttacaattcaaaaaataagaagtgagactagagcctaatgagtaagaaaggctggagcagaagctggtggcatgagggtcatcaccgcagggcacagtgggcttacctggcggacagacgggaaccattaaaggtgtccaagtaggctgggcatggtggctcatgcctgtaatcccagcactctgggaggccgagacgggtggatcacctgaggtcaggagttcgagaccagcatgaccaacatggtgaaaccccatcactactaaaaacacaaaaaattagccaagcgtggtggtggacacctgtaatctcagctactcgggaggctgaggcaggagaatcacttgaacctgggagggggaggttgcagtgacctgagatagtgccattgcactccagcctgggcaacaagagcgaaactccgactcaaaataaacaaataaataaaataaaaaggtgtttaattaaatgtgtagctcactctagagctatgaggaagatggattagggcaggggaaaagaatggaaaattgaaggatcaactccaaaacaattatttatcagcccaggtgagtgataaaggaggcttagactaaggagctggcaatggaaagacacaagatctcttttggaagcagagtaggaaaattcaagagatagactgaatattgggggtaaggaagagagaatgatgaaggatgactctaagatttacagaatgaaaagctgggaagatgatgtcactgattacaataaaaacaatgagagactaggggtagaaagcaatggaaggatcaagagttggtttggacaggttaatattaaaagacagtgtgatatctacttgaagatgtcaagtgggtaactggatatgtgaatatggagctgtaaagaaaggtctggtttgatgaaataaattttaatgccacgagtatatggatagtgactaaaatcacagaatagataaaaaccccctgaagcactattcttcaaactaacgagaagggaaattcctttacaggattgatattagcaataaatatatatatataaaatttacatatatttatatgatttatatgttctgatacaataaaaattataaataaaacatatacacttataaattatttatctatgtgtctgtcataatgtatcacatgtgggaacagatcactggggaaacaaggtacaatttaatgaattaaattaaactaggcagttggttgtccatagggaaaacaaaaaatgaatttgatccctatattgctacacacacagaaatcagttctaggtggaaaaatggaaagtgaaattttaagacttttagaagaaaactggttgaatatctttacaccttgagatagaaagaagttcttaaatgagaagcaaaagtacccacatacagataaatattttaaccatattgaaatcaagaatttccactcatcagaagaaaccaaaaagaaaataaaaaaataagctaaactggcagaagatacctgtaacccatatggctgataaagaaaacctctacaaatcaatgaggaaaagatgataaccctatagacaaataaacaaaagtcataaacaagcattttatggaaaaggaaagatgaattatccacaataagaagccattttacactaagtacactggcaaagtttaagaagtctaacaagctttggcaaagaagataaatggaaacttatacaacactagtgggagtgtagattcttactcccacattggaaagtgatttgatattaagttttagagttgaacattcatatacctttggctttagagaaattcttacatacatgtattcttatagtcacaaaataactaataataactaaccaaatgggaaacaactcaaagtccaaagaatgaataaataagttgtggtatattcatacaataaaatactcatagcagtgactatcaacaaaccatagcctcagacaacacaattcaatcctgaaaacacacataatgcagaatgaaaaaataagtcccaggaaacggcatatactatgatgacattttttggtaaagttcaaggagaaggaaaattacataatgcattatttgtatggatatacgtgtcataaaattataatacacaggggggaaaaagcaaggaaataattagtgtagacttcaggacagtgttatctgtcccattttcatgggcatggcagaggaacttacatatggatactaagttgttgaaaatcttttggcttactggttgtcttttataggttcatgcatgtcagttttatcttcaagctctacagtttatgtacatgttatgcattcttttgtatttattaaataaaagaaaggaaactctcccccaaaatgagctaaagtaaatgtgataaataaaaatgttaacattaatatataggtattcattatattggcctttgtaatttgtagttccacccaaaataaactttttatttaaggagaaaataagtagaaggcatgggaggtgaggaagtggatatagagacaatcttctctgtcaagagaagaaaaaggaggagaaggaaaaggactgaaaaggagtagaatttggggttaagaagggaatgactggtggtgtgagacagctacaaaaggaagttagggtcagagaagtatttaaaacaacttatgtattttatttatttttcgtttgtttttgagacagtcttgctctgtcacccaggctggagcgcagtggtgtgatcttagctcagtgcagcctggaactcctgggctcaggtgatcctcctgccctcagcctcccaagtagcatgtgccacaatgcctggctaattcttaatatttttttttgtagaaacaaggtcttactctattgcccaggctggtctcaaactcctgacctcaagcaatcctcctgccttggtctcccaaagcactgggattactggtatgagccacagtggccagctaattaatatattttacagacagatgtacattaacatgttttaatattgattggaaaaattccagtaaaaaggtttcaaattatgagaaaacaaaatgatagaatgaggtcactgaagattaaaagactaggacatttcatctgtaataggtgggaagataggatgagtataaatgtgggtctctttataggtttagcaagagataaaaacttctgaattctttatgaaaatgataacatcaagagagtagggcagaagcaccaaatgcttctaagtacatgacttgatcctcccacctcagcttatgcagtggctaggactacaggcatatgctgccgcacctggctcagcgcataaaagttgaagtggatggtgagaaaggggaatttctataaattataaaggggaattatataaatacaataagattaccagataatgctaaatgcccacttacggttggtgattatggaatttaaactagtatgaatcatcctttgtgtgactgctttgctcacatatttcctggggtaaacacccctttctgcacacatcatatttaagagtgcaggctcccaagaaaaatacctttcaaattgagcagtaacatcttcaaggctttgcaccatactgtcatacttttcctgcaaaagcagggtggcctgggtatgagcagcactacttttctccagttcagcctccttcctaagaaaaagaaataattgaaagataaaatgccacctacaattactaccctaagaaagaaaatagtatttacctttgaaactgtgaatcatatagctcatatcttcaccactgcattacctgctaaatagctcagatcctaatttatgacttacctcgaaagcatgttttttatgcatttttctactagcttcaacttatctttcctgcttattttactttaaaaatttgggtgaagaaggtagtaggatataaaagactataaaaccaaatcttaagatactagccaggactaaagactgcaaaagattaccagtcaaaaaacatctggattgaataaagtttcattctctccatttagacacttgagaaataccatgaacaattaaagccacttcattttaaactacagagttacaagactttgtggatttattctgattatatgaataacccacataatactctattactgaaagacttaataacttctttaatggattattttgcatagacagaatgggttttaagtcatttttatatacatatgctattaaatctcagggatattttggaaataatatatttccaaagtggtgataaaatttttagatatgcatatgagcttatgagagatcttttaaagaatatacagaactaaaaattgtaaataagcattgtgtacttatagactaagttggacactgagataagaaaaatagctgatcaaattcattctgtaacaagtgccggatttcaaaaatatacacaccacagcaagagcaatcaaatatgactaaagagtttataataaaaatattttcttccctgtcccctagaggaattattttcaattcttagtttgtttttctcttaagcttgaaatttccaggctagaagggatcttagagaccatctaataaaactcttttatatctaatgaagtagaagatcaaagaaactaagattgttttgctcagaatcaaccagctagctaacagaattagtaataaaaatccttatctcttgaccattggaccacagttttttgagttggaataaaaaattatctcaattttctttcctctcttaaaatgacattatcttattttcccaagattcctgttccctgagattggctgtagtatagaacaacacccctaattacaattttgtattgttcccccaaaagcagggatatgaaaaaccttgctgttcatttgcatcactaatcataagaaaacagaaaagattaataacaaaagtatccactgagacagatacacaggtgtgagatatattacaataatacaaactcatatctagcccacagtcctttgacaacaagtgttttaatgatcagatcccaaggatttaaatatttgcaatttgaactcaagaatcaaatcagactttttaatttaaataaatgtagtagtgtttgtcactaacctgtgttcctgaactatgaaatatgaatatgtaggctaaggaatagtttctcttaataaataaaaaattagcaattactatggacaaaacaaaacaaaatgaaataaataagtgtatgggagaaggaaacataatgtggcagaaattataaggaactagagttcgggaaaaaagtgagatttcagtttttcttttgtttttgggacacagtctccctctgtcgcccaggctggagtgcagtggtgcgatgtcagctcaccacaacctccgcctcctgggttcaagcaattctcctgcctcagcctcctgaatagctgggattacaggcgtgcgccacgatgccaggctaatttactatgtatttttagtagagatggggtttcaccatgttggccaggctggtctcgaactcctgaccttgtgatctcgctgccttggcttcccaaagtggtgggattacaggtgtgagccaccgcacccagccaagatttcagtctttctactgtaaataagagatttcttacttctgaatgtttcccagttataattattttttctcatttgctttttatcagttattgattgaggtggcatcttgtgctacgttgcccaggctagagtgccatggctattaacaggtataatcgttgagcattacagcctcaaactcctgggctctaaagatcctcccatctcagcctcctgagtagctgggactttaggcatgtgccattgtgccagcctgctttgcattttgattgctatttctgaagtgtttgtgctcccggaaaaatgtaattaaaggtataacttacactatgtaagtgcatagacaaaaatgggaatgctatttattaatgggagggattctttatttttttcccccaagttcattattgtgttttgtttgtttttgagacagagtctcactctgttgctcaggctagagtgcagtgacgtgatcacggctaactgcagccttaatctcgtgggcttaagtgattctcctcccacaactttctaagtagctgggactacaggcacacaccaccgtgcccagctagttttttttttaatttttagtagagacgaggtctcactatattgcacaggctggtctcaaactcctgagctcaagcagtcctctcaccttggcatcccaaagtatgggaattgcaggcatcagccaccacatccagccctgagttgattattgttctaatgctgatgttcaataaatttcagaaattagcagagtagtaaagaagtgtaaaacttttgtcatttgtttatttaaactctctttggccttaaaaaaagggggcaaaacctttaacttttaacttaaaagagggggctgtcttacttgtttgcatgtacattttgtgttcacattctgtgtctactacttaattgtaaaataattaataattactacttaattataaaataattccaacctaacacgctcacatgattgataagagaatactaaaaaaagtactcaaaataaatacatctgaagtcatatataaacatgagatcctattaatacaaaccctttcagcttttcttctaggagttttaattcttcagctctagattttgcttcctcttccaattgcttgaccagcctttcagcttgttcctccttttgctgtaatttatcaagctcatccagtgtttgctttaattcttcctcaaacagattcttctctttagccatttcctcttgaaaagaacagagcttctgatgaagactcgaagataattcctatatccaaacagaaaaccaccaaaataatttggaatggcattgtgaggttgtactaggagacaaaaaaaagtacagataaagaaggatgaaacctaaattcaacagattcaaggaaacttaaaacaatatagaaatagcatatttgttttcatagattatttcctataccttgttaacattgtggcaaatatcatcttaggcttttttctatgcaacgcacatgcagaaacttcttaatctaaaattatattttatatatatatatctgttttacaactggctttgatattaacattatttttcacatattatgtaaaaagtgtgtggtgatttccatattacataaaattattttttaagctatacaatatacaaatacatcaccattgtgaaataattctaacattacaaatgatgttaatattatctttgacgacttccccccctaattttagttttcccattgcagagatagctactagtttggaatatatatgccttctggtatttttctttacacttatatatacatatacatttggggagggatataaatgatatatactctgttgctgaaatctttccaggtcagtgtatatagatctactcaattcctttagctgttgtaggttgtccaacactataatatttcacatcagtgcatgtaagtacctgttggcttaactctcaccagtattttgtgttatcaaatgttttaatttgtgccaattttgtaagtgaaaaaaatattatttctacttccttggttactactaaggtggagtatctttctatatttacaggccagaacttctccttctctgtttccatcctatgcccataatttttcagtggactttctttcttctcactgatatgtaaaatgttctataaataatctggattttaaaaattgctttgtttcttctgtaattagacagtcttttacaaggtaagtgtaaatgtttatatagcctaaataacacaagaatgagccagaaaattttttaaaaattccctattttgctgtatctgttgtcattttcccacattattcataaccctagggtgaacatgtagtgaaaatacgtagctaaatcctcagcatatccatgattatgtcctcaggataagactctaaagatagaattggtagatcaaaggatatacacaatttaaaggtgttcagagacatagggaaatgtatgacacaaaatgaacagtttaaaaaaatatggtggtaaattactttctcttgttgcagaagtgaatcaatttgtaattctttttgttgaagcttttcacgttcctgttgttcaagaataaacttctgttttaagttttgcatctctgcatttagattttcgttgtgttctctattcctgttgacatggtcttctagaaaacgcaaaacatcaagaatactggaattagataagaacattaagactgagaaacctggactcccataatattccattacactgcttttagcatggtatttccaaagaagaaaacaaaactgtgaactttgtatcattactccatgtaatatatactatgtgctaaataataaaacccacaaatcttgttctgtgttatctactgattgttacacagctacctagtggaaaagtcaagaattatatgactgtatatatttcaatcaagacaggtaatatgctgtattgaaataaacagaaaacaaacattataagagtaaaatattctaaaatgcagtacaggtttttgctgttgtatagctatatagctaattatatttaaaatgttagtatagctaattatatttaaaaggttgttttagcatagtagtatttttcctaaatgttgtatgtaacacttatctaaacaaagtaactataaaacactgtaatacctttttctttttcaagcagctgacatttcacatttagatcttctacttgtttagataatataacaatattctcctcaagagactgcttaaggcttaaaatttcatcattcttctctttcaaattttcttctaactgggcaatatctagcttgtatttttccacttgatctgaagcacaactgcattaaaacaaattatcttaaaaagcacatctatttaggcacagggaaaataacagaaaaatgatgaaaatgactgagtattaaaaaaataaggttcaatttaaagctactgctcatattacctaatttcttcgatgtattccaagagtttttctgtttcagatttttcatcaatcttttctttctctattgaaacactaaaacaaaaattgcatatgttaatacattctagtttcgttatttaataatcttacataatgcttatgtaccagatactcctgtatcaggcaggctgactacagagccctaactcttaactattattttatgtaatttctcaaattcacaatttacatcaaaatagaagactaaaatttttatttaagtgagaaagttttctgaatatatactgacaaaaaaacctatgatgacaagaaccatcattacagtatcccaagtgttagaaataatattctttttgtggtcttcctggtttccccacccatccaacatactaaatagcattttgtgtgcccataaagcttttgtcccagactacctggtcttcaattacttatctgtttacctccaccaaactgtccaatgcaagaaatggacaaaagacttcaatagacaccttgcaaaagttgatatgcacataaaatggtcaataagcacataaaaataaggtcaacattcatggtaacaaattaaaatcacaaaggagataccacttcctacctagtagaaaggctaaaatcaaacagactgacaacattaaatgttggtgagaatctggaacaactgaaactatcatacattgccagggggtgtataaaaatggcaaaaacacttctgagttttaaaaaacattatatatacactaccctattacccaagaattctactcctagaaatttctctgagaaataaaaacgtgtccataaaaaaacataaaacatgttcacagcagtctttttaatggcagacactggcaacagcccaaataatgatcaaaaggagaagagtaaagagatggaggtatattcataagatgaaccactactcagaaataaaataggaaaaattacagtatacagaacggtttggatgaatcttgaaaaattacatcaaacaaaagaagcaacacacacacatgctctttctcttttgcatgtcctaaaaaaaggcaaaactggccaggtatagtggcccatgtctataactccagcactctgaaggccagggtggtatcacttgagtccaggagtatgagaccagcctgagtaacaaagcaatgccccatctctaaaaaaaaaaaaaaataataataataataaataaaaaaaggcaaagctaatttacgatgatgtaagtgagaaagtagttatggggatggggacatgacataggcagtagcagggggacaagaaggggtatgaaggaactttctgaagggatgaaaatgttctctatcttgtttggtagtggttacgtaggtgtatacaattgctaaagtcaccaaactgaatacttactatccacacattttattatatgtatattaaagctcaaaatcaaaggctaggattgtgcataaatcacaatttcctataccagtgtttctcaatttcaatctaatgaccactttcataagatcatgaaatctttcctcatcattaataatacagaagatgtacaaaagtaatgcactcatacaactttgtagcacaacatgtttgagaatgattagggctcattctagtttaaaaagagaaatagggcaactggagggaggcaatgagataagtactaagagaaggttgaagtctcagtaaacaataatttgtgaagagactcaaatcaagaattgcttccacttaacaatttctcttcacattcactcacttacagttttccctccagttgggctattttcccttgagactcttcgagactcctttgggtgacctgcagcttcatctccatgccttcttgcttagccatcataccctacacaacaaagatacctgttttaggaaatgagaaagttgtactgatccccagatccagacacagcaaacctgccaagggcagcactcaccctcatctttgtttctcttttgtttctaagtttcatcaactccaagcttagaattctcaaattcttctggttaccattttcagaaaactaaatacaacaaacacgtaaaaaattcagaaatattttctgctaagacatatttaaaatacacaaatattgatttttctacctatcactggggttatgtttttgactttaatatactttggtagagagaacagtctttgacctacaccataattactgattgatttaatttttttttcttttctttttaagagatcaagtctcgctccgctgtccaggctagagtggagtggcatgatcatagctcgctataatctcaaactcctgggctcaatcaatcctcctgcctcatcttcctgagtagctgggattaccggtgtgcaccaccaccatgcctagctaatttttcaatttgtttatagagatggggtcttgatatgttgcccaggctggtctcaaactcctggcctcaagcaattctccagccctcagccttccaaaatgctggaaatacaggcatgagccactgtaccagtctactgttcttatccctcttttccttaatgtgacttgctggtttatttttattttatttttgtaagacagagtctcactctgtcacccaggctggagtgccgtgttgctcactgcaacttccacctcccgagttcaagctattctcatgcctcagcctcccgagttcaagctattctcatgcctcagcctcctgagtagctggaattacgggtgtacgccaccatacctgactaatttttgtatttttagtaaagatggggtttcgccatgttaggctaggctagtctcaaaatcctgacctcaagtgatccatccgtctcagcttcccaaagcgctggaattacaggtgtgagccactgtggctggcctgttggttcatttttgaaaggttgtttgggtggtcacttacctctatatgctggaaagtccattgcaagactctaaagcaagtccctgagaaaggatttcttgaaacatgtttgcttaacaaaatgaatctgaatcgcctggtgtatgttgttttgttttgttttgttttttgagatggagtcgcactctcttgcctaggctgaagtgcaatggcgccatgtcagctcactgcaacctccacctcctgggttcaagtgattcttctgcctcagcctcccgagtagctgagattacaggcgcccgccaataggcctagctaatttttgtatttttagtagagacagggtttctccatgttggtcaggctggtctcgaactcccgacctcaggtgatccgcctgccttggcctcccaaaatgctgggaacacaggcgtgagccaccgtgcccggccctaaaaaacgtgtttatatttattcaattgtaaatgttatcatgaggctcagataccttagattttagtagttcattagtcctggtcaattcaataagttgtttttccagtgtagcattatttgcagagagagatgttttttcccttagtgcagcatttagccttgcttccatcttttccaactcagtttccagatcctggatccgcctgtcctgggcaccacgttcctgtagaagaacacaaatctggacaaaaacaaggtgataataaatgattcactgatagaatgccaacataaggagatgctaccaataatcacccctaaagtttctggaaaaatctctgattttgacattatgcttgtagatattctaatgttactagctatttgaataatcatatttacctatgatacatcttaaaagtcttaatgcattttaagaacataagaactttagttgccataagttccaagtacaattaagctatctattcactttttttttttttttttgagatggagtcttgctctgtgctctgttgcccaggctggagtgcagtggcacgatctcggctcactgcaagctccgcctcctgggttcaagcgattctcctgcctcagcctcccgaatagctgggactaccagcacgggccaccacacccggctaattttttgtatttttaatagagacggggtttcaccatattagccaggatggtctcgatctcctgacctcgtgatccacccgcctcagcctcccaaagtgctaggattacaggtgtaagccaccacacccggccgctatttattcacttttaaggtatttccacctataatagttattttctctagcttcaattacacaaattcaaattagcttaaaatgctaaatgttttttatttcaagaaggcagagctgggcttctgaggagaatgtactaggcattggcaagccatcattcttgctgctattaccagattaaaaaaacaaaaaacaaaaaaaaacccaaaccaatatttgtcaacagaaaatgtggaagccaaaagacaatgaaatgatatttttaatataatgggggggaacctgccaccctaaaattctatacccaatgaagtcactggtgtaaattattagttctaatcctggctctaccactcacttaccagctatctcactgagactcagtgattattcctgtaagtatcaacccctacatgtaccctcagtaaaatgatagctaacattattagaatacataaaaaagaatcagagcaactgagcagacatttacagttactctgacatactcttggtcgaaagccaacattcgactgtaatcaaatgaaagattttaatatattgaaagaatatatccatgaggaaaagagttggtcagcaatggaaacagaaaaaaaagactgcagagaagcaaagttcacagtgagctgcttagcattgctaggaaagtaaatgggttctttaggttagtactgttcaatagaaatttctgtcatggtggaaatgccctgtccagtatggtagctgccaatcacatgtggctactgagcacttgaaatgtgattattgcaactgaggaattgagttcttatttaatttagatcatcacatgtggtgagtagctaccatatcaaacagcacagctctatgttatttcacccatgaggaaggcctatacctattgtgcagagcaatgcatcgagttagcctaacttcatcacagtctaaccagctaggattgcatgctcactacgaaatcctctagctatgttgtgttaacataagttagcatacaggaagactgtgaacgatggatagatataaatatttgatccacatatataattgtaatcaactgacataatgatttttcagttatcagtttttcattaagtgggctatctttaatctcggcgttgccagcataccacattaacatagcccggatagatctgtgaaatactgtaagaactgttttcctgtaggcactgttctggatggcatgtttgcctcactgcaggactcctcacactgcaacagaatccttatctcttaaatctgtgtaactctctttctatcatgtgtacttttcactaagtttaaagcactgcttacctctttctctaatatcttcaaatctttatcattcttttgagattccttctgtttaaaagccaaaaaaacttataagcaaatttagatgtcacagatatgacagccaaatttgtttttcagttatcagaaaagatgaagggatccaatcagttagtttctattttaaacattacactgttaaacattgtgtaggccactcatctgataaataaaatattctaaaaatctcaagacattttaggtttagaaattttcaacccaataaatcaggattttcctaatcagcccagtgaaaagaacaggtggaactttatgaataaagctactgactgcctccctctaatgttaaatagcaacacatcttgaatatttaattatgctatctcagaaagaatcttacaaagagaaatcgacttaaactttgatacccgaagaggaaaatatacagatgcaaagaaataaaaactgaaacagcataagctctgattctaattttctcattggctttattctaaataagacatataattttcacactatatctttttatatccaacagactttctgacacaatggctagaaaaagaatatcttttccatctaaaaatggaagaaaggcatcaacatcttgaatgaaatctgtttcagatgtttctaagtggggcaggaggtgggggtgacatcagtgtcatgtttattaatttcacactccatgaaattttttatggggaaggactattattttggggctccatacaaacttgtatgtaatttagttttctaaggggctttataaattacaaaattacagaacagtttcttcaagaaatttaagtcaaaccacttacatcaatttctaagaaaagagtgtctataatagtcctgcccaataaaaataatgcaagccacctatgcatttaaatttttctagtagtgtgtttaaaaagtaaaaatcttaatatattttatttaacccaacatatcaaatatattttttcagcatgtcattggtataaaattatcaatgagatgttttatatttttgtactaagtctttaaagttttctttgtattctacacttatagcacgtcttaattcaatgctaaattttcatcagaaatgtttatgtatatttaatttcataaaacatagaaaggagaaagtaaattcacatactcaagttgttccaaaaatatttaaaagcgttccactaacaaaatcgagtatgtctttaaatatgtattaattaaaattaaatattaaaaatttagttctttaatagcactagccacatttcagttgctcaatagacacatgtggctatgcttccatacggaacaacatagctctatattacagaatatgaggcttaggcaactgccaaatgaatgaacaacctaagcctttttccaactctgaatatttttcacatcaaaaaacctattaatttgtacaacttttttactttatttttatctttgagataggtctcgctctgctgcccaggctggagtgcagtggtgcaatctctcggctcactgcaacctctgcctccctaggttcaagcagttctcctgcctcagcctcccgagtagctgggattacaggtacgtgccaccacacacggctaattttcttgtatttttagtagagacggggtttcaccatgtgggtcaggctggtctcgaactcttgacctcaagcaatccacctgcttcagcctcccaaagtgctgggattacaggcgtgagctactgtgcccggctgtctttttttttttttttggagagactgagtctcgctctgttgcccaggctggagtacagtggcaccactttggctgactgcaacctctgcctcccaggttcaagcaattctcctgcctcagcttcccaagtagctgggactacaggcacgtgccaccacgtccagcacatttttgtattttttagtagagatggggtttgactacatgttggacaggctggtctcaaactcctgacctcaagtgatccacctgccttgcctcccaaagtgctgggattataggcgtgaaccactgtgcgccccccagctgtcttttaaaaagtattatatggcggctgggtgtggtggacaacacctgtaatcccagcactttgggaggccaaagtgggctgatcacctgaagtcaggaattcaagaccagcctgcccaactggctaatatgtttaaacctcgtctttagcaaaaacacaaaaagtaactgggcgtggtggggcgtgcctgtaatcccagctactggggaggctgaggcaggagaatcgcttgagcctgtggggacagaggctgcagtaagctgagatggcgccactgcactttagcctgggtgacagagtgatactccatctcaaaaaaaaaatacataaataaaatttaaaaagtactatgcagcttgcctgtttataaacttatgaaaagagtaatagtagctcttgcacaagccacaagactattaagaatttaatctctcaccactccttaacagtttctcagtagcaaacctctcttagatattggcattttttcccacttttcttcaaaaacacttacccttccccacaaacaaatacacaaaaacaaaacaactcaaatggtggtacttaataaatcaaagcatcacataattttgaaatgtttactaggtaatgaacaatttaaacatagaagtgattgagaattgaagaccattataattgtgaactaagggcacatttaaacataatgacctaggcagaaatgtaaaacttgctagagttctaatgataactcatttcattaatttacagatttacttataaccttgattcatacacttaacccattctaatcaaatacaatactttcagatgtttttgatgatacacttgataaaccagctggcatataaaagctcctcacctttgattccgaagacttaacttttctagctgaagcaggcaaggtagtatctttgtcaacattaagattttgtttagattctgcggaaaaatgaattgtacagatcatggttgatgtcaatgtgttttaactacacacaaaacacaatttccaaatttttttgtctttctctttttgtttgtttttgttttttgagacagtctcactgtcacccagcctggactgcagtggtgtcatctcagcccactgcaacctctgcctcccagtttcaagcaactctcccactttcctccctagtagctggaaccacaggcgcaccccaccacacctggctaatttctgtatttttagtagagatggggtttcaccatgttggccaggcttgtctcgaaatcctgaactcatgtgatccacccaccttggcctcacagagtgccaggattacgagcacgagccaccttgcccggccccaaatttctaattacaacttttgatgaaacaatatattctttccttagttgtacattttcaaataattactcatacaatttttttacacatctaacacctttctgattttcctaatattccctgacaagtcaaggtaattaccaaaagggaagctacatatcaatataagtatcttgcttaattttcctggttatataacaatgtaatgatgacagcattattctgtacttgaccctttcataaatccatcaaataaaatttaaatatagttctagcttcacattttaaaaaatgctataacatctttaaatattgttattcataactttaaaacttataagatcacataaccattgttctttggtgatctatattacctttttgttgtttaaatctttgtgatttctgaaaggatactggtcctttcaatacttctaaagttttaacatcataagcacctggagatggtgcacaacctagaggaaatagaaaacattaatatattatctaatgttacttatgatcttaagttaaaacatgtcataataaagtgaatataaatgtaaaaatgtcattaacaaactgctttttttaaatgtaaaaaattgcatccatttgatattacaaagaaggcctctctatgaagaacaatatcatcttgccctttatatcaaccgggtcaaaggaacacaggcaactgagcaaacgacagttttgagatgaacatcatatattacaggcaatatatggctttcttactaaggattgaatatagcaaataaaatacttggtgtcaactctactcgaagagagtcacaaagataactactatcagtttctagaaataaagtaattaaaattgtctatccctcaatgtttagcctagaataaaaatttatagtgataatccatctctggctaatatcaatacatcagacctattaaagatgtcaactgcaattcaaacacatggaagaaaagcaaccacactagagcaactagaattttttgagcacttactaaatgccaggcattatgctaagcatttcacagatgttattttatttaatcctcacaagaatcctgtgtgataatttatagacaaagaatgtgaggcttaggaaattcaaaaagccaatgttacacaaagtacaaattgtactagactatatttgtatgttccagaagtttatactgcataatttcacttaactaaagtcccagatttgaaggcatttctgagtaaatacacatagcagacctgagatggggcctttaggacttaaagtaattaaaatactactagcctaaagctttagctgattgggaacaaatagattaatactattctctgaaaagctatttacttcagtctagagtctcatgcaaataaataggaagagcaaggagcttggaccattcccaggcaactactgctgtcccctaaatgtttgtcaaacagtagacaggaactcatgattttttttttttttttttttttgagacggagtcttgctctgttgtctaggctggagtgtagtggcgccatcttggctcactgaaacctttgcctcctgggttcaagcgattctcctgcctcagcctcccgagtagctgggattacaggctcccaccaccacgcccagctagttttttgtatttttactagagacagggtttcaccatgttggccaggctggtcttgaactcctgacctcagctgatctctctgcctcggcctcccaaagtgctaggattacacgtgtgaaccaccaggcccagccccatgagtagatcttgattagcattttttaaaaagtaaaaacaatagaaaaagcatgactcatatgctgcaaagttaggcattgttttgtgaaacttttctttcgtatgtatgtgtagagatataaaaatacatcttaggttgaaatataaattttgggggtttttttgcttttttttttttgaaacagagtctcgcactgtcacccaggctggagtactggaatatgaaaaatcaccacagtgcctcatacacattaagcatcaaatgaataattagtattatttctgtaactgtgagcctgaaatactatatctttgataaagccagtttaacctactataatgcaaacaacaaaaaaaccaaaaaaaccttaaagccacactgctgacaaaacttaagagtaggtcctttgattactcgggaaatcatatggtccttgagtcttttaactaagaaaataagtttgtgctgattcacttgctcatttggccttcctttgtgagtagttgtattttcattcacacgttggctgacaaaacttagagacgtaatgagtaaccacgaaatagtgtatgatagtgaataaatcatgagctttaatatttagctctaccacttactgattgtgcaagatacaaaacctctgttttctcatctgtaaaatgaggtcaatatcagtaccttcctcacttggcttttggaaggaataaacaagatctagtagcacagtcccagcatacagcattttttttttttctgtaagacagagtcttgctctgtcgcccaggctggagtgcagtggcgcgatctcggctcatcgcaagctccgcctcccgggttcacgccattctcctgcctcagcctgtagtcagctgggactacaggcgcccgccaccgcgcctggctaattttttttgtatttttagtacagacggggtttcacggtggtctcgatctcctgacctcgtgatccacctgcctcggcctcccaaagtgctgggattacaggcgtgagccgccgcgcccggccgcatacagcatcttaaatgatgagtgcctaccaaacacagctaaggcttcctggttactgtgctgtgcattgcggtgttaagagcacacgatgggggctgggttcatattccagtccggtcactttggtaatgtagcactgagcaaatttaagtctcagtctttttatcaataaaataataataggattaccccttagagttggtgggaaattaacataactaataatcgatgtaaagccttagtacggtgcttgaggtataagtggtcaatatcagccataacttcattgtttatgttttcaataagtgctgctgctctaattttacacccataaactgcctttactaatcttccttcttttatgcccaaatggaatacacaaaagaaatgcacaagttcagactacaagtaatactccagtgttcttatcagtgaggccctctcggacttgaaaatcaagtagctaccaacgtctcgggtccattcccttcgccctgctgtagtttctccattaccgctgtttattgacagtattccccgcctgaatgtaagccccacggggcggagactgtttcactgcggtatccttagcatcctgattagtgcttggcatgtaacagatgcttagagcatatttgagaaaaatcaatcaactgaatgagccccagcccgaccctaaaatcgcctcctgcttgcctcccaagaagggagctgaaagaggcaaagggcgttagggcgtctcccgtcccccagctctttcccccttacgcaccagaagggtcattgaatcgtttcaagggcgccttaggaaaggacatgttgacggccagctccagaaactgaaggtgactggcactcctcgacaactgaatgcggattatcactcc

SEQ ID NO: 3876 - DNA, 491 bp, Homo sapiens
aacccctctccccagaggatgccttgcctggtgaggtcaaagtacaagatggtgccagttactgagatttggccgaaatggtcttggggtagtcgcgggagtttggaagtgggggtaaggttgctggaaggtttcaaggtctctcatctgctccctctccgtttcccatgaaatgcccttgtttaacgggctgtggtgccgaactccgggatcactcccacagcctggaagggagccgttgcctccagctgcagtgcatcaagggagctcggaatagaccctgccctctgtcagctgcaccagtggctgtccatggggggagaggcagaagcctaccagaatttcctgtcttggctccccagatcagaatcaagggacttctggcctctggactgaggaagtgacattctgtttttcaaaggaagtgttgttgttgcggagtacaagtgtgtgtcaatgaaatcaggctcttaggtagatgtttgctgggg

SEQ ID NO: 3877 - DNA, 508 bp, Homo sapiens
ttttctagttaattaagtataagtataagagacctatctgctatttactgagtgccctggagaaattgcaaaaagtgtctctggaaaatgctgactattgcctctggggcatcctgatatggctgcagtgggaggccggcagaagtaacaaccctcccatcgtgcctcagtgtatttgtgtgtgtatgcgcgtgcatgcaaatgcatacacacgtacatgtatataattattaaacagaattttcttgaggaaaaacattttattaatatgacctacactgcattgtagttttctatcaatttcactggattaaaagattgagggaataagattggcagactaccccctagtggctaacttgaagaaagttgtgcacaaattgtaaagaactactgcattaaggtaacagtaattgtttatttccattatatttattaaatatacttattaaatctatgtcccaggcactggatcaggtgcttggaataaaaatccagtaaacagaaa

SEQ ID NO: 3878 - DNA, 577 bp, Homo sapiens
cttttaaaagtgtcatggttaggtcccacagctagactacctgagttcaaatcctaactgccctcagtagtcacgtgttcttgggtaacgttcttaacttttctgtatctcagtttcctcatctctaaaatagtaggaatattaatagtctacacctcataagattgttgtgaagattaaacgagttaataaagtgctgtgaatgatgcctggcacaaagaaggcactcaataaatagtagttcttatagttgttgtatatgctttatttgttactcgttttcatagcaggattgtaactacttgtttcagggccaagataccagtttctttttatccctagagcctaaaatggcatcattcactaaaataaaattgtgtttaaaaataaagatatatacttaattctaccccaactgtcatacatttgtcatgatggcatttatatctaaactaccatcctggaatggctgattcttttgtgctcttcttggctgctaaacttctaatttccttctccatttaaaaaatggtcttagtacttcctgatacctaccctgcctcccctccccaggttt

SEQ ID NO: 3879 - DNA, 2012 bp, Homo sapiens
tgtaaaagtgagatgagccgcagcccgttcatctctccagtctccctggcaaccctgagtctccatggaattttggggacacagcttgaaaattgctttttatagaggcaaaataatggccttgcagccagctgggtttctattctaattctgatactattaaatgaccttaggcattttaacctctctgtatctagtttcttcatctgtgaaaaaggttgtgtaataatacctacctcatactgttgtgaggtttaagtgcaataacatataccaaacatatggcacatactaaatctttaggatgaggaaagatgtagggcaagaaagcaaaagcagaagttagaactggggaataaggtagagtcttacttgttttgttttgtttttttgagacagagtctcgttctgtcacctaggctggagtgcagtggcgccatcatggctcactgcagccttgaccttctgggctcaagtgatcctcccacttcagccccctaagtagctgtgactacaggcttgcaccaccatgcccagctaatttttttatttttgtagagatggagtatcgccatgttgcccaagctggtcttgagctcctggcctcaagcgatcctctcacctgggcctcccaaagtgctgggattataggcatgagccgccgtgtccaccgagtcttagttttagaactaagccaattgtttgaactgatggctgaattattataaacttattggctggtggctcactgtaattccagcactttgggaggctgaggcaggaggatggcttgagcccaggagttcaaaacaagcctgagcaacatagtgagacccccaactctacaaaaaagttttaaaaagaaaaaaattagctggatgtggtggtatgtgcctgtagtcccagctactcaggaggctgaggtgggaggatcacttgagcctcagtgagctatgagcttgaggctgcagtgagctatgatggtactactgccctccagcctgggcaacagagtaaggccctttatctaaaaacaaaaacaaaaaacttcttaaatctctcctgatgaaggacaggattggtttggggatgaggttgagcctgtagtataagtcagatggtcttgggtgtaaagattaaaaggcctggagggatggatgaccgaaggcagatttttgtcacaatgtttaggcccattttataatcttaattatggtagatataattgctgtatgacttttatcacctgagactttccacaacactgaaataaacaaattcctgaagtggtagttccctgaaaaggaaaaagaagaaatagagaaaagttgaaggatatgtacaaattcactcaggtcatatgtactggagtcacaattcaaacctagatgtaagttttccagagtcagggtgcttgtggtatgcttaatacaagcttttaaaagtgtcatggttaggtcccacagctagactacctgagttcaaatcctaactgccctcagtagtcacgtgttcttgggtaacgttcttaacttttctgtatctcagtttcctcatctctaaaatagtaggaatattaatagtctacacctcataagattgttgtgaagattaaacgagttaataaagtgctgtgaatgatgcctggcacaaagaaggcactcaataaatagtagttcttatagttgttgtatatgctttatttgttactcgttttcatagcaggattgtaactacttgtttcagggccaagataccagtttctttttatccctagagcctaaaatggcatcattcactaaaataaaattgtgtttaaaaataaagatatatacttaattctaccccaactgtcatacatttgtcatgatggcatttatatctaaactaccatcctggaatggctgattcttttgtgctcttcttggctgctaaacttctaatttccttctccatttaaaaaatggtcttagtacttcctgatacctaccctgcctcccctccccaggttt

SEQ ID NO: 3880 - DNA, 2012 bp, Homo sapiens; identical to SEQ ID NO: 3879

SEQ ID NO: 3881 - DNA, 423 bp, Homo sapiens
aaatggaatactttcaaaccttcattagtatcaaatatatatacatacacaaacatatatatgtatgtacatatatttattttgtttgtttttttcccccgagacagggtcactcaggctggattgcagtggtgtgatcttagctccctgcagccttgaactcctgggctcaaaggatcgtcctccttagcctcctgagtagctgggattacaggcgtgtgacaccatacctggctaatttttaaattttttttgtagagacatcatctcattatgttgcccagactgatcttgaacttctggactcaagcaatcctcctgccttggcctctcgaagtgttgtgaaggttaaatgagttaatacataaagtgatctgaatgctgcctgacacaaagaaagcactcaataaatagtaactttta

SEQ ID NO: 3882 - DNA, 3854 bp, Homo sapiens
tttttctgacccctctacattgctataaagtgccaaggccttaagacttgggtacgtgtgttacaacggcaagagtgccagcgccaacaaaagacccattggacctgtcagctcctctgtttcaccaagcagacacaataaccttaccaacaaagcagagtaagccaagtgcctctgtgtgacaccaccagcagctgatgacgcataagaaaaatataactaatttagactagagccctatctcttcttgagaagctgggatttgaaggagctatcctgagatctgtactgctagtaagtgactgataacattataaactggatcggtccctgagttcagagactgagttgcaattgagtgaaaaatagacaacgaaatcttgaagaattgcacggaggtgcaagccaagtttatttggctctccaaataatattggttgaactaagaaattggtaaacgaaacctgtaataggactggtgtttgggcgtctctctctgtcactgttgtctcttgctgtcacattgctgtctgtgttgtctttctaggtccagatgttttcagataattcacattgccctgattgtggacaacagtggttccctagtttagaactaggccactggttgtaccaaactgaacttgttgaaaatgaatgttaccaggtattcttagaccgtattaacagagctgattattgtcctgagtgttatcctgataatcctgctaatagaagccttgttcttccttggtctttcccacttgagtgggctccccagaatctcaccagatggacctttgagaaagcttgccatccatttcttctgggtcctccactggttagaaaaagaatacatgactctcgagtagctggttttaaccctgcattacagttaatcttgaccagaacagataaaaccttaaacaaaaaactgggccaaaacaaatagcttctataatagtcaaaattgtcaagtctagaggcttttgtgtaggtagcccaaggaagatggaaaaataattcatttctaagtctgacccagattgtcactactttgggaactgcttaaattgttggatctgcttccgtggcctatacatattttattcacatgaatttagttagtattccagccagcctgttcatctagactgaggctaatctgttcatctagactgaggctaatccgtatttcctataaactgttttggaactaacttaccactcctaaaaaaatttctgcaacctaatgagtgtcatatgacaaagtagtcctagaggggaagtcctatactgtgtgcttcatagtggtatttctaatgataacttttgtgggaaagcagcctcgttatagctggatcctagattagtccagtgaattttaataagaaattacactgttgtaaactcacctcttatgcattggtcagtgatgagatatatatataaatagatagatagataaaatttgctcttatatagccatttattcatcattggccctgtttggcccatcctcagtgtggctgtgagattattgataactggtcactgtcagataaatcacattctattaggaaacacctatataggttatgcagaaacatgcagaaatgccacctgtccatacttacgtggctttacataaacaaaagactgtcttgtctttgtggtgactgaatttacaacgtcctcccctggaaatggaaaagtacctatcaggagatgtatgacaaaagaaattatcaagcctgacttcatatatattatgaacagtctagaggaagcatctttcttagaactaaggaggtctgctgaacattggccacattctggactttcatgaaaatcatggacccagagttggggttaagccacttagaaaaagctgttgaaaacatctcaaaggccactgaacaatttttaaattacacttaacatgccaggtatctaggtatctagtgcttttagcaatattatcaatattatcaaggtcccagcttctttgtgtccttcccccttgcgatcctctttttttttttttttttttttgctttttaaaaaatagtgacagagtcttgctgtatgacccaggctggtctccaactcctaggctcaagccatcctcccacctcggtctcccaaggtgctgggattacaggcgtgagccaccctacccggcctaggatccatgtttgctttttatcgttaggtttttttttctcaatgagtacaatatgacttcttgttgtaacagacattttaatccctaggaaaggctggaagtagagagcaaaaggctttctttcaagtcagtgttttatttgggaatcaagtctttcccaaaaatccctagcaaatttcttcttacatctcattagaaagtaccagtttacaagggagcctgggaaaccttggcaaaggggaatagggttagcattgcctgggtaggccacattgcctccattgaagaaatcagggcttttttttttttttttttttttttgagacagagtctcactctgtcgcccaggctggagtgcagtggcagtcttggttcactgcaacctctgccttccgggttcaagcaattctcctgcctcagcctcccgagtagctgggactacaggtgtgcgccaccacacttggctaatttttgtatttttagtagagatggggtttcaccattgttggccaggatggtcttgatctcttgatctcatgatccacccgccttggcctcccaaagtgctgggattacaggcatgagccactgtgcccagcccttttttttttttttttttgacggagtctcgctctcttgcccaggatggagtgtagtggcacgatctcggcttactgtaacctccacctcctaggttcaagcaattctcctgcctcagcctcctgagtagtggggattacaggtgcccgccaccatgtctggctaatttttgtgtttttagtagagacggggtttcaccatgttggccaggctggtcttgaactcctgacctcagatgatccacctgccctgacctccgacagtgctgggattacaggcatagccaccgtgcctgaccagggctcttttagcaaggaaaacgtgaggaatgaatggctgttggtgtgcaacaaatcatacttgctacatgttgtgaaacctgaagttatttgttagtctgtatgaagaatgtaccccagagatgcaccctgtatctgccttatgtctcttacaatggaggttctctcctgttatattgctgaataaactatgtgaactgctaaattgactgaagactagttagtttatcactaactctttaatgaagaatttcactatcctacaactcctcctaaaaagtgaaaatttactttgagagagtgctttcgagaatagtattatgatcagtattattgcccctaaattttttaattattagagaatgcttatgttacaaggacatatactaagaaacattctacaaatgtgaaaatttaaatatcagcaaaatagagaaaaggtttttgtttttgttttagtcaatatctccattaaatagtaagatcagattaaaaggatttatatcattgatttctcaaatcaatacctaagcagtacctgtgagagcttgtttaaaaatggagatttcttggtctgctttagaaattttgattcctcaggttgcttgtagggcccaggaatctgcatattataaataacacctcatgccgggtgccatggcatgtacctgttaccacagctacttcagaggttgaggcagcaggatcacttgagcccaggagttcaagaccagcctgggcaagatagtcagaccactgtctctttcaag

SEQ ID NO: 3883 - DNA, 423 bp, Homo sapiens; identical to SEQ ID NO: 3881

SEQ ID NO: 3884 - DNA, 4089 bp, Homo sapiens
ccctaatcgatttctggatgaccaaggacaactaattaaaaaagaaacctttattccttttgggataggtcagttacacttttttaaactgcataatttttaaaagaagtagaactaaaataatattttattatttcatgttgttttaaaaatgtttctttcttggcaagctaatataagagaagggatcaataatttagacaaggcatctcccctatgttcatttcagattttaataaagcagttggttttaaatctctaaatgtgactagaaattttactttcagagctgatcaggtaattttggggggtcccagggagctacttaagagcaatttctgatctggtctggtgggtgagaggatgggttctctaatctcaacagttcctcttttaggttcctagattaggaacatagaattctttctgtggaaaaagggaggctctagggattcttatctgaatttttttgccttaatcttccaggcaaaagtggaggaaagaggtaagtaggcacagaagagacaggatagctgccacactggatctgtctctagttcctgtctagaatggggataggtttttatgagtaagagttaaaatgtggatttgatatgtaaaaattctgatcagcatatgctgtgggaggctatgtggtatatatggcaatttgacttaaaaactccatctgcatttagaatactcaatttagatatttcatataaatttgtactttttgaaataggagaagggatggtattataatccttcatttttttctgatctcatttttagggaagcgggtgtgtatgggagaacaactggcaaagatggaattattcctaatgtttgtgagcctaatgcagagtttcgcatttgctttacctgaggattctaagaagcccctcctgactggaagatttggtctaactttagccccacatccatttaatataactatttcaaggagatgaagagcatctccaagaagagatggtaaaaagatatataaatacatatccttctaagcagattcttcctactgcaaaggacagtgaatccagcaactcagtggatccaagctgggctcagaggtcggaaggagggtagagcacactgggaggtttcatcttggaggattcctcagcaggatacttcagccattttagtaatgcaggtctgtgatttgggggatagaaaacaaagtacctatgaaacgggatatctggattttacttgcagtggcttccaccgatgggccaatcttctcatttcttagtgcctcagacatcccatatgtaaaatgagagtaataaaacttggcttctctctacctctcagcactaatgatggtcaaatgccttacatcttttctgatatctctaaaatgctgttaagttctggagaagaacttcaggagaagaagatctatcagctggcttttaaagacctatgacaacatgaaagtggtgttcagcctggaatgctttgtcagagatgggtgtggatttaggttatactgggggagaacttttctcagcacagattctatgccagcttctttgggcttgttctgtcactatctttttgtttatgattttagtttttactttttgtagatgtgggatgaagtggactctgtcgtgtatattgaggaaaaaagaaattataattttaaaaaatcccttgtaggattattatctaaatttatatgtctaacttctactacaactacaggaacagtgagccttgctacttctttagtagcttcttggcagaattcctttctactgagttatttgcaaagatgcagctctacctttttacttaaggcctgaatggtgagcatggggattttgatactgggactcatcaggaaaggattctgctttcaaactatactgaacattcctgtcctagcgtccctgccaccaggcccaatgcatctgatccttgaatatactctcaaagaattcactctcgttttattaagagaactaaattgtttctaaatgtagatggtccctctggaaaagcagttttcagcaggggtggtaaccccttcagagggagtttggaaatgtgtgggtatgattcttggttatcataatgatgggggtgctactggccttctgctgccatgggaccaggatgctaaatgtcaaggtagtcctatacagtgaagaattgtcctgctcaagatgccaggatttcccccagtgagaacatgctctaaggaatgaccacccctttcttttattctcccacagtgctccatgtacagaagtaagcatagcagtcatatgagcaaccacattcctgaacctttcctcatgctggctctacacttaatcctttacttgtatgtttctgtaattcttacataaattctattaagagggtggcatactgtagtggatgaagctgaggcttatagtaggtaaggcacaaagttaaaaagtaacatcactgggtttcaaacctactggtctctgtgactaaagaacactttcagaaccacttcttgattctgccaccacttgatcccataacaggctaccccttggcctcatgctggagttgtgtgtgtctgtcttcatcccaggctgagctccttgaggtgaggatgttgtgctgtttgcctccctcacagtgccttggtcttagtggatgcccagttgtcttgtgaatgacttttaagaagtgtacttaagagaaaaatcctaccttatttgaataattacaagtcatgtttttgttgcttaaaggtgataaatcagtgtatattatttgttaatgtccattaaagccagtttttaaaaaaatcactggacttttgtgtttaccatttaaaacaaccattttaaacaaacttagaacgatgccttagctgtttataggtaacagaatgtaaactcccaccacctggagactaggccatatccagggacctcacactgactttcctaaaggagagaagcagctacgctgttcatactgatagagaagagggcaagaaaagatccagagtggctgttactttgaaaattaaacgaaagatgaaattctgaacttaaaacacttctgtttggccttctataactgatcacccttctttgctctgttttccagataaatggagacaccagatctccctaacctctgacttctgccgttagccatactctgtgtagttagatctcagtctgggaatggcattccagggcaattgtgaacatgaggctagatttttcctttgatttagcacattcctaggcagacttttgcaagctcaaaaaatgaaaataatatctgcttaaccaaaacataatcataggaagaagaaaaattttaaaatgattgatttttgactctacattctttatctaccatactgctcttttcctttttagaaatattactaagcactttcagtatagataaatgaaatacaggctaatctttaggtgtcttaggaatttttgctttttgaaaaagaaaagctaatagcctaactgcagaggaactgagtggatggggtagctgctgtatagatttttagatgagatgatacagtgtggattacactgtaccttgggcgggagagtttgttcttgatatggaattcatatgcttttgaattgcactaataactcagcattaacaagtatattactccttaaattatacatgcattttcaatattcctaaccaaatagtttatagcttattgagaagaagtctgttcttggagagatgttgaaattagatgtttattaaactttaaaatataatgccttaagctgtggcactttaaaaacatctttatatataaattgctaaaaggactgttaatgcttttctcagacacattggcattttacaattttgcacatggtttatttgaaatcaaaaaataactatactttgttttataagtctacctaatatctcatttttgattctcatcgttagcacagttttgttgcttttattaaactattttaactgagaaagtgtcatgtctgttttttgttttgatttaattgctacgcaaaattttgttttaccagatgtcaagttaatgta

SEQ ID NO: 3885 - DNA, 140 bp, Homo sapiens
tctctactaaaaataccaaaattagctgggcatggtggcacatgcctgtaatcccagctacttgggaggctgaggcaggagaatcgcttaaaccaagggagttggaggttgcagtgagctgagatcacgccactgcactc

SEQ ID NO: 3886 - DNA, 11311 bp, Homo sapiens
  SITE (7272): n equals a,t,g, or c
  SITE (7274): n equals a,t,g, or c
ggatgaacatgggtggcatccaacacatcaaggtaggagaataattcactcccatgtggaccgggctttccccctgtgttttctctctctgtcttctttcttaaaggattgaggaactattgttaatttcctttttgaaatcatttgaatatcaaaagtatggcagtttaaaagtgaaatagctcagtttatgttcattttgcattatctagatactgaatatcctgaagctattttaaaaataaatctgtataaattagattttatgatttttctaaccatgaagaaaatcatatgtacctaatggaagtatcccacagcaggtaaaatctgtttatgggaactaaatcgttgttcaagctcagtagctcagtatagcttaatttcttcccagtttaactcactgtcaagattaaagtgttacttagaatattacttcctatttcttatgtctaatataccttttctccctaattttttactggaaagcaaacttgtttgttttgctttgttttgtttttccaaaggaaaaacactacctttgggtgagtcttcccaaagattgaaaatgacctttggcggactattatctgtaactaatgcaatgaacgattcgccatcattcatttattcattcatccattcattttataagcatttatggcgaacatcctatgtgtcatatcccctgctaggcactgggaatacagtaatgaaccaagaagacaaaaattcctgttcttatggtgctagtaggaggagatatattaatacaaggaggaggaggaggagatatattaatacaaggaggaggaggagttgatatattaatacaaacatacatacatgaatgtttaatgcatgcatatgtgcatatgtatatgtataaaatatattagctggtgataagtgctaaggagaaaaaagagaaagaagattggaatgccaggcaataagggctaaagttttaaattcaggtggttaggaaaggcctcagttacaaagtagtatttgagaagagacctgaaggagtgagccatgtggcgaaatagggaaagagcacaagcacgtgcagaggccctaaggtttgagcacgcctgttgtttaaagtgaggaggcagcgtggcaaggagagagcaaagaaaaggaaatgggagaagctagggtcagagagggtgcagggtcagatcatgcagccttcaaggagtttgtagggacttgggcttttatgccaaatgagtcagggtttttggaggactttgagcagagaaatgccatgatccaacatgtttttaaagaaccacccttgcttagctaactgattttcagtctctgcactgataaaatagcagtgtagtgattaaaatttgaacaaagtcctaacgggttttactgttaagtggaaactgatcactcttggaaacacacacaaaaaagatgacctacgattacacaaatgggaggggttaatgggataattaccctgcagctgacagctttgatctggtaggtggtgaattcaagcacgatatttttcagagccaaattgcccaagctctgatcttaatgatattctagggtgtccagtagtatctagctgggaaacatagaatgaacttactttaaaagagtaaaacgataattttaaatatttttaatcatatgttaaatagttacattttcaaatacagtcatgtgccacatgacatcattttggtccaagatggatcatatatatgatgatgtctcatggtctcataagattataataccgtgtttttactacatcttttttgtgtttcagtatgtctagatacacaaataccactgcgttaccattgcctacagtattcagtacactaatatgctgtacaggtttgtggtctcgaatccataggctatatcatatagtctaggtgtgtagtagtaaactatttcatctaggtttatgtggctatatcctatgatgtttgccaaaaggaaaatcacctaatgacgcctttctcagaaggtatctttgtcattaagtgacaaacaactgcaatgtgctcaatatgttttcagatggagtatatctgcagctaaaataatgggtatagttgttaattagaaaaagtacaacaaatatactcaaaagtgtccaagaagtctggaaatagagaaaatagtatgtctactgcactctttaccaggtgaacccattgctttaaattaggaagtacttcccttgggaaagtgtctagagattaaagaaggatctattgactacattattttaaaatataattagtgctgagtaaaaattagtttatcctgttttttgtctttgtggacatcatgtactaggctgaccaatataaaattgccacctttgcagttttaaagtggtcaaatatcagttaatttatgtgattcaatctaatgtaaatatataaacaggcacatggctcagatgtggtcattttgatgccactattagaatgcagagttgtccttatgaagcctaaaagataattatgaactttctgtgtcttttccattgccaggtcatgtgtgcatcgggcattgttacccattcctaggcctcgctccttccccaaacctgggggaagcttaggcaggcctgagagctccagcaaggttgagagttagaatagtactttgcaaggaggttgcagaaagagatgggggagagaggagcaaatgtcatagttgtctcttgctcatgacacttggttataaaaagtaacgcttcttatgaagttttacatataagatgaagtgagtggaccaagaaattataatacattttttatcatcaaagagttgcatcaaccaggctatagcacaaagtctgattttcagtactgcctcatgacagtaaatatgcattttctagaatggtgctgtccagcagaacttttgtgacaatggaaatattcagtagctgccctgtccgaggcagtagccactagctacacatggctactgagcacttgaaatatggctggtgcaactgagaaactgaatttttaattaattgtaactaatttaaattggaaaagccacttgtgactagtggccatcaagtgaacacagttctggaaactggataattcagatttttttacctagcatctagggaattggagatactgacttaaaggatataattattttttaaaatagggcttctaggctgggcacggtggctcatacctgtaatcccagccctttgggattccgaggcaggcagatcacctgaggtcgggagtttgagaacagcctggccaacatggtgaaaccctttgtctactacaaaaatacaaaaattagccgggcatgttgtggtgcacgcctgtagtcccagctactcgggaggctgaggcacgagaactgtttgaacccgggaggcagaggttacagtgaactgacattgcaccactgcactccagcctgggctacagagaaaaaaaaaatacagcttctagtttagtgaagaaaagggcaatttgagggagagaaaaggaactgcgttctgtgtgaaaggacagagaagcctggtgatcagagaataagatcccaaggcacttcactggggctgacattcagggagcctcctggaagaatcatttcaaaagcaattgcagtcaaaacagattttgagagcactcttagacccagaaatgtatagttgtctgcatgtaagtgctaaggctaataaaaatcagaagacatttggaagacatatccttgaattgaaaaaaataataattgaatatagcaaatgcaagttcccacttgttcagcaatctgtttaacttcttatcagagtcattgttaatacttccttttgttgtacatgccagtgcctggatatctaacgtacaatttcttgtgctgtcatttccactttccttttcaccaatatgaccagtaaatacagtaagaaatagacactattgatacagagcctggatagtcattaataacagtaatgttagtatcgtattgagcactcactatgtgtctaagcttttgacaggtatttggaagataggtaagcactggataagtattagttgtttgttgctacatggtgtcttcactctaagagatacaatttttaattgtgatggaaatgtagagggtcactggtgtttatccacatgggagctataactaagaatagatggaacaaattcatactttttctaatgggggaactccaacaatcttagctctgagaatttgcagaatacagatctaaaagagggtggaacgaataagggaggtaatacatccagaagcagaaaaaatgctgaaaaaagctaatagctgtgactgagttgccagggaccccttctgggaccaggcacacatggttgctagttgaagaatcaaacaaaacagttggaagccaacagagggtggggacagttgtgtttagtaggtcaggagtcacataccatactgcactaaaagtatatagataatgcatactgctgcaaacctgcagtagtaaaaaatttgacttcacattcttatcaagtcttttcattgcaaaaaactttattaggcaaaagttacttttacgttaacagctaaagattagaattggctgctattctctatccataggaaagtgaaactataaaatatttaatctttgtgccccgggagagggggggggcgccacaaaatattttttaaaaacattttctcatctctcattctcccatcccctccaccccattcccctaacatgaattttgtgccatggttccattttacaaggaacagtactagccccctgaggacaccaggaaatgataacctcacaccctgcattagtagaattgaaaatctgtttttctgccatttatccttacagtataactctcctctttcacattctgcaactgatctagtgcttaaaacaaatggagtcttcaaaagcaccaatagacaaggataaaattacacatacagacagggtttccatatgagaacattaatgtaaaactgggcagagggtcagtttcttagtctcttcattctctgagagagttttgtgatggatcagaatgtaattgctccctctttcccacccccagggaaaatatgtgtctgcaagagcttattatgagagagccttacagctggttccagacagcaaactgctgaaggaaaatcttgccaaattggatcgcctagaaaaacgattacaagaagttcgagaaaaggatcaaacatagcaccaccgtctgacccaacctcataggataatgtggtgcctctgaaaggggagtgatggaagccttgctttcacatcagcaggggcacaactaatgagattttctctcattccgagttcagggtgacacattttgggacatctgctggtagcccagtgctgaaggacttgcttttccatgaagaagacgaaatcagccatcaagggcaagaggtctgagagggaaggagaatgacatttacacattttacagatttttgtttggtttaactccagatttctcttgatatatctctgtgcttttgaaacctggagatctaattctgtttagacattttttgtcccacaaatacagaagcttgaaatgctatgaaggcagagcttctattctttatgggatgaaatatttcaaaagaggataaatcctctgtggtaagccatttggaaaatcctaccaagaattggcttatttaattttccagaaccaggaatgagtatctaatagcttttgtagaaccttccagaatatgtggggaaaaagggctattgctaagtgagctttatctaatatcctcctaagagttttactagtgcttttttgaggaattacagggaagctcctggaattgtacatggatatctttatccctagggggaaatcaaggagctgggcacccctaattctttatggaagtgtttaaaactattttaattttattacaagtattactagagtagtggttctactctaagatttcaaaagtgcatttaaaatcatacatgttcccgcctgcaaatatattgttattttggtggagaaaaaaaatagtatattctacataaaaaattaaagatattaactaagagaaatgtcctactttattatcttaatgttcagacatcatgagatttattatttttttgaaaaatatattgaaccattgaggaacctttatgatgtatcacagaaatcttcatagattctaactagatggaaaaagagctctatttatttgtgttcctaggcttaatgagaattctgggcttagaacatcaacgattaatacccagaattctttgttttgagaatattatggagaatgctctaaaaatctagggtaaagatctaaattcaaattttaaatatatatttatatttaagaaataggaaaggcaaagttgaactcacaatttgacatttatttttagtgttatttatttcataacttataaaatatttaatatatacatacacactcttcttttttctctgtacaaagtggttttaatatcagctttcaaaactgatcttataaaatgtaaatctaaattgtaaaatagttaagttttaacagtccctcccaaactttgtgttgattattcacttgctaaagagatgtgaggaatcagccttcagttttttggcagtagtatattttggaagtgaagaaattggaacacctgtttctaatttggtcttcatcattaaagacaaaaccaaaacactccaggcagtactgtttatagtgctgagccaggtagcacacagacatagtagcctaaaggctcacataattcgcatgctcaggccagggcagggtaaaaatagccttctgcttctttcaacccagtatcaggaagcactaccccagtgttattatttgttttgtcaaggtaagtctaaataaacaagaaaaacttcttcggaaggcatggcgaagggagtattttaaatgaaaatgattacagaatttgaattagcatgcatctctttgtgtgcaacagtaatccaagaatgtatatgttaccactacaaccatttgtttctaatagttttttcatgttatataacataaatgtatccacaaccttaattaagaactattcttcccccaaaatcatagtcctagtgtcaagaaacatactccagtgtttattgtaaaataacaaccacaccctcacattgaaaaaagtgaatgtctagagctgatataaaaaaaattctttaataaggngnctcgaaccttttcagaataatctgtaatgaaaactcatgcttaaaaatttaatggaaaagactgagccccaaattttgaatagtgattatgccttacttgaagtgctaataaaggtaggagagtacatttgttggaataacagaaatggtgatttcagcctaaaagtttctgagggtaaaggatcacatgaccttcaggaaactctctgcctcctgtaggtgctttcctatctcccccatccttccctaccccttttcccttttccttcctctctttttctctcactgtcactctgtctacacacactggcatcttttgaacactaaaagtaagcactgttttttaaaaaagtaattatttgttggatcagatacttttatcccaagtgaataccttcactgagatgtggccaatgcaatagtttcacagtaaaaacagtgcctataagaaaatagatcacatactatttttcaatgatattaagtgtattttgtaactattttcatttggtccttgtaacatgaaataatacatggaacttacctttataataaaaatggagtgccctggttcatcatagaggtgcatctagtttgcccttaatggaagtatacttgctgtgtggattgatagcaccttcttgaaatggaggagctcagctggcctcatggatgtgcaatttttgcagtcccacagggccttgcatacagaagcaccccgagctcagttgaatgtctgtttgattttttcttatttatttttttgagacacagttccactttgtctttttgtcacccaggatggagttcagtggcacaaacatggctcactgtagcctcgacctccctggctgaagggatcctcccacctcagcctcccaagtaaccgagactacaggcatgtgccagcatgtccagctaatttttgtattttttgtagagacagggtttcaccatgttgcccaggctggtctcaaactcctgggctcaagcgatctgcccacctctgcctcccaaagtgctgggattaaaggcataagccaccatgtccaactgaaattcttaataattaataatttttgagcaagaggtccacactttcattttgcactgggttcccaaacaggtcctgggtaggaaggatggctgaggataaaacaggagttgctttggcctggctgaacatttgaaccaatgatcagagtttcattttatgattgtgttactctgaacagatttgctatttttttccagctacatttagagttcctcatgtatatatcacccctctttttccagtccatctaacctctccttttttttgtgcctagaatcagttctccttgccttcaaaatccctgataagtgtccatttctttttgtatcctttgatgtagaagccacaagaatggctttagcagcttattttaatcttatgaattattcattcaggattttttaaatgattcagatgctttcaatctgttaacagtatttataaaacatgtttcagtgatacaacataggtgaactaaaccaaagatgcaaatgccttggaggaaaagaaattgtattatagagaatcctgagatatatccttttgggttgtttaatttaaagcctatcacaaaacaaagagaattgtcgcactttaattccaacctcctgcagtacttcacaacccttagcataagattctgaaatttgtaataggtggtacctagtttgatgcagggttttgcagcagttgtgcgaatgcctctgcgcaacggcctttcagtcagactaaatgagaaaatccaaactgtcctatcaaaactgacccacaataactgtactctgaggcgaaacagagcaaatgtgggtttcctgttttcattgtaaaacattccaggttctcagattgaagagctacattcagctgatagttgacatctgttccctcacacgtagtggctctcaacacgggctgcactttggaatcacctgaggacctttcggaatcttcggttgaatcatcctggctgtcctggtgatgcttcttatgtgcagctaggctggagaaccactacagggctgacacctggaatgggagcttgtaacttttacaaaataatagatgtttatcatcttttgcaatttttacttttaagtctatactaaaatgagccaaagaagtcttaacaatgatgtatggcacaattggttggttgaggctatcattccatgattacaaataggtggttatgtggggtggttttgcacttgtggcaattggactgcaatttggccttaaaatgacacaattcctcgttctcagatggagaggaattgccttgaaatttgcatgtaccagactaagtgccagtatatatatgactgatattttcgtgactcatagaaggtgtccatggtatagagtttatgcctacatctctatctttattttgggcacacatgagcttttgttaattatttctttgtacttgttagaatctgtttttgaaaaaaaaaaaaacttttgctttgatttgtggtggattcaccttcttaaaataataaatttagaggatattaggaatgacattcaaaacaaatatagtgagaggtgattttttaaaaatttttgttcctggtttccaaattatgtttactttgatttgattatatgttggtatctcccaaatataggttaacttagctatttaaatggtatcttttgacatttaaaaagaattaagtacctgtcaaatcttgcattgaggttgcagttgaataagataaaagcttaggatgtcaaaaaataatatagagaaatattataagattttatgattattcttgaagtttttgatgcaaaaggaaaatatgctgaatagttcttccaaaaaatattatttccctcaatattttatttgtagccatgtaatttaaagagaacagaaaataactgcaatcaaaagtatggtttaatatcaatcaaagtggcacaacagaattgataagatctttataacaatcaattggctgatattaaaatattgattttaattgatcttttcaattaaaatctttagggcctgtaactcataaaatcagcatccaccacaatatatggtcattattggtttgtaagcatagatcaccattgactcctacctggagagacatgtctatttctaaaaatccagtagtttctttgcattctcagtagtacacgttgtatatatatatatgtaacaaatttggtagttttcagtatgtgtgatgtcctttgggggttatttatcttgctggtccataggaggggtacactaccccaagaatcaagacatctgagttctagttctagttctagctctgccactgaagagccaccttacctggggcaagttagccattgtctcccagtcatgtttaccacccatgaaaggactcgtcggtttgatgtttccattaagctcaatgagtaactctaatagttactcttgaatctggattgaaaaacaccatgcatctgatgagataattcataaatgttgccccttttttaaatgatacaaccctaaaagtgactgaattgcccaagtgcttgaacatggcagaggtagttactcttattttgcagtttgtgcacttaaaaattcctacagtgattgttactttactggggaaaaaagatgaggtgaaacttcctcccaaggaattaaaatatctgtagaagccatggcttgcttttataatgtggaaatcatttgatttgctgtaattcacgcagatccctccttttgtcagggggaaatgatttgcatcatgttcttttttcataatgcttttacttcctgtttggatcagttgtatgtaaatgtacatttttgttactttggctgtgcccgttagaatttatcttccataaagtatttctcccattgagtctaatgatgtatactttgcctaggtctttccaaaattaaatttatgtaaatgtctattttatataaaatatgattaaaataagtatgtctggtttcaatctc

SEQ ID NO: 3887 - DNA, 19866 bp, Homo sapiens
ggaataaagaactgtccagacagctcagatttacacaacaactatggggttttcttagttgatactggtaagtgaaattaaagagaaactgtactgctgagattagctaatacaatttatcaagcaaaatggaaggcaaataatcctcagaagtaaaattcactgggcttggcaggaagctcacactattgacagtcattatacctcggggctgtcatttctctagatcttcaagctcgattcagtaaaatctggccattctcatactcatttctctatggaaaactccccaggggacaggaagtagccttatgatttaataagtcccaatcttctttgaatattatttatatatatttataaatccatgatgatgaaatgtttctctacaatgatgcaaaacctgcctctgaaagcagttactggcagatggtaaatacttttctataacatattttttaaaagcctccagaattgttccatcattccttccttgatgtacattagaaactgcattattaaaattgatacaatgctcttatatgacaggtgctatataaaatacacttactttatcttacttaatgcaaaacattactgggcatgaattctcttttctttatgacttatgtagtgcctctgtactgttggcatgcaatgtaagtaatgaaattatatttaaatgtaaggccaaagcaccactttgttcttgttgattactagactagctgccctgcagcaaaatttagtttaattagtttttcaatatgaaatgcttaaaggggttttattttcaaggatatttggagctctcttgttttacagaatataaaatttacattctgatacatctaagaaacttaccttatttttgcctgtgtaaaattgttgtgtagtgccacctgctggttcattggccacataataataaactgtcttaaaaatataaaaactagaagaaacctctagttgggcaggtctaaccctcctccttttacttcaacaacagtcccaccccaccacacccctaaaaatgataactctgtgaccaccctatgacattgagcctctgcctccagagacagaggctcctagggacctcctagtcaaacttgtattcaaacagatacgcttgaaaagatttctgtgtagataatagacattccattctatttagaatttcacagtgttctaaagtgtagttactgaatatagtttcaccaggaagctactttgaagaaacctatcagagtagagggccttcattctgcttctggccttactctcacttgccttgggatctttatcaagtctgttgaatatctttgcactttagtgtctatatctgtaaagtggaaaatttttgtgtgtggttttttaaatatctcttaaatcctgataaacagctaaacagtatcaaaaggcagctaaattgtataaaaaaatacctgcaaaaaccatacaaatgtaagtatttaaaaatatataatgcattggacaagtgcatggtggcattattatgttgtaagtcttattaattaagtgccattcaaatgaaagtgcatgattttaaaagagattttcactatagagctgatatgtgttatttaaagtaatgcttcaattgctatgttgaagtatagttcattgagacagacccttagaaattgcttctggacagttttatttctacagtagcctgttctattttttatataatgagagccagttatatcttggataaataacaatcactaataatctgaaggcatcctattagcaagagcgatgaccagaaaaatttcgactaaaataatatatataattaaaacaataggttttagtttttactgcttttttgttaatttttttggaagtatgaatgaacagtgaaattgttcaaagttaggcaatggccaggatgagaagctgaaatgcaagctaatttgcatattgaataattttggtataactctgtaataatgagaaagaattataagtcagaagagaaagtgaaatgttcatgtcttttataaaaaggcatgttctgctcttaccaacctgtcactggttacaggcttaccagaaaaggcagtggcccattaccagcaggccatcaaacttagccccagtcatcacgtggccatggtgaacttgggaagactctacaggtcactgggagagaacagcatggctgaagaatggtacaagcggtaaagttccctttcttttctttataagttgcccaggaacctcagcaatcactcatcagcttcttagttaatcagaataggtgtgctctcagaatactagcaaattttgccaattcaggtgatacaaatttttatctccaaagaaagcaaccacaatataaatgggatcataattcatgactttggcttgctggttagactatagtgctgaaccaaggttgaaatttaattcccactttagtcagtttgttgttttctgaagccatggattgcaaccccaatcataaacagcaatttaaaaaatgaggatacatgaaaaactatgcacacatgagaacaaattcatcataattaatgagaaagacccttggggctcagtttccatattgataggtcaataagacattcttacgttccaactatggcatcatgatcattttgtaaaaaccttgttcttggccaggtgcggtggctcatgcctgtaatcccagcactttgggaggccaagatggtcgaatcacctgaggtcagatgttcaagaccaacttggccaacatggtgaaacctcgtctctactaaaagtacaaaaattagccgggcatgatggcgggcacctgtaatccctgctactcaggaggctgaggcaggagaatcacttgaacctgggaggtggaggttgcatgagccaagattgtgccactgcactccagcctgggtgacagagtgagactctgtctcaaaaaaaaagaaaaagccaaaaaccttgttattgatataaaaacaaagaccgtattggagcagaggttcaaaccatggaccgtcttccctaaatctaagcctagacatttggaaatgtacctattagaagagaaatgtcatttagattttctccaaactcagcgccctgcaggtggcacacaaagctgagatattgtcacctttgggagcactgtattacaacactggccgatacgaagaggctttgcagatttaccaggaagctgcagcacttcagccttctcagagggagctccgcttggcactggtgagtaggatgaaagaaaatgaagctggcaacctaagcacaggcagccatagagagagctgtagtcctcacgcctcaaaactggagctggaatgccgtaatatatccactgtatgaatattcatacagctaatgttagagccattctctaaagacatggacaccaaaaatactgcatttttgttttgaaataacttcaaacttatgaaagtgttgcaagaatagtaaaaaatttacatataccctttcatccagctccaatgatttgtaacattttgattcatttatcactccattgtgtatgcatatgtagatgtatatgtacctacatgtatatgtgtgcatatttagatatgtatgtttgtatatacctattattagtgtgtgttatttttttcctgaaccatgtgggaattagttgtatatatcattcccctttatctctaaatacctttgcaaatagtttctaagaaggacattctctaacataaccacagtgtatttattagactcaggaaaattaacattcataccaacaaaatttttatttcagtgtttggaacttcactcatccttttccttagatgtgcaataaatcaaatttgttatcttgctgtaaacacactgttctgatgaaatcagaggaaattctttctcttctgacttatttggtcaaccttttttaaaagccacaagccatttcactggatatatttagtgtttctgccactcactcacaaatgcatgcacaaaactaaataaagaaacaaacagcaaaaagtcaaaacctgaaaactggtgattcagccttctctatgagtcactaaattgatgctgagcatgtttgtcaggagtgcgttctgaatgcttctattcagggatgctttatttgataaggtaatgaagtctctgctaagccaaggtccatgtggttttgtaggctcaggttttggccgtgatgggtcagacaaaagaagctgaaaagatgaccaatcacattgtgtcagaggagaccggatgccttgaatgctatcgcctcttgtcagccatctatagcaagcaggagaaccacgacaaggtaaagaaggacattgtttagagttctttggattcataggttaaacatggggtgcacctaagtgattctccagtttgcgtgtttataagcctgggaaatcttaaatcttatccgtcagcatatcctatctcttggaaacttttcacagatatccccttaacacctaagatgtccccttgtaataatatttttcttggcttatctttggtgtaaagcttttatgtggtattgtcttagtttgttttcagctaagtctataaagatcaagaccaacatttatatgctttattattttgtattttccttcttatatattgttttatgtaatcctcataacaaccatgctttacagggttgttatgaggattacataaaacaatatagaagaggaatatataggaagattacatgaaacaatatataagaaggaaacacagggtgacccaatgtcacaactgttattatctccattttaaaagtcacataatcagtaaatttataaactgactcaatgaagtaattgttgaaggcccactatgtcctggccactgtagtaggcatcagaaataaagtggtatgaaaaaaaaaaaaaaaaagtcactgcccttgtcttcatggagctaacccatagagaaggagattaaacaggtactcacaaaacaaatgtagagtgatagctgtgcccaggaatatcatgaagcgctacctctcccaaagagcatataatcaggggacccgatgagtctgggaggccaggtctccctgtaaagtgatgtggaggtgagggctggatgaagaataagagttgttaggcagaggaagaagcaaggaggattctgggcagggaaacgcacatgcaaagccctgtggcagcagtgaggggcctctctgaggaatgggagtgagggagcaggagcaccgtaggaacgcaagcacaggctgctgggaggagactccttggggccaggccaagggttttgttccttaccatgggagaagctttgggtttttgtggagaggaggaacatgatcagatatttgctttgaagggatctttggctgcagtggggtcagtgggtgctgggggcagaatggtcactaggacctgagaggggctggtggggtggtccagatgaacacatggtcagggaaaacgtctgatgccaaatcttgttttctttcaactgtatcacaccacctccctgtaaagtaatcaaggatattttattgccactcatcgatacgtgggaaaactggagtgtaagaaagttattttgtcagggccactaattcccagtgagaaaatcaaagataatgaagaatgtatatatatttgagacaaggtcttcctctgttgcccaggctggagtgcagtggcatgatctcacctcactacaaggtccacctcccagggctcaagagatcctcccatctcagcccccccagtagccgggattacaggtgtgcaccaccacacctggctaatttttgtatttttttgtagagacagggtttcaccatgttgcccagactgatctcgagctactgggcaatctgcccacttcaacctcccaaagtactaggattacagccattagccactacgcctgaccaagaattgtactttgattgtcacataccatacctgctgacacataggaacaaaaagtataaatttgatcagttaaataagtttttctttacctaatctgcatttattctgtcttaatttccaacctctgcaggcacttgatgctatagacaaggctctccagctgaaaccaaaggacccaaaagtcatttctgaactttttttcacaaaaggaaaccaattaagagagcagaaccttctcgacaaagcttttgaggtataaactcatcataaaattatatcatcaaattcacagattaaaattaattgtcttttgatctttaaggaaacatgtacagtaagatctaagatcactggcatgtatgtttatggagtgagtgagttttttttaactaattgacgaagttttgtttattttttatcattgagcatctggcccttgactgaatcagagttgcgcatttatttttctgaataatcatgtttaatttgatgttgacagcattccacattttggcctcaaactagcttctctctgtctgtgtctctgcctgcaagaccttctattccagctggactagtacctgaaaagccttggacattcccacatgtccttgaaatgccctctcttgacttggaggatgagatttccactcatccaccaagatacagtctttgtcctcctgccttaggaagccctccctaaccgtccttattccctgtgaccttacttcttctgaactcttaaaaagcatggactgtctcatgaaggtaccagtcgtttgaaagtgtcacatattacattgtattattaggtccgtcccctaacccccgtatgtgtgtgtgtgtgtctctgtgtgtgcaggcacgcacaaatccttgcatagtttatctccccagttagattggactttccttgtagagagggactgcatccttctctgttctaaaacaatgttttgcatcttacaaggtgttcagtatctatggttttggaataaaacttattcacaggttgaactcaagaagacataagtagaaatagaaatgttacaatgttacatactttctccttatatctggtaaagccacaaattattgaagtcataaaattatactaaatatattataggaaaagtaaaatctcaaatgatacaattgtgttgggaaataagtgagtggatttttaaatattattggaaaacacatggaaagatatttgggaaagctcatttgaatgtgaatcctttaatcaaaaacagaaattgtggcatttttctcagaatttgtaggattttctctgccttttcaacattttcaatatcgtcattcttaagttatttataacgaatgtgaacattattaataacttaattgtgaatatgtatgtgtgtgtgtgtatatatatatatatatggccattgattcataataacagctgaaatgtattatcactctgtgcatgattcatatgtattatgtaacttaatcttcacaagaatcctataagaaaggcatggtcattatcatcattttatagttttgtaaactcaggcttaaaggtcatatcttgctcaaagtcacagaagtgggtaagagacggtgtcagggtttgaatccaggtctcctacactacattcccatcttcactgatataaattaatccaagagacacacccttttggtttattttagcagctttttgaaggtatagtttcataacatttctttctttcccctaaaactgaagtagaggagaatggaccagattttatttgatggacctgtttggtcatattcttgctaatgaaaatagcaaggaacattaaaatatgtgcacaaatacttagctttgtaattaaaggcaatacccttaacctgtggctttatttcaggtgaccacttgagactcagtggtgagcacacctttgatacaaaacatgcataatgttaaaaatataccacacatcactgatactacatttaataggatacatgttattcagaccaaagaaagtgcttgagggataagtaactctctttaaacatttgaagacttttcatgtggcaggggaaaaaagactgtctaatgaataaaactatcccctagtaaagtagatgttcttaaagaggcggtgatccactttaagaatttcagcataggctgaacgactaggtcagttatattgtaaaaggggatactgcattagggttaaactgttcagaagactactccaaaattctgttattataaaaagaattttcttaccaattccatttgcagtgaaaaaaggccagaaagtacaattttcttgcaggtcaaggccagttaaaaatgatgtgatataatagaaatcacctgaattccctgcaggcatcctcagtctctctaagtccaaaggtcagctctgcagggaaattatacatttcagtttcctccactttagaatcatcaactttgaaaaataatagaaataagcagggtctcctgtgaactagtagcggctggtttcattgtattactactttaaattttcacacgtgaagaaagtggtttctgcaatcctggagtttggaggtttgtttcctaacctgaggatatttcttatttatttagagctatagagtggctgtgcaactaaacccagaccaagcacaggcctggatgaacatgggtggcatccaacacatcaaggtaggagaataattcactcccatgtggaccgggctttccccctgtgttttctctctctgtcttctttcttaaaggattgaggaactattgttaatttcctttttgaaatcatttgaatatcaaaagtatggcagtttaaaagtgaaatagctcagtttatgttcattttgcattatctagatactgaatatcctgaagctattttaaaaataaatctgtataaattagattttatgatttttctaaccatgaagaaaatcatatgtacctaatggaagtatcccacagcaggtaaaatctgtttatgggaactaaatcgttgttcaagctcagtagctcagtatagcttaatttcttcccagtttaactcactgtcaagattaaagtgttacttagaatattacttcctatttcttatgtctaatataccttttctccctaattttttactggaaagcaaacttgtttgttttgctttgttttgtttttccaaaggaaaaacactacctttgggtgagtcttcccaaagattgaaaatgacctttgggggactattatctgtaactaatgcaatgaacgattcgccatcattcatttattcattcatccattcattttataagcatttatggcgaacatcctatgtgtcatatcccctgctaggcactgggaatacagtaatgaaccaagaagacaaaaattcctgttcttatggtgctagtaggaggagatatattaatacaaggaggaggaggaggagatatattaatacaaggaggaggaggagttgatatattaatacaaacatacatacatgaatgtttaatgcatgcatatgtgcatatgtatatgtataaaatatattagctggtgataagtgctaaggagaaaaaagagaaagaagattggaatgccaggcaataagggctaaagttttaaattcaggtggttaggaaaggcctcagttacaaagtagtatttgagaagagacctgaaggagtgagccatgtggcgaaatagggaaagagcacaagcacgtgcagaggccctaaggtttgagcacgcctgttgtttaaagtgaggaggcagcgtggcaaggagagagcaaagaaaaggaaatgggagaagctagggtcagagagggtgcagggtcagatcatgcagccttcaaggagtttgtagggacttgggcttttatgccaaatgagtcagggtttttggaggactttgagcagagaaatgccatgatccaacatgtttttaaagaaccacccttgcttagctaactgattttcagtctctgcactgataaaatagcagtgtagtgattaaaatttgaacaaagtcctaacgggttttactgttaagtggaaactgatcactcttggaaacacacacaaaaaagatgacctacgattacacaaatgggaggggttaatgggataattaccctgcagctgacagctttgatctggtaggtggtgaattcaagcacgatatttttcagagccaaattgcccaagctctgatcttaatgatattctagggtgtccagtagtatctagctgggaaacatagaatgaacttactttaaaagagtaaaacgataattttaaatatttttaatcatatgttaaatagttacattttcaaatacagtcatgtgccacatgacatcattttggtccaagatggatcatatatatgatgatgtctcatggtctcataagattataataccgtgtttttactacatcttttttgtgtttcagtatgtctagatacacaaataccactgcgttaccattgcctacagtattcagtacactaatatgctgtacaggtttgtggtctcgaatccataggctatatcatatagtctaggtgtgtagtagtaaactatttcatctaggtttatgtggctatatcctatgatgtttgccaaaaggaaaatcacctaatgacgcctttctcagaaggtatctttgtcattaagtgacaaacaactgcaatgtgctcaatatgttttcagatggagtatatctgcagctaaaataatgggtatagttgttaattagaaaaagtacaacaaatatactcaaaagtgtccaagaagtctggaaatagagaaaatagtatgtctactgcactctttaccaggtgaacccattgctttaaattaggaagtacttcccttgggaaagtgtctagagattaaagaaggatctattgactacattattttaaaatataattagtgctgagtaaaaattagtttatcctgttttttgtctttgtggacatcatgtactaggctgaccaatataaaattgccacctttgcagttttaaagtggtcaaatatcagttaatttatgtgattcaatctaatgtaaatatataaacaggcacatggctcagatgtggtcattttgatgccactattagaatgcagagttgtccttatgaagcctaaaagataattatgaactttctgtgtcttttccattgccaggtcatgtgtgcatcgggcattgttacccattcctaggcctcgctccttccccaaacctgggggaagcttaggcaggcctgagagctccagcaaggttgagagttagaatagtactttgcaaggaggttgcagaaagagatgggggagagaggagcaaatgtcatagttgtctcttgctcatgacacttggttataaaaagtaacgcttcttatgaagttttacatataagatgaagtgagtggaccaagaaattataatacattttttatcatcaaagagttgcatcaaccaggctatagcacaaagtctgattttcagtactgcctcatgacagtaaatatgcattttctagaatggtgctgtccagcagaacttttgtgacaatggaaatattcagtagctgccctgtccgaggcagtagccactagctacacatggctactgagcacttgaaatatggctggtgcaactgagaaactgaatttttaattaattgtaactaatttaaattggaaaagccacttgtgactagtggccatcaagtgaacacagttctggaaactggataattcagatttttttacctagcatctagggaattggagatactgacttaaaggatataattattttttaaaatagggcttctaggctgggcacggtggctcatacctgtaatcccagccctttgggattccgaggcaggcagatcacctgaggtcgggggtttgagaacagcctggccaacatggtgaaaccctttgtctactacaaaaatacaaaaattagccgggcatgttgtggtgcacgcctgtagtcccagctactcgggaggctgaggcacgagaactgtttgaacccgggaggcagaggttacagtgaactgacattgcaccactgcactccagcctgggctacagagaaaaaaaaaatacagcttctagtttagtgaagaaaagggcaatttgagggagagaaaaggaactgcgttctgtgtgaaaggacagagaagcctggtgatcagagaataagatcccaaggcacttcactggggctgacattcagggagcctcctggaagaatcatttcaaaagcaattgcagtcaaaacagattttgagagcactcttagacccagaaatgtatagttgtctgcatgtaagtgctaaggctaataaaaatcagaagacatttggaagacatatccttgaattgaaaaaaataataattgaatatagcaaatgcaagttcccacttgttcagcaatctgtttaacttcttatcagagtcattgttaatacttccttttgttgtacatgccagtgcctggatatctaacgtacaatttcttgtgctgtcatttccactttccttttcaccaatatgaccagtaaatacagtaagaaatagacactattgatacagagcctggatagtcattaataacagtaatgttagtatcgtattgagcactcactatgtgtctaagcttttgacaggtatttggaagataggtaagcactggataagtattagttgtttgttgctacatggtgtcttcactctaagagatacaatttttaattgtgatggaaatgtagagggtcactggtgtttatccacatgggagctataactaagaatagatggaacaaattcatactttttctaatgggggaactccaacaatcttagctctgagaatttgcagaatacagatctaaaagagggtggaacgaataagggaggtaatacatccagaagcagaaaaaatgctgaaaaaagctaatagctgtgactgagttgccagggaccccttctgggaccaggcacacatggttgctagttgaagaatcaaacaaaacagttggaagccaacagagggtggggacagttgtgtttagtaggtcaggagtcacataccatactgcactaaaagtatatagctaatgcatactgctgcaaacctgcagtagtaaaaaatttgacttcacattcttatcaagtcttttcattgcaaaaaactttattaggcaaaagttacttttacgttttaagctgaagactagaataactgctatcactaaacagagagagtggatacataaactatttaatcattcttcttgcagttttaaaaacattttctcatctctcattctcccatcccctccaccccattcccctaacatgaattttgtgccatggttccattttacaaggaacagtactagccccctgaggacaccaggaaatggtaacctcacaccctgcattagtagaattgaaaatctgtttttctgccatttatccttacagtataactctcctctttcacattctgcaactgatctagtgcttaaaacaaatggagtcttcaaaagcaccaatagacaaggataaaattacacatacagacagagtttccatatgagaacattaatgtaaaactgggcagagggtcagtttcttagtctcttcattctctgagagagttttgtgatggatcagaatgtaattgctccctctttcccacccccagggaaaatatgtgtctgcaagagcttattatgagagagccttacagctggttccagacagcaaactgctgaaggaaaatcttgccaaattggatcgcctagaaaaacgattacaagaagttcgagaaaaggatcaaacatagcaccaccgtctgacccaacctcataggataatgtggtgcctctgaaaggggagtgatggaagccttgctttcacatcagcaggggcacaactaatgagattttctctcattccgagttcagggtgacacattttgggacatctgctggtagcccagtgctgaaggacttgcttttccatgaagaagacgaaaacagcaaacaagggcaagaaggtctgagagggaaggagaatgacatttacacattttacagatttttgtttggtttaactccagatttctcttgatatatctctgtgcttttgagacctggagatctaattctgtttagacattttttgtcccagaaatacagaagcttgaaatgctatgaaggcagagcttctattctttatgggatgaaatatttcaaaagaggataaatcctctgtggtaagccatttggaaaatcctaccaagaattggcttatttaattttccagaaccaggaatgagtatctaatagcttttgtagaaccttccagaatatgtggggaaaaagggctattgctaagtgagctttatctaatatcctcctaagagttttactagtgcttttttgaggaattacagggaagctcctggaattgtacatggatatctttatccctagggggaaatcaaggagctgggcacccctaattctttatggaagtgtttaaaactattttaattttattacaagtattactagagtggtggttctactctaagatttcaaaagtgcatttaaaatcatacatgttcccgcctgcaaatatattgttattttggtggagaaaaaaatagtatattctacataaaaaattaaagatattaactaagagaaatgtcctactttattatcttaatgttcagacatcatgagatttattatttttttgaaaaatatattgaaccattgaggaacctttatgatgtatcacagaaatcttcatagattctaactagatggaaaaagagctctatttatttgtgttcctaggcttaatgagaattctgggcttagaacatcaacgattaatacccagaattctttgttttgagaatattatggagaatgctctaaaaatctagggtaaagatctaaattcaaattttaaatatatatttatatttaagaaataggaaaggcaaagttgaactcacaatttgacatttatttttagtgttatttatttcataacttataaaatatttaatatatacatacacactcttcttttttctctgtacaaagtggttttaatatcagctttcaaaactgatcttataaaatgtaaatctaaattgtaaaatagttaagttttaacagtccctcccaaactttgtgttgattattcacttgctaaagagatgtgaggaatcagccttcagttttttggcagtagtatattttggaagtgaagaaattggaacacctgtttctaatttggtcttcatcattagagacaaaaccaaaacactccaggcagtactgtttatagtgctgagccaggtagcacacagacatagtagcctaaaggctcacataattcgcatgctcaggccagggcagggtaaaaatagccttctgcttctttcaacccagtatcaggaagcactaccccagtgttattatttgttttgtcaaggtaagtctaaataaacaagaaaaacttcttcggaaggcatggcgaagggagtattttaaatgaaaatgattacagaatttgaattagcatgcatctctttgtgtgcaacagtaatccaagaatgtatatgttaccactacaaccatttgtttctaatagttttttcatgttatataacataaatgtatccacaaccttaattaagaactattcttcccccaaaatcatagtcctagtgtcaagaaacatactccagtgtttattgtaaaataacaaccacaccctcaaattgaaaaaagtgaatgtctaggactttattacaacttttcagaataatctgtaatgaaaactcatgcttaaaaatttaatggaaaagactgagccccaaattttgaatagtgattacgccttacttgaagtgctaataaaggtaggagagtacatttgttggaataacagaaatggtgatttcagcctaaaagtttctgagggtaaaggatcacatgaccttcaggaaactctctgcctcctgtaggtgctttcctatctcccccatccttccctaccccttttcccttttccttcctctctttttctctcactgtcactctgtctacacacactggcatcttttgaacactaaaagtaagcactgttttttaaaaaagtaattatttgttggatcagatacttttatcccaagtgaataccttcactgagatgtggccaatgcaatagtttcacagtaaaaacagtgcctataagaaaatagatcacatactatttttcaatgatattaagtgtattttgtaactattttcatttggtccttgtaacatgaaataatacatggaacttacctttataataaaaatggagtgccctggttcatcatagaggtgcatctagtttgcccttaatggaagtatacttgctgtgtggattgatagcaccttcttgaaatggaggagctcagctggcctcatggatgtgcaatttttgcagtcccacagggccttgcatacagaagcaccccgagctcagttgaatgtctgtttgattttttcttatttatttttttgagacacagttccactttgtctttttgtcacccaggatggagttcagtggcacaaacatggctcactgtagcctcgacctccctggctgaagggatcctcccacctcagcctcccaagtaaccgagactacaggcatatgccagcatgtccagctaatttttgtattttttgtagagacagggtttcaccatgttgcccaggctggtctcaaactcctgggctcaagcgatctgcccacctctgcctcccaaagtgctgggattaaaggcataagccaccatgtccaactgaaattcttaataattaataatttttgagcaagaggtccacactttcattttgcactgggttcccaaacaggtcctgggtaggaaggatggctgaggataaaacaggagttgctttggcctggctgaacatttgaaccaatgatcagagtttcattttatgattgtgttactctgaacagatttgctatttttttccagctacatttagagttcctcatgtatatatcacccctctttttccagtccatctaacctctccttttttttgtgcctagaatcagttctccttgccttcaaaatccctgataagtgtccatttctttttgtatcctttgatgtagaagccacaagaatggctttagcagcttattttaatcttatgaattattcattcaggattttttaaatgattcagatgctttcaatctgttaacagtatttataaaacatgtttcagtgatacaacataggtgaactaaaccaaagatgcaaatgccttggaggaaaagaaattgtattatagagaatcctgagatatatccttttgggttgtttaatttaaagcctatcacaaaacaaagagaattgtcgcactttaattccaacctcctgcagtacttcacaacccttagcataagattctgaaatttgtaataggtggtacctagtttgatgcagggttttgcagcagttgtgcgaatgcctctgcgcaacggcctttcagtcagactaaatgagaaaatccaaactgtcctatcaaaactgacccacaataactgtactctgaggcgaaacagagcaaatgtgggtttcctgttttcattgtaaaacattccaggttctcagattgaagagctacattcagctgatagttgacatctgttccctcacacgtagtggctctcaacacgggctgcactttggaatcacctgaggacctttcggaatcttcggttgaatcatcctggctgtcctggtgatgcttcttatgtgcagctaggctggagaaccactacagggctgacacctggaatgggagcttgtaacttttacaaaataatagatgtttatcatcttttgcaatttttacttttaagtctatactaaaatgagccaaagaagtcttaacaatgatgtatggcacaattggttggttgaggctatcattccatgattacaaataggtggttatgtggggtggttttgcacttgtggcaattggactgcaatttggccttaaaatgacacaattcctcgttctcagatggagaggaattgccttgaaatttgcatgtaccagactaagtgccagtatatatatgactgatattttcgtgactcatagaaggtgtccatggtatagagtttatgcctacatctctatctttattttgggcacacatgagcttttgttaattatttctttgtacttgttagaatctgtttttgaaaaaaaaaaaaacttttgctttgatttgtggtggattcaccttcttaaaataataaatttagaggatattaggaatgacattcaaaacaaatatagtgagaggtgattttttaaaaatttttgttcctggtttccaaattatgtttactttgatttgattatatgttggtatctcccaaatataggttaacttagctatttaaatggtatcttttgacatttaaaaagaattaagtacctgtcaaatctagcattgaggttgcagttgaataagataaaagcttaggatgtcaaaaaataatatagagaaatattataagattttatgattattcttgacgtttttgatgcaaaaggaaaatatgctgaatagttcttccaaaaaatattatttccctcaatattttatttgtagccatgtaatttaaagagaacagaaaataactgcaatcaaaagtatggtttaatatcaatcaaagtggcacaacagaattgataagatctttataacaatcaattggctgatattaaaatattgattttaattgatcttttcaattaaaatctttagggcctgtaactcataaaatcagcatccaccacaatatatggtcattattggtttgtaagcatagatcaccattgactcctacctggagagacatgtctatttctaaaaatccagtagtttctttgcattctcagtagtacacgttgtatatatatatatgtaacaaatttggtagttttcagtatgtgtgatgtcctttgggggttatttatcttgctggtccataggaggggtacactaccccaagaatcaagacatctgagttctagttctagttctagctctgccactgaagagccaccttacctggggcaagttagccattgtctcccagtcatgtttaccacccatgaaaggactcgtcggtttgatgtttccattaagctcaatgagtaactctaatagttactcttgaatctggattgaaaaacaccatgcatctgatgagataattcataaatgttgccccttttttaaatgatacaaccctaaaagtgactgaattgcccaagtgcttgaacatggcagaggtagttactcctattttgcagtttgtgcacttaaaaattcctacagtgattgttactttactggggaaaaaagatgaggtgaaacttcctcccaaggaattaaaatatctgtagaagccatggcttgcttttataatgtggaaatcatttgatttgctgtaattcacgcagatccctccttttgtcagggggaaatgatttgcatcatgttcttttttcataatgcttttacttcctgtttggatcagttgtatgtaaatgtacatttttgttactttggctgtgcccgttagaatttatcttccataaagtatttctcccattgagtctaatgatgtatactttgcctaggtctttccaaaattaaatttatgtaaatgtctattttatataaaatatgattaaaataagtatgtctggtttcaatctc

SEQ ID NO: 3888 - DNA, 3425 bp, Homo sapiens
agccctattaaccctggttggctttatctttcccctgaccctgtgcttaagttcactttctctctagctcttcctgctcttgttcccttcttgtgtacctgaactacatttaacatcctgactcaaaacagccgagtttctaaccatgctacttgttattgtaccatttcctttctaacccagattatcatctctgtttcaaatttcttgctgtggtaacctcaccttaatttctatgtcttcgttagctcaatagattgccatgatatttttttaccacggcccataacctctttaatggcttggcagcaggacctttcctttgattgtttcttgaagatatgagatctatagttcagttgtatcgttggctcttaagggcctggaacatgcaacaatagggcttccgttgttgcatggcaaacatgagaattttgcatggcccttactggggagtttcctcctcatttgactgatgtgagtagagactcttagagccagccaccatcataatcatctactagaatcccaagatgctttccccagcagctaatagcgctgttgtctgtgggtagggggaaaacaccaccctaaccctgaagaatccatgacatagtgctattactttgatgtgaataagtctggaaaatagtctctttctactgtggtttgctctataaaatccttgcctctgaattttcctgaaaactatgctttattctgacttacgggttagacaattttagtaagtatgttagtaaacaaatttttttaggggatcaggaaaagaaatagtgaacttgacaatggcattctttagttttcagtttggaatttaattggaaactcatttagattttaataaaaagggaataaatatatatcttgtatcatgtggatgccttaggctgtcagtaacagaacactccagtgaagaaaagatctcccagaacaagaagtccagaggaagggagagaaggaagacaggttcgggattggttaatttagtggctcactgatctaatcaaggaccccgacactttgcatctttatactctgccattctcagaatcttctctcatgattgtactctggctgtattgaatgcagactcaacagtgtcttatgaagaaatggaatatttcctcctgtacatctctttttgttagcaagacaacaatttcatggaaaccctccagtttttccctcaggtcctattgattaggattggggtcacttgcctttcttaaaccatctggcaaggggaatgagaccattatgattggcttgaaccaattaggagtcactctcctgggattggggagggccctgcctctaagtagttagctgcctgataattctgcaaaagctggcttctattagcaagggaggaggaggggaatgatgtagaataatgactattgtcaggccacagcatggggcattttacttacatttaaacataaggtaatacttagtttctgctacagaatttctaatacatgtacttaagagttttgctggctgggaacagtggctcatgcctgtggtcccagtgctttcagaggctgaggcaggaggatcgcttaagcccagcctcagacttctgtttgaggctgcagtgagctatgatagtaccactgcgtgccagcctgggcaacagagcaagaccctgtctcaaaattaaaaaaaaaaaaagaaaaagaaaagaaagaatgttgcctgactaagatccaggggtgaataccttagattaatgttgattatactcaaaactgcagactatttgaaaatagttcttaatgatgagaaaaagtcaaaggctctctggattcttttttatctttttggtgccttattaaagaatttagagaaattgcaaatgagagtattattttgatggtttttaagtacttcatactgttgtgttattcttagtactttcagttttcctcaggaagattattaggagaataataattttatatcttttgactgagcaaaaatgcacttaagattaatggattagttagatgtcagttttctgattgtgatattgtactactatagttttgtaagatgttaccacttggggaagctgggtaaagagtatatagcagatttctgcattatttcttacaattgcacttacctcaaaataaaacatttaatttaaaaaaatgtatataaacatcaggaggattagagtaataaagctacttaagagtagacccaaaatcctacagtcatatgtggataaagaaatggaaggtaaaaattaagaagcattctgctaatgttgtggaatgtaataattacagatgcaaacagaacaattattaccagtccacctgcttcgcaggaagataaaagtaataaagtaaattaaaccaatattttaagttactttttattttcttgggctcaagttgctacttccctggtttataattattagaccaacatctgaatagaagcttcaagggcagagatcgttttattcatctttgtatccccccaaagtgcttaacaccatggttttattacacatagtaagcagcgcccttttcaataacatctgttataatataaatgaagacttttaatgctatttcaattagcaaaattatattttgttttgtgactcttctcatttaagggacacctttgagagcagtttcattattaagcctaactcaatgatttccgtagtatattcttagacactatatgattatggaagagaaaaacatattaacaaatttttgttgccatacattgttatttttaattgccaataaaataattactaagagatatttgtagttaaaagtgtggggtttttggtggggcttattctgtaaaataggaaaaggcttaaaagatgatagttaaaaatggccgggaatggtggctcacgtctgtaatcccggcactttggtaggccgaggggggcagatgacttgaggtcaggagtttgagaccagcctgccgacatggtgaaaccccatctctactaaaaattagctgggtgtggtggtgggcagctgtaatcccagctactctggaggctgaggcaggagaatcgcttgaagctgggaggcagaggttgcagtgagcccagatcgtgccactgcactccagcctgggcgacagaaagagactctgtctcaaaaaaaaaaaaaaatatatatatatataaaataaaagatgatagttaaaaagataatagcttaggatgttacagtgatagatctgaaggtaacttgtacttaaggaacgagaacagtgagaaatatatgtttttaatggagttgatactatttcatgtggtctttggttttgaacaggtgtattacctgactgcttaaccgatggctctgatgtggtcagtgaccttgaacacgaagagatgaaaatcctga
